United States Patent Application Publication US 2015/0376612 A1 - sequence listing, part 33

SEQ ID NO: 79790 - DNA, 1053 bp, Homo sapiens
ggaatccagtcaggggatgtcaacattgacatttccccttccaattagtctcaagagttcacatatctcactctgttcaatacaacctggagtgtaatcatttgttggtaataacctagcccttgtttagcctcatggatctgactctgaacctggacatcctatggacaaaaacaccacttgctttttattggcatgttgggtagaatggctccacacagccaggaaacaattttatttttcccctttgcaactcaattatgaggctgaagggcacatatagatttttctgcaggaatcaaagggctttcaggcttacttgatgagtagatttctgcatcacctccgtggtaaagggttagctgcttttaagaggcaaaaatgcccagactgaaataaagaaggaaaaaaaataataatacattccagaccaccttgtaaaaaataggtaggcgttctcaatcttggcctttcactccagtcccacttgaggccactctctttccagaggctctatggaacaacaagggtggtgagaacgctgaattaggaggcaaaagcccatgctagtgttctgtcccctaatgtgacccacgcttagtggggatcctgttcagaaccttcaacctgctcttcctctgtctctctgcctataaaatgagggaagtagattggctactttaacaaatctcccctttataaataacttgtgactctattttctatggttttttttcagagtacatctttctccatttatttatgtgtgtgagggttcaatcgttcgataaaggctatgtttgagagaagatggaaaggcatggaataagttttgatcttgggtttactgctaacattgacttttcccgttagcccacctaggttctaaagagctagtatccagagctttgacacatggggtgccaggctttgtttctctgttaaaatcccccaaatttcctgactcctcagaacagctcagctcagctgggagtctgtggctgaggctggccgagacatcagcagagtacctggaatggaactccaagcagg

SEQ ID NO: 79791 - DNA, 1054 bp, Homo sapiens
cacctccccatgggcaagcactttgggaaagccctttccccaaagcctcccaccctttctctcgcagtctgacattgcagtttacatttggtgcttcttgagtccaaaacaatttcttaattcaacaaatgatcacacatcattccctgactgtgtaaagtacagcaaattagcacagccaaagcaggaaatatttgctctgaacgtgcacccgtctttgttttcacagcctcttcccagtcaatggagtgcagatcatctattgccagacaccatggtatacactagagttacagaggtgaagaggcacggtccctttcatacaaaagtcagtgtgaaagggagacagacattaacagaaacacttaatccaccggactgagttccataggaagcagtgacatggcaaaaggagtggtcaattgtttggagggaactatgagatggaaaaaacaggaaagataattttcaaaagacaaagcagcatgcatataagggcataaatattttttgttgagaccccctttaatagactctaactctacagttgttactttgacaccctatacagtaaatccatagtatttaagcagattctatagtcatccaaatatttgcccatagccattctttaaccgtgtctgctgctaacaaatgccagcaaagcacagcattgtctttgttttaacatttcccttaaaatagggccacctttctgttttccacctgactcacagtgaaacagaaagacctggaatgaagtaagtcatttggtgccctgagataaaggacagcacagcctgtcacgtggcagtcacgggggaagttgtactgacagtctcttagaaatgcaaaaacaataagggcacttggcaaccagaatggaataccaagacgttggccaatttcctctaggctttcctgggagaggtggctgtaggaggctggggtggaggggctgatcacaggcttgctctactggctctagaaaccagaggtgtaactgggagctctctgtaactttccaggtggtgagcatagaggctatggacat

SEQ ID NO: 79792 - DNA, 1010 bp, Homo sapiens
ccttacctatgaatgagctactatgagtaagcagctgtgatatctgaaggaattaatggtttttaatggtttctctttaggacggtccagaatgacccagccctaatcgtggctgagtttacaagacactgccttggaatctggtccaaggcagctgctcatggcatctccatttcttctttgagaagctttactgcttctcaagcaaccccaccttctcaggtccctcagattttcccctcattagtaatcttggacatttcaaataccatgaattctttctactccaaaggattggttttcaaggtgaattcaaagacattgatactgcttgttattccaaatagaagttgcccatctccctccagtataggatcttcatttaaaaaaaaaaactcttgattcaatatttttctagatattgctttgagaattcaggattagaattggtaccataatcaattctagaccctaatttctggcatttcattatgtttagctgcagtgccaagttgaggcaatggcttaacatggctccctgacatggtgttaatattgaaggaatcaatatttagctggagaaatgaatatttagctggagaactcagccaactgttttgagtctgagctatcagcctcataaggcagaagagcttagggagaaggctgaggtttttgccagaccatgtcccatctcttcctgcccttacatttgcttatgaggtcctcacagtggctggtggcctataagggggcccttctgtagaactctgtgtgtgccagaagaggcagctttggccctgtgcaagacactctggagcattaagtcttggcatcagccatgcaactcttgataccagtgcctgttttctagaggcaaaataaggacacttcatgagaagaaaggagtaatcaaatgtcggagacttgaaagactgcaggagtctgggagattggcagggcttagctctggaagctgaagccaggcctcttctctcttcagctattcc

SEQ ID NO: 79793 - DNA, 1175 bp, Homo sapiens
ccatcagagccacttcacaggttgcctagcacaaggctaagctgaaaactaggtaaaagcatcctactttgttcaatctaagagatggctgctgtgagtagatagacagaagactgtaaggagcaaggcaagtcattttgttcctggagatgggtcttccttttactaagaagggcttcccccagggccatagatacctctgggccatcagataggattgggtcctagcatcattgtttttctgctggaactttgcacagggactctgatggtttcgttactatgcagaccttcccatgggtaatattaccatgatgagccttcaggctgagtaactgtagggccggccacatggggaaacccttgacttcaactggtgatgaattcaacaatgtcagtctcagtttgcccaactcaaagagatttgggctcaaacttattttgggatcattgtcttctgtctgcagtaaacaagaatgttctctaaaaagggcaaagctaacttttgggaagatacacgtcttaggaatgacttgtctgctgcggtctcaaagggtcacattttgctgatcatttgtgcagcatctggctgttgaagtccacctcctccaaagcaatgaaggatgaagctgccaatttgagtctgatgttttatttatctggactggtaactttatgtatggtgtgtttctctgtttgggcctcaaggccggttaagcaaaaggcgggaaacataaataagtaatggatggagagggctgtccatttatagactctcgacaatgacctgattttctgttccagtgtaagcattagtgttgcattagagtaatatgtagccatagatgttttcactggtgtatttggtggtgataatcaggagagacatattcatgttctatttttataataaaaattaagaaacctcaggccacaccaagggcccttactggcagcatggacactgtgggtttgaacagtccattttcctcagcttgtgtgggatcactgtgttcttttctgctctcctccagtttctggttattattaaacaaccctttgtgaaggattaactctggcttttctcccagcgaggagatgtctacacaaagccagaatatccagccaattacaggcaaatgggttatttggtgtagtgcaggaacaaatgactg

SEQ ID NO: 79794 - DNA, 1004 bp, Homo sapiens
ggcatcatgtaattttggagtgggaagggaccacaaaatcaatctagtctttgtagcaatgagagggaggtaaagccaggtggctgtgtaaaccaggaagtgtccagaacctcatatcctagtttcaggcaatttttttcctcattccacacacacacaaaaaaaatcctgttttcatttatttagggggtttcaaaggaaagttttacaatctatactggctatagggaagtatagaggatacctcctcttgcatggcaagcccgcacccttaccccaaggccaggaaagagagatgagaaggaggccacaagtgctagatgggagaggaattgagagatttttcacagatatgtctctaccataaacctttatggcaaaacaaaacaaaacaaaaaaaagccttctctggaggatcatgggatgcagcagtagaagaaccttcaggaccatttaatccggtgttttttcaaatgcgtcctaccagtttcccagggtgtttaaaggtgtcacacttcatggcccactaaatgtggaaatgatgacttgaaggacactaatatgtctgcatctggagtttcaggctctttaatatgctcccattagcacggtgactctccaagaaaggatacaaacatgagccatatctataggatttgttgttgttgttgtttatttttgtaaagaacccttttattttaaggctcctggaaacatctttcaacatttgtgtgtttcaggacacactgatgttgcctaatacgttagtttaaagataaagacattggaacaaagtcactatcaggtacgtggttgaactaggactccagtaagcccttccttcagagtgctagaatttagactagtcaggctaagatgccacatacttgaaattatttgaatgtttcaggaaaatgattttttaatgtatattttgttagatctctttgggtcagtttcctacttgtcactctgttacactgagtcaagcagccatagtcctc

SEQ ID NO: 79795 - DNA, 1050 bp, Homo sapiens
tgaagaactagttcctcccctctccctcccaattcattgcagaccaatacttttgttaaagaaggaaataatcaaaatgagttaccagaagaatgaaacaggaaaaaaaaaaaaaaagacatatgtagtccaagcccaggcttattattattaaacgtcacagacaacacatttcactttggagggtatgtgccccattgtcaaagtgctgtaagtttctaaacactactctcaatttctgtatttatcttgtctcaaaccaataacaacaagcttgcaaatcagctctgctccaaatgaactttgagtagcactggttattacagacagtgccttattatttgtgtatgttacctcctatattgtgtaaattgtttgtagacattagatagtgtgtatttatgtgtccacattcccccactctctccaataagacttgtaagtaggtaactgtcagtagtaattataataataactattattattatactaatattaaataattaaaataattagtagcattattggtaaaagcaattaattgctattactattgtcacgattcttttttaaaaacaacaaaaatatatgtagaatgcacccttctccaacctctctttgtgagtattatcctgaagatattccattgcttaaatctagtttcatagggaaagtgtaatttttaaaacctaaaggaacaaaagcatcttgttaattatcattactcaatcggggtgctatatgttcttataaagtgaatcagaaaataattgtatatgagaaactctgtaattgttcttcacatcttggttcttatcctactaacatattctcagaaacagtttttggtattatccccagtatattaccaatccaggagtatttaggagttaaaaacacagcagagttacaattttgctatgaaatatacaaatcaaaaattatgaattctgcctcttctctatgtttacaaaaagtgccaaattctgtaaaatatttgaagagatttattctgaatcaaatatgaatgaccatggcccaaggtacagt

SEQ ID NO: 79796 - DNA, 1033 bp, Homo sapiens
tggggagcaattacttaataagtatgggttgtttttcaggggcgatgagactgttttgaaactagaaagaggtagtggttgcagattattgtgagtgcaccaaataccactgaattgtgcactttaaaatggctaattgcatctgatggacctttcacctgaatagaaataaaataagaatacttttccctgaaggtgattaggtttaaatcaggatgatgtatacatggtggacattcaaaaaatacccttttctttctttattctgcctttatcactgtgcccgccccacaacccgcaccctttctggatgattccttctttccttcggtgtaaaagaaaagacagtgagatcatagtagtttcaactgaaaagtaagtggaaatggggagtggggtgcacataccaatctctgtgcacctggagtagataaatctaggtcagccctttaagatgttagtgtctgttaaactgcattgtgtaccttattgagaatgtttcaggtggcctttaaacatcatagagtctttggaggggtgggaatagacagagacagctacagcgtttggagcacttcatctagggcaggtatttgccaaggaagcagcgagtcgtaattctaatagtttagcagtagaggatttgccatggtcaatgggctgtttgtcagcggggcaagtgttttgcctttggctatgacttttatatattctttccaatggaggcggaacaacagatgagcaaaaatccccaaacattatgctcactggttgaaaaataggcatttcctgagctgaatggaggtaattgccttctgacctacgaggtgagcagtctatttccaggagcatcaaatgtgacttcctggctattagcatgctatgactgattgtagctacatttgcttctgactttctaccccaaagggaattaatatttctacctgtttctaggattaggtaatctgtcacttgcccccagtgtcttccctctcccaaccctccttctggcctggaggacctgcttagggct

SEQ ID NO: 79797 - DNA, 1049 bp, Homo sapiens
ctgcatatgtctgatacaatacgctgctaaaagtggaattgctgcactagaatctgcacatttaaggcatctgcaacatgttgcctaatttaactccagaaagactactcatttctattccaactttgaatagacataagagtgcctgtctgcataaaccttcatcaacattggtattatctttctttttcatctttgctaattggataagttttaaaaagtgtaacacattttagtttgcatagctttgattataagtgaggttcgacattttttttcatttctttacactttaaaaaatctaaccgtggcaacgtttgcaggtgtgtgttcttcttatgttgctgagtgttatttactcccggacccatgtctgtatccatctctgttttctgcaggaggcataaaattaaagttcagcttccctagaacgggtgtgtatgtgtaagaggtttaatcaataactgacagaggaagtgggggttcagagtaccctcccaggcctctgtggatttcttctctttcaacctggctgctgcttctctgacaggtatacttcttagctccggggacctggaccagacagccctcactctgcccccatgtgccttgggactctggaccttgcagaaatacttatggcctgaaaaatgcaaaaggtcgcaggcttatttttagatgaaaaaaaaaaaaaacattcagactccattttaagcataaagaattctataataggatgcttcctcttgctgtattatttgtattgtacgtattagtctgtctctctctctttctctctccctctctcttctctctcctctctctccccatttctttctactcctcccctctccccactgccccctttttggcaaattacacttttccatgacaagaagtaagtactgtcaataaagaaagcaaatgcatgacaaagatttcaagagttgaaacctcctcttgtctgactccccttcactctgggatctgaaccgtgtgacagaagctccctgtggcgtgtctttagtccctccacaatgggatcttgt

SEQ ID NO: 79798 - DNA, 1098 bp, Homo sapiens
ttacatttaattctactcttccagtgtctttctttttaactcaccatctgacaaggaatagttagcatataacccaaagcatatgtggtaagcttgttcctccctgcctaaatatgagtttaataaaaaatagcagttaaacatatgttaaaaatgaagcagtacagttgggggcaaagaagaaaaggcaacacaactgtttattagttgtgtttttcattttcatgttcagagaatttgaagactccaattttttttccaagctgcagtcagatctgcacagttgcataccctgtttgggtctttatttcctacagatgaacactaggctgacatgtcgaagcccatgtccaaagtaatgaacaccaattagcaaattaatggattaagatcctttttatgtgtcaattgcccaggttaatcatgtcaggactaataatattttacctcaggatagagctttgacattacttacagaaatcagtttaagtaagtgttaagtgatcttgattctgtggattgtagttcaagatttgtgaggtctaagcgtagtcaagacaaatcagatgtttccatttctcactgttgttaacagcttcattaagacgatctatctgaattaaaattaaagattagtcttgaccttataggtataaatagacagtctatgccccatgtctttctaatttgccagattttctttcctgtatcgtacggatgaatcaaggtggacatctttcatcttggtgtatttccaccaagctaaacacagttgtttaagcataggactatgcccagagttgtggcagtttctttcattagagtgaaacgagggctgcaagccctaagcttttgttgaaatgtgcatccttcctataataaatttttactctatcttaataaaatccatggcaactttcctacccatccctcccccggaatgggctacttttatagggaaagaaaggcagcatcaggaccaagaaggggatggagaacaccaagtttcttcttctaacagcgatggcattgaagagctgttaatactcaaagtgatgaatcactaatggcatatgacattctttcagattcgcattt

SEQ ID NO: 79799 - DNA, 1084 bp, Homo sapiens
ggcccggatccctgaccttgtacaaccagtgaagcaaagcacaaagccatctgcccccagaattcacgttatgtggaaaaaagtaaatgcttagttgtttaggccactgtcagttgagtttctgatacaattgaattcatcataactgagaggcagcaataaatagcctaattcagcacaaaggtctgttaccatttgggaaggagaaaagatagatgaggggcctaaaatgtcctcaggaaattatacggggcccttgaagttttgtcagtttgggaataatgtgatttgagttatgctttaggaagggaattccagcttcaagttcaatgatggattagagcagagactacaaaatctaatagtgcaccaagattgcctgggatacttttcaaaataaagatgtgaagggccttttgttgatattctttgatcagtctctctgagggtgaaggttttggaagcatctggattggagaagggaagccttggttgttgtaacaatagccagacatcattatcttcaataaacaataagaaaagagcctcattcacattttagagatgtgaatattgggcctgaaaagtattgagtcactgcccaaagtctgtttgcgaagaagcagcaattccgaactagaatcctggctcttctttccccattgtgtgcatgctttccatggtaagatgctagctacttctggggcaaagagagtgctttcatcctgggctgcaggtgggatggtctgaacttgagtagtaggagagaggatggaatgttaagtgacagaggtgggaagctaagtggaggtgatactgagatgctgacttaatgtggagtcctaaagagaagggaacagaaagacatatatgaagcgtttcaaacttgcaaaattcggacagtggcagccacattaggatttggaaggaagatgcagcattcagagctggtttcattgatactctacaaagggacgttctgtgatgatgtccagcagacacttgcaaatgtgaatctggagcctctgagagaggttagtgattccttcagtggttaatgctgaagggtggtggtgaaggatac

SEQ ID NO: 79800 - DNA, 1026 bp, Homo sapiens
tttccgaaaacactgagcctccagcatttcaggtccagtcaacttcagcagatgtggtgttgggacacgagggtgttcagatgtgtgggggtgtccaagggggaatgattcagagccactgcctcagtttttaaagtaaggattcgtggatagtctttgtccccagtacaaaggcatagcggaaaaccaaagtggaagatggtgtggaggaagaggttcaaaggtgattttgttttttgcatcaggatgatccttgactgtgtctgaggccaaaagtaagtcttgactcccatgaaactccaggaaatggccggcacttgaagagccgtaaagaagcagcccagacctcactctcctgccagcccctacttaaaaccaccccttaggcttcccacacagatgagaattgttcagggggactctatgggtcctgttggactcgacgtcaaagtgtcctgagtcctgagcttatgacatttctacaactgcacacagcagcagatagtccctgtcaggcagaataatcggaaacaggctggcttctccgccatgacgctcaccgggctttcagggcaggggctgtcacgaagatatctggggtgtggggcaaaaggaaaaacagttcccccgggacaggagtcttgtcctctctgccgtgtgactcttgacagagggcagagaccctgcatctggagtgtgcctgtgcctctctcacctccatggtcttgctgagccgctaatgcctcagaaggcctggctcactggaaagatgaaaccaggacacagtgttcaggtctcgtttcctgggataaagtgggtactcaggtaagcagaactggataacctaggaacaagttatcaaaggcttacgcatgagaacaggccaagcagacctgcatataatttcatcagtaacaccagcataatcttacttaaagtattgttgatattatttagtttcaaatagaatttaaagggaagaagtatgaaggatagtgacttaaagtacacagaaactgttgtaca

SEQ ID NO: 79801 - DNA, 1032 bp, Homo sapiens
atattaaaaagccaggtataatgaagtgcataggagctaaatagaagcagctttgaataccttcattttatgtagatgttccaagagcttgcccaggcttcctctctctcccttcctctctctcccttcgcctgtcgagtctaaggagacctggcagcctgagatacccttgggtgttcagggagatcttgaaggcaggcgcctttgaggtacgcacctaccaaaaatgtcacatcaccaccggttctgttgtttcacattgaatgtgaaagattcactaaaaggttaatttccagtcttgtcaaatgtagatcattaaaggcatcgccttttcatggtacagctgacaaaagtcaggagccaagagggaaggcagatgcaaaggttgaataggccaaatactgtgagaagccctttggaaaaccacatcaggtatttttatctgtactcagcagaagtagtgattggtgactatttgcggaaggaaactggacgggtgtctgcctttttaaatgttaaaataggccctgtctattctaggaatggttttgataattattttttcattctttgcctttattctagaatagagattgcccatattttaaaaaaatgcttttcatgtttctatttgttttgatttctagaaccatgtttagatgacaaaaacaccagattgaaggatggtccatctggtatctttggctttcataaaagccagtttgaatcacatcatggttgatccaatggctggaaaacacatatttacccaaaatatggttaattccgtacttctgaataatcctgggttttgacttcttcagtttctccccttttttactttcttctgtttgagaggcactgtgaatagtggaaggagcatgggattcagagagttccagataggaattttagtttttccatttaagagcaactgcctttggacaagatgcttaacgtctctgaacctcagcttcttcatctaatggaaggatgccaataaccacctcacaggatttagggtagtgctaa

SEQ ID NO: 79802 - DNA, 1054 bp, Homo sapiens
agggctttttttttttttactttgaacaagcaagggagagggggtagagtgaaaaatgatcattattctgatgattcctctgcttagctgaacagttcacagttctttgataccaagagtcacccacatttaaacccatttctgtaactgcctgctgcagccatgcctgctgtcagatccggttgatggcagttcaaggactcacatgccattaggttggagcagcccaatctggctttagaattgtgattaaatacagttgtaacatctgcacagtgatccacggcatgatgatggtatcactgaaaattaaaaagtgcaaactttggagacttcccagggaattttgcagtttctattgtaagccttttgttttattcagtgggatttcttataatctgaatatggtagtcttatctttctatgcatgtctacatgaattaagtctatctttagcttgcacgttcctggaaggcagggactttaacttttaccactgggtccaaaacagagctgatgatagaagttgttgaaacgttttttttttttgagatgatcaagagatgccctccttaatgtttgctcaataagtatctctgctctgtgtggagcaataagtgagatcctgggaagagacaagtcactttatgttggtggatcgccgagtgtggtccctgaaccagcagcgtcagcatcacctgggaatgtgttagaaatgcatattctttggccctaccctcggcaactctgggggtcaggccctgcgacctctgctttaacacaccttccctggcacatctgacgcatgctcctgtcagagaatcacgggtctgcatccctgcaggtccttgaacccctccacagacatttttcctgcaaagaggagagagatgacctagggtagaagcagggctagagggcggggactaagctttgaggaagtgaaggctggctttgagacagcctcccagctgcctcagcagggtaacaatgtggcagcttctctcctttggatgctttagggctgcctggcagctccaggagccaagtaatt

SEQ ID NO: 79803 - DNA, 1059 bp, Homo sapiens
ctttggggaatttttcacatgaccagggccaaatagttctgactgctcttgtgccatcctgggaatagagcagtgggatgtaaggagtgaaaggggccatggatcagtggttctcaaagtgtggtcctcagacctgcagcatcagcatcaccagggagcatgttagaaatgcagatcctcaggccctggccccaacctactgaattaaaaccttttcaggcgggcccacgagtctgttataacaaggtcttcggatgatgactgtgcatagtgaaatgtgagaagtaccgcttgattcatcatccagccagatctgtccagcccatttttgtgattgtggaaattgagggcaagagtgggcaggtcactttcccaccatgaaacagctagctcagggtaggtgctggccttctgattcccagtccagacctctgctagtcacagtgcccagccaggtatgctgtggggatgtcagtggcctcagaaagagtgacgacttgggactgatgtccccacatgctggggtcacaggacaaaggaaagggtttgtgactttgagctctcttcttaccctgggcaacctctctctctgtttaaaagcctggtgaccctgctgtgaacttcctcttttaaatgaacagctccctagagcatccttggctgagcttagcaacaaggggggagggagtgaggaggggtgggaggaaaatgggctcccccgttatcatgtcagtgcaatcactgggaattatggttgaggattaagagtcacttggggataattcagccaggctggagagggaaacacacacaaatacacacacactcacaacataaacagattgctaaagctcatggcagaaaacaaacagcataggaaagaaaaaaaaaaaaaaaaaggatgggtagaactgaaagggcctgaattttgaataggtggtataggttccagaatgatctgtttcctaaacacttttggtgaagttgtatacacagtgactagagcggagcagctgcttccccggttctgtgcattgctctgtttcagaactcatagca

SEQ ID NO: 79804 - DNA, 1054 bp, Homo sapiens
gaaacaggatgttttcccaagttagcaaggtctctgttcttctgtggaattccctctcacataaaactaaggcaggctttgaggaagggtggccacttatcttggacttttttctacagtagggggatttactcatattcactgggagctttttattatctctaagagaaactggaaaagcccagttaacagaaaattcattccttttgttatgcttgaggtgctgattcatttatcttgaaagaaactttgcatgtgttgtatggctcctggtatgtcagaagtgggttttgtgttacttcagggggtctgttttacactcccaatggttctgggggcacatgtagcaaacagagctggtgttgggtgtagacactggggcagatgtttaggaggctaccgttttgaacagtgtcaatcgtatttgtgattcacagtctccctagcagtgtttctcacctgcatggtgatgacatgggtgattgggagattttagaggtttggctgtgcttttcagttcctcttttaaatggcttcttccatcattattcagtgatgatggaggagactttagatagaattttttaaagaaaatggaagaccttttcttgctgtacagaatgagtgtttttcttccctggtggcttcgttgttagtttactagtttactagcccattttgctctcagacccagccatgcctcccttcaccttcgtattaatcctctgaggttctgtttactgatgaggacatgaggtttatgggatttggcaagttacttgaggttacactacctgtaggtgatagagccagaatttgaatcaagatctgcctacctctctgctaagcccacagtctttccagtctctacagctgtatgtctcctgtcgccccatcccccaccgctttttgcttctttagtaccaaactacatgtgcattctggaacaaatcatcccgtttcttgcagctgtggctttgtgcagtttttcttgcatgaacaacacatgcacacacacttagaggcaaacacaaacacagagacacacacatgc

SEQ ID NO: 79805 - DNA, 1013 bp, Homo sapiens
ttgtaacagataatcttgtggactattttgttaagaaaaataaagatttatggtattaaaatatgtatgcatgtctaaaatagcttccagtgctatctggctgtctttgcctgaattttactatgtctgtaagtgagattcagcattttcttttggactgtgaattgtcgctactaaatgagcttatcagtctctgggaaggaacaaaatgtcattggatttgccccatgctgcactgcttgtgaacttataccagagcacactggataaagcatgtacccgattccgagaaggctgcagctctataagggacagtagtgtacacagccattccccaaagccacctagaagaaacttcaggagccttcacacctggctctgcctcacactcccccaatgtgggtgtgggcctggtaaggtgctgtccgcatggggtcttgccttcctcatctgcaaagcctcagctctgggattcaccaagaagagccaatctcctgctcctctcacttcttccacttgcagacaagcttttggactctgccctttggcttgtgattcataattccaaaccccctatcaatgatcaaataagcagcaggaagtagcagtccagatccttcaggggccatctcatcattctgaggaccaggcctttagtagaaaagatgggccagtttggaagttgtcctgacttttagaaagtagtttgtgtcccaaggggcccctgggtgtttgttcagggcctgtatgggctgcctcaaaaggccaggaggtgatggaaaatcatggaccttggggtcctccagtccccagcactccacctcgaacaagcatccttatttgtaatctgatttgcctataggattctgcataagattttgcttaagcaaagggttctgctgctttttaaaaagtgctcaaaacctctagtttatatacttttagattttgtgtccttgcacaacctcattctccataagattggagaaagcatttgtcaccagggcccagcc

SEQ ID NO: 79806 - DNA, 1100 bp, Homo sapiens
accaagttttttaaagctaaaacttacctgagcattaaatgagtttggaagtgcctgctagctgaggggtaaagctgaaatttcagccgtttgtcactcactgcagagtttgcttgggtttgggggagagggatgagatgacattggataggcaaagcagtgacatcagtctcctggtgtttaaaaaaaaagtctctccagttccctctgtggtgagccaaattttcagtttcacagttaagtctaaacttaaagctttgttggctgaaataagaactttgcggagtgacatttctgttttcagggcttctgttgagaccatattgctggcgtaggaatttagcttcatgggacaggaaacagttataggctgtagtgagtaatgttcccctatttcagatggaaaaacattgaaaatcatgattttggccctcaaagaacagctattcgtggctgtcatggttaactctgtctctgactttgccttggcaacgaaggtcaatttaccacgataacaaggacgttgattttatggcacttgacatcttaaaaggtgctgaagtgcttcacaaactggtaagcagaccaaaccaaatgtgccttcttctgagcagtaatctcaagaaaaggtgaggatgtatatatccgcatgtgtgcacacgtgcgtgtgtgtgtgcatgtgtgtgtgtagaattttaaaaaaacaggctcaggaacttcctagctagacattttagggccctgtctgcaaaatgtggacttgggaataaccgcaggcactggaggcacctggtttacgaagagctgtatcattccagcctttttgttttcctcaagagaacctgacctagggccacaggagttactttgtcatttcccaccatattgtcctgctgagccaaagaatgttctttgtggaggtaaagaagctcccatatgatttttatgttccctgctgtcctcagaatcaaagttcaggtcctaagcctgggaatcagggcctccatctatgtcttggcccccacctactgttctggtcttacttcctgcatctctggaggcagttagtcctgagttcgaaacatctttacaaatcactt

SEQ ID NO: 79807 - DNA, 1008 bp, Homo sapiens
tattttaattcatgacactagttattattttgtaaagggttaagggcactcgtagaagggagtgggcccaaggcaggcacgtggtgccacggccagtgtctcttcttgggtcccatgtaaatgagcgtgcaggaccaggttggttgctctcattcctggggccatcgtgtgctgattgactttgcttagcacttgactcttgtctcaggatgcattgccaatatttggttgtgttctgagacactagatcctttgtgatctgcttttactcccctggaggaaattcaggagttatttccccttccctgacagatatcacagcattcatatgtgtccctggcagttggaaccagagaaagaacatttcaacccttccgtaaagctggaaaaaccatgggaatatatgtgacaacatcgattgcacaccccaggatttctctctccccgtatccctgagttatctaacgtaatcaacagcgtcataggtctgtgctcatggtatctgtaattatattcatttgtgtggatgcccagggaattccagtgactggccctgtaagtggttaactgcaaacaggagcctgctggaattacagcatcatttgagatcctgcacatttcatgtgactgattttaagtttatatactgtttagattttttttttctttctgtatttgcagtttaaaaaataaaggtaagctaataattctccggtcaatttgctgtttttttctagtgctttaaaagtatacccttgcagaaacacactcacacacagacacacacacacacacacacgtgtgcatacacacacacagcaattatgatatagggaaaatatacaaatcattccaacttaagtagaaatgataaataagctgactcttgaaattatgtttcagtgtgaaaccaaaagcattttccctccctttctccttcccttgtttttttcctccagatttaaaatcctatgggtaagcctcttctactggactgcataattaggt

SEQ ID NO: 79808 - DNA, 1043 bp, Homo sapiens
gtaccaacatatttattagacaatccaccattttcccacatctgaaatgtcaactttattatataacaaatgtttctatgtgcattatgtttatttctgaactattttttccctcagaagattgttggtttgctaataacaaactgttctaattccttagctttactgtatgtcttaatagccaatagagttaataaccttatatttcagaattttactggcaatgctcacaggttaatttctcaggtgcaatttagaattaacattccaagtttcaaaatactcttattgacatttttattggattcacattaaatttaggggagaatacatctttacaatgagtctttccatctaagtacaaagtctgtctttccattattttgccagcttttacatctctctgtaggatttaaaatttttttcttgtgaattctatacttttctaaatttatttttttaaatatatgcccattttgctcttaaaaatgatacctttcttctgtatatttaattggcttttgtttatataagctatttatgtgtactagctttataagcatctgccttctctcctaatgtatccatccattttcagttgatcctctttggcgttctaggtacatatatgtataatctgcaaaaataataattttgtctctttctaatttttattattcatgactttctcctcattgcactagtactaattagaaagtgtaaaattatagggtattggcaatgaccattcttgtcttaataggaatgcctcttagggtatcatttagtatgatttaggcttttgagctgatgcatgtgtatctatatctctctttcccatatcaaaaaatattcatggatttctattttattaagggcctattaaatcagaatggattttgattttgtcgaatgcttttttagcacccgtgaagatgattataggatctttctgctataatgtattgatattatgaatgacagaggtaaaagttctgttcttgaatgatcctggtatccctttaataagctctatttggtgg

SEQ ID NO: 79809 - DNA, 1007 bp, Homo sapiens
tctctggcgccatctctccaggtctctggggaaggtaatggagagttgctgagaagacttgatggaactggctcttccaggagctattttatgactcatgtactgtaggggtgccggcctgtgggggcagaaaggaaactgcttgtttcttcttttctgattaaaagaaacaactcaaggaaccgactatctcaggcagcctccttttccacactattggaccatttgcaaaaattataacacaaacaaaaaatctagaatcatactaaaatggcaacaggaacagattttaacatatcttaatacatatcttcaaacttttccccccttgttttcctctcttttcctctgctttatgctcttaaaaaaaagaaagagaagtgacaaggaactggcttctcacccagtaaagagtaggaacagtcctttggcttttgagcagatcatgagattttttttttcttctgcaaaatttcagggactatcttccagaaaagtcatgtgcaaggagagtgaatggttacagctggattaacacccagcctgttgggttctgagacgtcaacggtgtcttctctgtataatcccgttttccagaacacaaagtccagagtgcccgtgtgtgcattcctgccttggctgggttgaaacgcggggtctccttccacctggagtgtggcaaggagaaagctgtggttctgaggtatctgaatccttggatctgggcctggtgattcaccagctttgctgtttgtaaacacatcatcagcctttgtcaagtttcttctgtggttgggtaattaatgttattggaggaaactattattttttttcccctcacagctgaagatgagacagaatttgtcaggcatcatagacaagtgtattattttgcttaatctttcccattgatcggtctctgttgcctgatagcccaaggaatcttccaaagatcttcccatggctgcggccacaactccccaaacagctagggcgtatttaaaaag

SEQ ID NO: 79810 - DNA, 1210 bp, Homo sapiens
tccttcaaaaaggctgataaatgggactcttgatataggctaagtaaccccctttcattctgtgtaggaggatctatgagagctgattattttccagttaacaaagggtaggaagttgttcttaaatcagagtctgatttgtctagttatgtctatctatttatatctacctatgtctagctgtatatttatatatgttacaccatgcttgcgatttattgaggtctagtcgtaaaatgactaagattgaatctgagaaaagatcctaccacatcatgaatgtgtacttcccttgatatcctctgtccttggttaaaggtgcagatgtgaatgcaatattcccaatgtacttttccttgcggacctccccacttcatccttgccttcatcctttaaatgccatagaacgtgcttcagaatgactcactcctgaagaggaacagagccattttattctccaaagtgcacagtctttcatcaaatattgtttcagctgacacgacagctcccgcaacaatccagaccaggaacagtttctgagcctctttgggtctctattaccacatctgcgaactgagggaaataatagtacttacctcgggggagcggatgagcagtaaataagtggacacttgtaaagaatctagaagagtgggtggcatatagcaagtgctcaaaaattgtttattcaataaaggcaaaggttggcagccacctaggaagtaatgagctatgtagccatttagacataaaataggttaaacatcatatgcctttgaccaacattagccagcttggaggaggaatgaaaagttcatatccaattaatgctgcagatttcccagcccccgccagttctagaaagttgagaacccacaacttgcaaagacatcctggctgatctccagttgagatgacacttccagagaggagaaggctgtcaggtcttcgtttaagccaagtcagatcagcacatatttgcccgctgtctggaggagtggaaaactccacactgtcacttcgagcactccagggatcacatctgtcaggatggaattgctcatcccacactctgtggacaaggacttggcgtccaagtctgacatgtgaccaacactccatttgggatagtggtcacagcaaacccttctgaaagggaatttggtaagttttccgacaagtcagtgtgcagctggggttgggctttggc

SEQ ID NO: 79811 - DNA, 1270 bp, Homo sapiens
gtttcatgcttaacatttgcagaattctgtttttcgagagatttttatatttgtttgaaattctaataagaataaacatatttactgaatattaaagctcaataagatagctatagtgtgaaatgtggttcaacattaaaacagcaatgctgtgaaaatgtgtaatgtaacatgaacttgtaaattataaaaaagttatccttctcacctcgtagttactttacgtatactactgtaggctatagacctaataagctagtatctataaacagggaaccgctttatgagcatcagtaatggaagcaggtttatgcaactttgctgttattttttgtttgtttgaagtaggtcctgtcagttcttggattagtgcttcgtgccaggaacatgagagcttatgtggagtgttgatttaagtttgtataacattgtcacatcatttcttttattcttctcaacaaccttttgatgtaggtgtttatttgcattcctgttttataggtaaggaaactgaggtcacacacctggtgatcgcagagaaggaactggaatgagtcatcttctatcccagggtccactacccaatcgtttgattttcagaactatgtgggaattttcttttatcatctgagtgtacccatcttcagatcctcacaaaatgaaaattctcagtacacatacatatttctagttgagcaaacaaatgcttttcattcacaataggaaactgaacctcacaaaatgaatttggtaatagctaatccctatttatgggcagctgcccaaactggtaaaacatacataatgcacacctcgttgccattgcacattcaaaatgcagtgtgattgccgcaaaggtacattattatccacagtcaatatgtcacctaaatgtatgaatgcaatacagtgtggtattttggaacacgatgttaggtttcctgattggaaatgttcttgaactaaaatatcctccgtgacaagcttttttgtagttataaaaaaagatcagcatctcacaggttacctgatttgctaattacttagaattcagatcaggtatttgtggtgaaattagcatgcaataaccatcagtttttgacaagggtttctgatggaagaaagggattagctgtgggtgacaagctggtaagtaaaaaaaattggaagtacattttcagggttaaattttatctctcaggttaaatgatggcttaatgttttaatgatgttcagcaagggtagatgggtaaataggaaaggcaaagct

SEQ ID NO: 79812 - DNA, 1026 bp, Homo sapiens
tacaagggccaggcacagtggctcacacctgtaatcccagcactttgggaggccgaggtgggcagataacttgagctcaggagttcgggaacagcctggctaacatggcgaaaccctgtctctactaattacaaaattactattttgtaattttgtaaaaatacaaaaattagttgggcatggtggtgcatacctgtagtctcacctagtagggagggtgaggcaagagaatcgcttgaacccagaaggtggaggttgcagtgagccaagatcacgccacggcactccagcctggacaacagagcaagactccgtctcaaaatacatacacacacacacacacacacgcacgcacgcacgcgcgtgtatatatgtgtatatatgtaatgatttacatatatatgtatatgtatgtatatatgtgtatatatgtatgtttttaatatatattatatatatacattacaagttttctacaggaaacaacactcagcatattcctaaatactagtagaactctgggcttttacaactgtttggtggagttttgtctgagcaagtttccagatgttttataggtgcctgaaaaggtaggtgaacatcaggggatatccccaagagcaaatatacagaagcaagaaatgttagaaccatctttgcatctgtgtgaatgtgcaggaaacatgcattgaagtgtggctgtaatacagggactgtgtaggagagtggtgggtggggtgggaccaccttggagggtcctgaatgccacattaaaagatttcggttctacagattatgaaggacctaacccagaggtggtggttgagatgctgtattaaaagtaacaccttaaatgtggcaggggattaagtgagatctaaatttgaaaggttggttttcaacataagtgtggggaaagctccctgatgccaaccttgctggtcctgaattgtggcacactgtcaccacctggtggtcacatagccaaattgtagggctaatggatttagccagagtcctggttgt

SEQ ID NO: 79813 - DNA, 1042 bp, Homo sapiens
actgctgtgatccagttttcctgtatataaagtgggggtaatagtggtacccagctcataggattgagatgaggattacatgagaggatcctcgtacagtgcctagtagaaagaaaatgttcaaaaatgttattaataccaggaaagagagatggaaaaggaaaaataaaataaaatttaaaaaccacaaaaatgttatcaatattaagctgtctcatggaaaaataattatatatgactacaggtaattttgtttggtagcaaaactcaggaaatagtaataacgcaggaggcttgaaggtgaaaaacttgcagaggcttctcaaaggacttgcttggacacagcatctacagcagagagcaaagacatgccttttttttagctcctcccagcccaggatacatgctccttaggggacccttagacttaagctctgcctctgaagtgtgatttaccctggaaatgattctaacggaaaatagtagaaaactgctttccaggagaagaatcaaaggagagtatgtatttactttgggcgattttcccattgtactggttatattgccaagaagttaaaaatagtggtgataagcagtctctgaattggtccctcctgaggtggcaagggtcaactgaaagtaggatcattcctccggggccctgagacctatcccccttgaactctgttttgagagcccctggtggagcatctgtgggctgctgtcctgggatctgcatatactacctgagtttccctcctgtcttatcaattcctcagacttgttcttggcctctgttaagccaaccgattttagatggcctcatcctttaaatatgctatttataaccactaatttatgttttcatgatacttcatgtagcagctggcctttgtgccaccgtaagaaaggaataatgaaatacgtggtatttatatgggtggctatagtgtttgtcatttcgtatatggattgctattgtaggaagcatgaaaaattgcaaagggtatttttttctcttaaagataagctccagtgtatt

SEQ ID NO: 79814 - DNA, 1043 bp, Homo sapiens
agaattgcatgattttttgtttcttcacatagagtatcttttatttttaaaaagaatcttggggtgatggtttattttagagttaaatcaatcaaaatatcaaaaagcttttcctctgatgccttagaagtgttttagtagacacagcactaccagtattttccaatatccttgaaagaaatggctgtgagcattctagataaaattgatatatttatccatatttttctgctcataaaatagaatttgagcactttcagattatattttcaaatatttagggcaatgtatttaaaatgttttaaaaattaactggggaaaaaggatgaaagagttttaatttccttggatccgaataattcaagttgcaagcttctgtattcaattttccttgccttctgttggttggtttgggatttttcttggcctgggattgaatattttgtatcactttaggaaagtcaggatgtagctagctttcaaagtaataactcagatttatagttgaatggatttagaatcaaaggattttgaaaaacatacattaggttctttgctcttttttagaatccgagtattttaaacacactttccagtgtaacacttggagtcttttttaatgctaagaataagaaaatggaaggaaggtttttatctgcctcccttcctcatttcttcccctttggccttctttccttctttttctcctttcttttttctttttctttttttttttgttgagatggagtcttgctctgttgcccagggtggagtgcagtggtgcaatctcggctcactgcagcctccgcttcctgagttcaagggattctcctggctcagcctcccgagcagctgagattacaggcacatgccaccacacttggctaattttttgtatttttagtagagacgagatctcaccatcttgatcaggctggtctcgaacttctgacctcaagagatctgcctgcctcagcctcccaaagggctcgggttatacgggattataggcgtgagcaactgcaccggcctccggttccttt

SEQ ID NO: 79815 - DNA, 1026 bp, Homo sapiens
agacagggtttcaacaagttggccaggctcgtctcaaactcctgacctcatgatcctcctgcctctgcctcccaaagtgctgggattacaggcatgagccaccgcgcccggcctgtgttacagattttaagtaaaaataagaaatatgtgatggcttgttcctactcttggcttgcaccccatgtgcattttctttcttctctgggaacttggaagggcacaagttcaaatgtctctgaaaggcattcagtttaccttctgctctagaacttgaagcaatttcattagtgctatcgttgattcacgttggacttcgtgcgcttcccacgggccattcgttatcagtcttggccctgctgcaagagagagtgaagggcatctagaggtgccattggtaaaagcatactccccagggctataggaaattactgtggagctgcttccaactacagcaattcttgaaaaaggggccgcgttaagagcaacaacccttcctacgtgcccctggagccatccgctaaggttagtgtctcaaggtggcatatggtggaaatgcattaagctgggactggtgacacttgacactgtcactattcgtgtgaccttgagaaaatgattgagcctctctgggtctcaatttccacaactgtaaaattacagaattgttaggatattgcatatgtaaagcaattaacatgatgtttcttcataagcaaatggagctgctattattattattggtattggtcatagctcttttgagttcaaatgagaaaaacagactcaaactatcttaagtaaagatgagaattaatgggctcatataactagaaagtttaaggaggagatcaaacttcaggaagggctggatccagggagtcaaagtgttcctgtgttggcttttctctattcacaggcagttcctctacagcaagagacctaagggaaaaagtctaactttttctataatgaatccttaaaaaaatactcactagcttaggctggttcatgtgacacctccttctc

SEQ ID NO: 79816 - DNA, 1099 bp, Homo sapiens
gggcaccctgcaaaacaaggtcttggagaagggtccttgagacagactcttgcttcacctgtcccaggcctttctcaccctccacccttcacccaggtgtatcccagtccccgacagcacggcacagctcgttctgtgttgttatttctgttttacaagcctggggaatcctgaaattcctcagtcaggtatatgccattgtcagcctgttatcagtttcctgatttactgtgtaagcagttttgataatccttgtcatatgtgattacatttcccccccttcccataacatctcagtgtaattggtttgataaactagacctcagtccagtagtttgcttgcaatatattttcaccttctatctgtgtgactaagatggttttgaatggctttgcatggagaaaatcaggctttgagcaccaggtccttagtttcggaaacaaatcacccagggcaggcagcacaggtctgggagagctgggaatcccagttaagcctcaggagtcaaaacgggatttttctttctttccctgcttgggccgagagtagtgtgtgtttctttgtgtgggttttttgggatacagagaatatttatcttgtacatctgtatctgattcctggggccattggactaacttcttgtccataaaaaattggattcgttcgtgtattcatttattgaatatctgctttgttccaggagtccatgaggaaaagaagctttatttttttctcatttttttttccctttctttcctgcccctattggcactgctcccgagagcagagaaggaataatcagtatgctttgaaaatgaggcatttttggtaaattaagcatttgggttaatttagggttaaattaaaatgcaaaagctacttggggccatcacttgctaacttttctttgtctgataattcagcacctaacagagttctaaggcttcgcagagaaggcagttttagaattgagatgggaagaatgaataagatttagaaaaggagagatgggctagcaggtggtgagagaagggccttcctgctcctaggagggaagagcctcagcaaaggcaggaaggctggaaagcctgggtaagg

SEQ ID NO: 79817 - DNA, 1051 bp, Homo sapiens
ttgcccaggctggcacatagtgggtactcagtctgttgaaggaatgaaggaaggatgcatttgacactaagcagcctcagtgaaaaaataggtactctctgcaaacattttgaacaaaactcattctccacattgtcaacggcttggcagtggcctttgaccagtaggaggcatctaatgttgcggatgataagtttgctgtcagtcatattgttgttcctttgcaggtaatttgtcttcctggttgcttttaagattttctctttctttggtgttctgcagggtcactatgatatgtttaagcatggatctatttatttattctgctcaagacttgtgcttgttcattgtgaagactcatgttttcctttaattctagaatgttcgtggacacttttgtcttttcttaatctttttttctgaagcttctgttggatatatgagtgatctactcattttatcccgtttcacttcttttatatcttttatctccttttctgtctgtctcatgtttcaggcagtttccttggttctttcagaatggttcactcattctatctactctgctgtttaaactgcctattgaaattcctaaatggtagtttaatatacatgaagtgatgatggttttacatgggaaaacactcatgaaaccatcactcagatcaagacagagaacatttctagctcccctgaaagcccctctgaggcaatatcctcccaaagctagatgcttttctgtcttccatcatcatagattagttttgcctcttattgaatttcacataaatggaaacatgccaaatgtgttcttttgtgtcatgtcctttgtgtaattttaagtgactatgtttgtctgtcctttctagaattttttaaaacttgcctattttttggtcatagtattctgttccttcattatgttttctatatcttcttctttaaaacttcttaaaaatattcagacttgcttgttttatattaatactagtcaattatgtcaagtacttaaggtatactaatttctgttatttgtatcttacgtatagtg

SEQ ID NO: 79818 - DNA, 1033 bp, Homo sapiens
tgcacttccatttgctgagcttctagctaatggagggtagcaagtcagtattctggatgctcctcaaatgattctctcatttaaaacctagctctggaaatgtggttaatctgtagtatgttttgagcctcagctgttcttaggtccatttaacttcctggaatccatccttggctagcacgtcctgtaggatgaaggagaaagtctattccatttgcctttctcatcttcacatgtgtggtaaatatgttttgtaggctttctctattataaatttcagaaaggttgggcccaacaagtagtatgtgtgtgtgtgcatgtgtgtatatatgcatgtgtgtgtgtgtatatatgtatacatatgtgtctatatgcatacatatatatatatacacacacgtatacacagacacatattcttctaactgcatagtgggatgaggcctacgaaagccagcagcttgcctcagttttatttagcatgctaattataaacagtatcagtaatatcttttggaatttaggcgttagactgttcccactggtggaagtgatcctttagagcatcacaccctgcctcttgggtcctgcgaaagctttgcctttgttgaatccatatggtaggattcttgtggagaaagataagccaggccattgtttagtaaacatcagaccctcccgtgtgctgagcctgagatctggcaactgggcagagagggctgctgagggctgtgtgctgccgggctggaggatgagcaaactgcatccaggtgtgatcacatccttatccttttctcccacagctttaaagtggtgaaatttttcttctctccatcgggaaggaaataggaaaaaaatgccatatcttgtttggtggtcggggtgaagggcgggatggtcagcatcctcttttatttgggcctatattatggtattatcatagttgattattgctaggatgatttatgtaggagtctctggctaagttatgagatccttgagaacagggatgtcgtggggttgtccacgtgtt

SEQ ID NO: 79819 - DNA, 1260 bp, Homo sapiens
tgcacaactgtacaaaagtaaagtatttggctgtcttagttagctcaggctgctataacaaaacaccatcaactgggtggcttaaacaacagacatttattttctcacatttctagaggccccaccttctaataccatcacactgaggattagcgctttaacatgtaaattttatggggacacaaacattcatttcataacataggttgatgcctaaagcatactaataatttacagggtggttggtttgtctctaaaaagttaaaattttttagctttgtcatttgtttgtttcaacagagttgtattttcctatgtgtattttatcttaggcatggtcacctctcttcctattcctgtactgtttgaaatcacagtagtgaaacccaaggtaattaaggctggggtatcattgttttaaattagagtgtgtgaatttttttttttttttgtaattcaacaacaagttccttcatattgtgcataattggatcacattttaattttgtggcaaataaagatctattttacatttctattagaaagacaagcccctgtggcgagctctgaattaggatgttggccattagaagtactgaagcagtgaggcttttagagctgattcagcttctgaaaaactcatctgtgaatctttagggtaaggaaagaaccttcaatttaaagcttataaacagccatggattttacctaaaaacaaatactgagaagacaagaaaacgaaaaatataagtactaacgcaagcagagaataaccaaatcatgggttatccagtatgatatataccacaaaaacattctggtcattgaatcaggcacatctgtttgtgaggatattttattatctttatggttaatgccctgagtgtttatgtgaagcaaaataatgaagacaaattgtgaagaatacactggacaagtaaccaggaggcctcggttctgatcccagcccaccattaattatgtaagtggctctgggcaaatggctttcaccctgagacctcaccttctccttagtacagagaggcactgaactacagcttcctgccagctctgatattctataatcctgtgatttttaaaggaaccaccaaagaatatacttctttattcattccaactttaaaaaaattattattgaagcataatttacttaccattacattcacccatcttaagtatacaattcaataatttttagtaaatttatagagttgtacaaccaccaccacagtctagttc

SEQ ID NO: 79820 - DNA, 2754 bp, Homo sapiens
tgtaaaaaagtaagaatgggcctggcatggtggctcacgcctgtaatcccagcactttgggaggctgaggtgggtggatcacctgaggtcaggagttcaagaccaccctggccaatatggtgaaaccctttctctactaaaaatacaaaaattagccaggtgtgcacttgtaatcccagctacttgggaggctgaggcaggagaatcacccgaacctgggaggcagaggttgcagggagctgagattgcgccattgcactccagcctgggcgacagagtgagactccgtcccaaaaaataaataagtaaaaataaagtcagaacgtttgtaagcccagagtcaggttttagaccctttgctgtttcgggttgcatttcacttttctctgctttgatggtgctctcccaacatgcctaactgatgattgaagtgttgcagccttttttttttaaaacaaacaaacaaacaaccctttctacacagacagcattgagttgtcctgtctctaaaggcaatctgccccacacttggcagaaccttaagggtgggagaaatggaatgaatagtagctgtggataggtctccttattgccctgggaggaagacttcgtaggagaggaagttgaaagagggtcttgagaaagggggtgagatcttcaaaggctgggtctagccatgggaaactaagtgaaagaatttttttttaagttgatcaggaagagaaaaagaaatgcaccaagtgtttggccaggcggatgctgaccttggttatgactgggtgggattgccattgctgcaagttgatggcacttaacagttttctagggactttcacatacgcagcagcccctggaagtcctggaaggaggttgatgatgttgcagcccatcgagggaccagaaaaatgttgtgtaattatgaagacctgttgccttaaaacaattcggatccaaataggctgactttatcttcaactcaagtagtgtggcgggagggggctctgccctgttggaaaggcatccctctgccctctgtggccatcactgagctccctgttgttttcggtgagctctgactagatgttttccctgtcaatatttcactaatgtgtcatatgaattatttgtgttatctctgtgctgtgaaattagaggccttcacccacagtgtggtaagtagattaaaaggaaagcctgttttttatggtgtgggcgaaactgggaaaatatcagggaaatattttgtgtgtgtttgatctgacagtgggaaggccttgggatgccagtgtcttctaaaacctgaaagctgagctccggctggagttttcttcaaaggggtttatattttatctgttggcacttctgagcggaaggaaggtttggaatgggagattctgtgatgatcctttttttttttttttttttgctgttgttttcttctctgtctttttaactttgcagaaagcccttccagttatacactcagaccctgttcaggacgttggtggccaaacagtccccttttgttaagcgagcgtcccatttttgtttctcttgaaaggtgccctccaggacagcagagcctttctttgggctgtttataattgagccctgaagaaaaacagaaatcattctaaacccaggccaagtgcctccttggcctagctaggcaaagctaaactcacacaagatgaaatctaaccagctggttacctgagaaccaccttcgggagttctccggcttgactgctttcgccttggccaccatctcgagctccagcgacagctgagggtcagggcctctctgtgcagaagagtaggaagagaatcatagctgttggtgaaggttaggttgcattgtttgaaagggtcctatgtcagcttgcaaaatgctatggatctgtaagaatcctgaaagaaatgggttggagaagaaatttatgaccgtaagtctagttgtctttgagtggtgcaatttagccaggaatttttcctctttgcggctcaaggtttcaaaaagttcccttttaaaaaatgcgtgtgtatctatttttttcttagtttacataaaagggtattcatagctttagcccaccttgacatacttctgtcctttctctttttgcctttttctttacacaaattaggagtcatttgagaaaatgaggcatatataggatttgataagttagaggttgtgcagtttcgaattattttattttattctgttataataggtatgggggtaaccttcaggaatcgaaatggaatcttttttccctgttctcaaattatctagtttaggtcttagactcgccttattgcctataagtacagccttcagttttggaatttttctttccattttaggtatcagctgggtcatttagatggaataggaaacagtactgggcattgtcagagaaagactggctataaaagttctgatccctgtgggcagtttggagtcttcttaagtgtaagatcatcagtatacttcaattctgagcttctgcacatgctggttagtgaagctctgcccttccttgttaactgcacattttaacatctatgtttctagaggagacacctgcctcttgagggaaccctcagcatcccgggagcatctgtccaactggcccctgtacacacagagacctgaaaagtgaagcagtttcgagacaggcatcactttaaggctgaagtacattttagaaagttagggactggttctgtggcggggaagttgagcta

SEQ ID NO: 79821 - DNA, 1074 bp, Homo sapiens
ggatttaaggctgtaccttgtctagagatgctcaggatcaagtctgtgaatggaatattatgtagccattaaaaatcatgttgcactagaaaagtatttcttatcaagaaaaagtgtctatcagccattgctaagtgaaaagtaacagctttcatagcagtgtgcatggaatgccatcttttttgtagaaggaaattgtgtgtgtgtgtgtgtgtgtgtgtgtgtgtgtgtgagttatattagtaaattaacttggacccacgaataccaaaatgatgaaatgataaagtggtcatctgtggatgctgggattacctgtgagtttctttttctttgtgcttttctgtattttttgaagttcttacattatgtatatgttacttttgtaattagaaaaaataaatcattttttcttccacaaaagactgtgtgttgtgaaacttgggatcctttgaaggaactgattctgaacttagtatgttacacagaacatctcagtgtttcaggatgggtcaagtttaccgggccaaagagaaataccacttgacaggcacatttagccggtaaaacaagggtcattcagcttgaatattacaggtcctaacactggaaccgcttgcctctcagggcgatatctttgagacattaataccgtgatccacaatgagaaaaacatattaattacattgtgaactagtacacacacacacacacacacacacacacacacaaacatttcatgtaaaatatttacccttcacttgtgatgcgtgattgtgtttgctctattatttaaaatacagattacgagccaccacattggtttcatgatctatttatgagccactcctcactatttgaaaaccttgtcctgggcatgaagtagaagcagcctttctgggggaccatggcccagcagtgggggaggaaggaagtgtttccacagtaactgatgttaagctccaggtgttactcattatgacttcagggaggaggagggggagggaaaataatgtaaatacttattatttataatcatacagtatctttatgccacttttagcacatgctcat

SEQ ID NO: 79822 - DNA, 2906 bp, Homo sapiens
ttactgtattatgataacataagttttctcccatctaatggtagacagaaactccaggtagtcctaactcttacatagatatattgaaggggtatctttggcatgaggctcttaaatcctgaaagttaggaaactctagggttagaaggaataattccaagaatgtcaacaaagaacatttcgattgccccaaaggaaaccctctttccaagcacaggttgttttcactggacgaatatggaaagcatccctggaaccacaccatcagaagctgactttctcagggatgtcccacttgacttaatgatatagtctgcagttgtcttgtgattatctttgatattgtagtgttggaaattcagcttgggagtcctgatgttcttttgtgacagcccagttattattatttctctcttgattttggagcaaagacatcaaggagattgtctaaagaaatccttagaagagaggaatggggcatgatgaggaataaatgtaccatagctcacagtttagtcaggccggctttttgcgccagctcttacatgctaatgctaaaaggaattataggtaacaattcccctgtgttggtgcaagaacaatttttttttcctaacatatttgtatggccttaactgacacgtcattattacagactgtcttatcacattacatagtatggcacattaacagtggcatggcgctgtggtttcctggtgatggttttgtccgcagaactggggccctggtggtcagctagggagccctgtacagcacccactgacagctgagagtacaggtttcacacacccttgtaggtggtggaggactccaggctgccccaggtagagcttctataccatagatgttttctctgaaactctgtgtcagaggatggaaatgagtaggaaatattatggtacagaggatttataatctcctagcctagaatcatcttaacaatgttattgggtgttttaattttgattatgaactatttttttagtttttttttttttttcttaaagagatgggctcaaggga[450 bp omitted]gccacgagaataaaaattatagaatataaaatcgtctgacttttttgtataagcaaagaatgctaccaagaataaacaggcaagaatagaggtgaaatagaatgagggggaaatgagggaccatcgtttgaatctactatgaagtatggtaatcactgttttaagaattccagactattaactactgtgcagttaggaagggaattagttgtagccaaacaaaagccataaatatgaattttaggttgtacggaagaaatcctcttgatcccaaaacataaatgcatgtactgagaagccaagctgcacatggtgtaattttttctgtcttatcctgattaattgacagtcaactgtatgcttctttcctgaaggtgactttacaatctctagacccagacatttctctctgaagtggagtgaaggaaggagaaccagaagctaaagtgtgtttcactgggtgaagtattttgggggaaagataagaaggatgaaataggggaatggactagtgcctgcagagattaacaatgcctgtttggggctggggagtgggggctgtggatgaaggcagggagcctctagagggaaaagagacttctgtgcaaaggaaaatgacattagcattgactctgaaatggctgggaatgtgactttctaattttaaattatctttaacaagggcaatgaaaagaggaaaagttgacactttgagaagttatgacgaacttgtcgagaatgccaattgacaaaggcaggtaagggagtacttggaaaaacagcaagaataggtctgaagggcacggtgagctgctttcctagggtgtaaagggaattggcagccgtgtttattgactcttccaattaattttaaagaaacctgaagaaatggacaaagacagagaaaaggcaaccagatgtgattccgcccttccagaagcaaagaggcttatttcatcccatatgatcgatgccagtcatggggaggagtggctgtgtggaaattaatggattttcaacatccaatcacagaggacacacatgtatatttagcaagtctaaaacctcttaaataaactgcattgcttttcattttcactttccagttataaaaccagtggatgatgaaaaggccatgtgacaatacagcatgtactctcaggaatgtttgtgtgacggggatattatatctgaagggacagggcaactgggagggtgaactgctcataactctcaattgtccaggtaatgaagcattgggaaagcaaaggcaaatgaaataacctgatcatcaaaaaatgattcctcttttagtgctcttattagttgactgatgatgacaagtgtgaaattgccagagttgtattttaccatttctggcactcatcacgtgctttggatgagcacatgtg

SEQ ID NO: 79823 - DNA, 1763 bp, Homo sapiens
gcgggaggagtgagcgacctgggaagtcccgggggtggagagggggcgctccggggtctgggggcgacgtggacaccttctttggagcacggcggtgcgtttgggatttgaaggaagggccgaaggaagcggggtgcgggcgggcgagctgttcgccaagttgtctggcgggcgcggcgaggggagatgcgcaagtttgcagaccgggggttcggagcccggcgcccaggctggcggggggcgtgtgcgcgccaacgcgcagagggcggcggtcctgtggggcgctccacgcgcatccggagggagcgtctacaaaagcaagcaccgaaacttatttctgctctgggaatccttccctctcggaggttccaagcatttctgcaggaacctggggatggtcagtgcaagttgtatgctggttggatagtgcaagcaatgttttctcctcccctggcgatttttactcttcattttggtgtttggtctgtgtctgcgtgtgttgggggggatgggggggactcagttgctccctcctttcctaaagtgagctgttgaggaaagctcactctttcttgaaggtattggaacctgatgtgtgtttttctcgagagtgggggattatttatttgaatgcgcctggagtttgcaaagaacaggaggaagctacagctttaattactgttgtaaataatgtataaatcgcgcctgtcactccggaggaagcgtgctcgcgcgagccgcctggagctggggacggagaggatttctccagccccggcttgggtaccggcccagcgcgccccctcctcttgcactcggcttctggcggcggttggggagggctgggtagaggcgaatgggggccccaggaactgctcccttcctctcgatgttgtagttggaggtaggaatatggctgatcatgtgctggctgttttacagtatccccccccccaccttagccacaccccctgtccaggcgctttcccattcacggaattcgagtacagtaaaagccatcaggatgacacacgcgaaaaacatttaattaaaggcgatttccaaagggtgaccgcggcgaaccgcggtttcagcgggaggggggcggcgagggctgggacaaaagggaaggggatgagggctgggggcctggacctgccgctagctcggtgagtttgtgtgcggggagcttttggctgcaaagagtatatttagaccctgagacggtggatttggaatgcgagcgggttatgtaacagggttaatcagaaacactggagaaaatccccttcatgtgtttctggggctttttttttttttttggaatgggggggacatagtatttaggaagctgcactaatttttggtttgtgctgccacctttctccttcttgacccccccacaccctgtgttattaacatcttcaggtgtcattcttgccagaaggtgttcttgcaagcgatcagggtggcaggctgcagagccgactagcaaatccgtaacttgctgttcttgcaaattatgtaacgccggagcattcagtgccaccagcccccttaggctcagcaaaaaggggagaggggcatagtaggagtgggatacatcttgcacagctgacctgctgacccatatccccttccccccaccctctgcccccaccccaactcattctttgaaccagcccctgtctgtccctcctggaagatttaatgggaggggggtggtaaggcccaaacactcaactcacatcctgcacgcaggc

SEQ ID NO: 79824 - DNA, 1101 bp, Homo sapiens
aacatgctgtgaatatttttctagcttcatgtaccaatatgtagaattgtgcttttatttctaattaattttttcctaacactattattataattagctaatatgcagtattgtaaatactacttaaatgcataacttcccaaatctagagcctggtttccttttcagaatcatatcaaaaagttggaaggagagacttaccgataccactgtgctattcctggaagcaagaagacaatccttatggttacaaataggtactgacttgaagtgacatttttccaaatagtacttagttgcataggtcacaagaattttgaaggctaaaatggcagaagagttggaaaattgtacttaaaattctccaaagtgaatggcaaaatgttcattttcatagaatcacaatacagatctaaataggtcctttgagattttcttttccgacctcctcatctgaaagatgctgaaactgagactcagtgtggcttagggacttatccaagttacacaaccactgagagaatgtagactaggctttatacctgtaatagtgataccctttttcatgaattacaagtccagttatggaggattaattcatgaatcacttttgttactaagttttattttgagtgattagcataccccttttaaagggtggcattacttctatatgtttatctcagcttttcctaagcatttggttgtggtagatttttccaaatagaagaacttatagtaaactaccaagcttattttcctgggatctatcctagataataaaattatcccaaaatgacaattatatattaataattttcagaactttcttagtgttgagctttataagagtaaggcaaagttcttacagtggcaaaatctgcattagattcctcatgactgcatttaaatttgtttgaatgggaataaagaaaagctgaatgacaggataagagaggttaaccagtcatgtcagaatcctcatgtaagagaggattctccagtcatgtgatttgctcattagttaagagttaaaaatattcacaaaacaatctaaaaagcagattttatgactttgacaagtaatcacttattttttat

SEQ ID NO: 79825 - DNA, 1819 bp, Homo sapiens
aaaataataaattgaatgttttatgtttaaccactttaaagaagaaagactgacatccaaaaaccagcgtgtgctagatatacaaaggaaattacttctgtccttaagggaccaagtataacaaaacatgtaactgttaaaagtagctgacaaacctttcttgtgcctagataatttagcattggcaaaaatgtcaccacatgcagttttctaggagagtcaagcacaaataactaattcaagatgctgacttaaatcatctccaatagttacccttcctgagattctaaagtaacaatttttaattttactggttatattgctgttttactgagacttacttttaagaacccctgtaacttaagattttttcttaattgttttgtttagctctgttattaattttttccttgtgatatctttttataactctctgtcaaaaagcacaaaacttcaagaaacttttaattattttgtctgaacatataatcttgtctgatttcttagtttttattaagatatcagacaacttttaaaactttagtgcattattataattactggaagaaaaagaatgattatacactaatgagaggacttggtagtttttgtcgtggatgtcaagtgtgggcatggataattgaaatatttaggctatttcattctttgcccatcttgctgtgatcagttagttgggtaaaaatatttattgattatttagactgtactggatatacaaaagaagccttctgtccttaagggaccgagtaaaacaaaacatggaaatattaaagagtattagagtataaaagtatatctttttagccctttgtaatatggccaaattctaaataatttatttggggatcttttgatcctcatgttcctttttctcctaagtactactttgtattctttaatatgcagctttgagagttactgaatcatatattatatttccatgagatgtactattctacttatcctctaatcttcatatatatatacacacacacatatatatacacatacatatatacacacgtacatatatgtacacatacagatatacatacacacaaacacatatatacacacatacatatacacacatatatatacacatacaaatatacacatatatacacatacatatatatacacacatacaaatatacccatatgtacacatacatatatacacatacatatatacacacacatatacacacatatatacgcaaacatacacatatttacacatacatatatacatacattatatgtatgtatatatagtcatttaatactcattttggttcacatacttatgatcatgcaacgtttaaaacagcatttcttgctttttagttttagttatatttttccatgttcttagaaatgcctcattaacatttttaattcttgtattgccatctattgaggtgacattacattgtgtttttatctcgtcttaattcatgacattaaattattctactaacagtaataatgctgtaataaacatcattatagattttgcttttttatatcttgtttgctttttcatatttccttagaatttacttgaaaaaattgaattactgggtaaagggcttttgcaaagtattgttaaattcctcgagttgcatttttggaaaggggacgtgaatattttatcaactaatttggtctccctgctgccattagtgactgaatatcttaatctgaatctcagagtgtagtgggtttttagtagtgctgaagacaagttttctaaagtgtattatggtgataaattatattttaaaaactgtca

SEQ ID NO: 79826 - DNA, 1085 bp, Homo sapiens
acaggaataaatgtttcctaaactactacttgatttcatccttaaaaatcaaaacaaactgtggtgttaattgactgtgtgtgaattccattgtcaattttaatgaaattttctttaaaactctcacctccatctgaacttttcatagtagtgggattgactacaaataaaaacttgtggtattcctggtaatactgtccagaaataagagattagtataaaatattaaaggatgcagagaatcagctctcttctgcgtttaatagatgaaagcctttattgagctcagaagcagatactgttactatcatttcgaaaattttatcttatggtgttcatgtgcatttcaggtaaaattgaaaaacaggacaattattatgtccaattaatatgtttatgtttgtgagtcttgatgatggaattacatagctttctgtttcacaaatggctctaaatttgcttaagttacgggactattacctggagcatctgctttaataattgaattgtcagttgctctgagcctgcccttagacctcaagtaataaatagttggcacatgaattttgaggatatgtttcctcttccctctttttcctatttaaccccttggtactgttgctaaataaatgatagccattttataattatgttatatacattttcagcctttagcatttctgcttttcaaaaattgaatctccttgttggttatgcttatttcataattattagttttaattaatgtagatagaagttgaacatgtaattaggcaaattgctgtgtggcacttgaatacatagatttctttattttcaaaaaccaaccttttgcttttaaatccttagagagggtttattatcttagagaaaaaataattataatcattatttttgaaattagtatcctcttaattctcaacataagttatgtttcaatttcttttttttgtaataaatgatggaaatgtttaacaatgtcttatctagcaactttcatgcttctcctcagaaatgaagccaaagtataaacttagatttaatgtgttgtatatttgaagagaatgaaactattaacatataat

SEQ ID NO: 79827 - DNA, 1032 bp, Homo sapiens
agctgaaagccttattatacttttaaaaacttgacagcttgctaacttaccttaattgtcatgttattgttattatctgtattttgactggcagattacttgtgtgccagtttacatgtttttcttcttaaaatgattacgccatttttgtaaagtgtgtcggtttccctcatatgaatgcaatggcatttatatacattgcataaaattagaactctgtttttggatcagactaatttgtattctatcaaaaagcaaagagaatcaaatgtaagtgggttgttctgctataatgtgtggtatcaaataatagctttcactaggactctaatcgaaagactttttttggtttgtttctggactacctggatcctaaatatgtaaatttttcacttttagctttcatttattgaacattatttttcttttagttgcatttgagtttgtctttgggttccggaggtgaagaatcagacaaagaaaaacaggaaatgtttgcagttcattctgtcaacttgctgttgaaaagcataggtgctactctgactgatgtggatgaccttatattcaagtaagacttctgttagagtacattgagaagcaggtgtaccaaggtcatgtttctagacattaattctctccacttgtgcaatgttagcttaggaaaaggataactttactacttatatttggagaatttggttcatttgtgattatactctttaggaatgcttattgtattcataatgataaggtgtagagtcttgttttttgttttttttgattactcatatctagataatacatggatgtagaataataattgaattttttagtcatatattataaattaaccatattttaaaacataattatatttagagatatgtaatgctagatacatatgcattaaataaattgttattgaattgaaattcaacaatggtattggaacaagtagttatctgggtgaaaaaaaattccctgtagatcatttttaccttacatgtacactactaaatttcagaggaa

SEQ ID NO: 79828 - DNA, 1050 bp, Homo sapiens
cgaatgtggcatttgggactgtaattgctaagtgttaatgcagcagtattaccttgagtgaagctttcactccagtgaaaaagtctcaatctaagaagactttgatcttattaacataatttttaggagatgaaggaacaagatataactgtggcttttcactgaaatcaaagttttaacattgaaaattaaaagatttggtagaaatccttttccattttaaattttttttcttaggtattttatggtcctcattcaggaaatggccttaaaaattgatcaagggtttctaggagctattattgcactgtttaccccaacaacagaccctgaagctgaaagaagacgggtaaaaatttttatttcttggggaaaatataaaattaacaaaatttaaatcagcctcttttgaacgaattctaatagagaaaaaaattaaaatagaaattcttgattttatttttttcagacaaagttaatccaacaagatattgatgctctaaatgcagaattaatggagacttcaatgactgatatgtcaattcttagtttctttgaacatttccatatttctcctgtgaaggtttgttgtaattattattttgaaaatttagtgaaattattgtagaactttttaaagggtctgtggaccaaggtaggttttaatttgttgcatcatgtatttggtgggaattttgtttgattaatcgaaataattaagacagttctctgtagcatatgtgcagccacaattcccacagagaaaccaccagagcatgttctccagttttgaattaataacccccttattcaaagaagaagctgacaaaagcgtttcttaattaagcgtagaagtgcttgccaacgtttaatgttttggttgcactttgtaactactatcactgtctaaacagagagctataatgggtgctgtaaccagaatgtgaaaacgctgaagtaggtactatactgttgatgtggtgtttttccccccttccaaaatttgcttgtaactaagggagtggaaaattggatacctttcacttgcct

SEQ ID NO: 79829 - DNA, 1140 bp, Homo sapiens
ccaggaaagtcttttaccaatagtgagttaattgaattgtgtctgattgcagcagctaaagaaatgtatccagagaaaatgaactcgtttaaggccattagcctttcagtaggaacagttgcttaaagaattgaagacattcagaacaacctcaatagtcaattacaaaaacaaggcaaatgatattgagtggtttcctttggctcttgatgagtcaacagatgttaccaatactgctcagttatatatttgagaagtcagcacggagtctgaagtgactaaaggattaacctgtataaatagtttgcctaggacaactacaggtgagaatattttcaaaccagcgaaagaaatactaattcagtacaacctgaagatagatacaactgattatgggaaaaatatgtgtggaacagaaaaagacttagttggacaaattcataaagctagtgaaaatgtaaagcatttaaagcctattgtattatttgtgagcaggtacttagtggaaaatatttcagtccaccttttgttaccaaaccattagtgtcaaatagttaacttcattaattcatgtggacttaactatcatcagttctgtgaattttcacgagaagtagaagctgaatgttcttacttgtgttaccacacagcagtttgatgggttagcagcagtaactttttattgtactctttgagttctgggccaggattaaaatttttttgaacaaaaagaaccaccctcaaccactatgactaaacaccaataatagtggctttggaaattaatttttgttgcagaattgataatgcaataatagtggctttggaaattagtttttgttgcataattgcagaattgatgatgttttttaatgaatttcaagctaaaattagaagacaaacagtgcttatgtgaaaaatttatactacagtatagtcaattttgaagacagctaatgtttgaatctcaggtagtatcaagatgttccatgtacttcctgtgctgtccaaggttaaaacatgaagcaaaatctccacttccacatgtatttggagaggatatattttaaggcctgcaactccagttccagcaacattttttctgacctcagtgcaggtgtaaggaaatttccacatttc

SEQ ID NO: 79830 - DNA, 1016 bp, Homo sapiens
tatatttataacagatcagagccagtttgctttttagtaagaacttaaggaaacaggccgggtgcagaggctcacgcctgtaatcccagcactttgggaggccgaggcgggctgatcactaggtcaggagttcgagaccagcctggccaatatggtgaaaccccatctctattaaaaagtacaaaaattagctgggcatggtggcacatgcctgtaatcccagctattcggaaggctggggcaggagaattggttgaacctgggagatggaggttgcagtaacccgagatggcgccactgtactccagcctgggtgacagcaagactctgtctcgaaaaaaaccaaagcttttgtgttttacgtaatattgaaattccatatgtaagtgtagattaaaccagtacatcaaacatactttttttttttctacaatagaatgggggtatcttggtggatgtaaacactgccgaacattcaactgtcataactttttctgattaccatgagggatctgcacctgccttgataatgaaccatacaccatgggacatcctcacatacaaacagaggtatgagaaaaaagggttaatgggaaatacttttattggttcatagtaactaatgggaaacactttggtttcatattcaaaatgtttttagattttagaaaggtgatatggaacacatggtatttatctttaatacccttacatgttttgagataacactctgtaaacacattaatatttctgcagcaaaactgatgaatattcacatcaaatgggataaatagaaattattaatagtttcgtatcaattcaggtcaggttttgccgccaaatgagttttgataccaaatttccagaaaaatctttgggcttttagagctttttaaatttcaaaatggcagataagggagtgaacctgtttaagtattccctttcctggtaatctggtaacgctcagtgaacctcttcctataaatctgtatttagtttttttgggtagggatagt

SEQ ID NO: 79831 - DNA, 1045 bp, Homo sapiens
tttttcatgtgtactatcgcaaggacaaaaaaccaaacaccgcatgttctcactcataggtaggaattgaacaatgagaacacatggacacaggaaggggaacatcacactctggggactgttttggggtggggggaggggggagggatagcattaggagatatacctaatgctaagtgaccagttaatgggtgcagcacaccagcatggtacatgtatacatatgtaactaacctgcacattgtgcacatgtaccctaaaacttaaagtataattaaaaaaaaaaaaacaagttggctcctaaagtgtaccgaaatttgaatttcaagtgataatgtggagggctgttatcactacaaatttttatggtcactgataccagagcaaaacctgaatttgtctaagtttaggacattgagtttaatccatccagttgagcaacttggtaaatattcacagtatgctagaatccttattctgtaccaccccttgccagacatttcttaaatcttaaatttgactagtatgaaaatttgaataatatgatgccaattaacctattttattactacttcaaaatttttattttactaatagcagataacaaagcctgtacactaattataaagcaatttatgtttggaattttaaaaagtaaagaatgctagacgtattaaatctgtcattgtaagtcgttagttaaattactaattgatatttcttgaattgtttctgatggagccaaactaaggaactataatttttttctcagaagataatcttttgcagaatgtaacttatagttgctttatttaagaattattattttaaaatattgtaagaagtttgtgtgtgaatgaggggatgtgtatatatttcaaagacattgaataaactggaaaataagcttttttcctttccacaggttggtgttagcatcaaaatgagcagtttcaacctttcacgaatagttaccctgactcccttttgtaccattgcaaacaagtcatcattagaactagaagttggcgagattgcatctgat

SEQ ID NO: 79832 - DNA, 1065 bp, Homo sapiens
caaactaattgggtgggtgaaggtgagattaatacaagggcacaatttgatctcttctataaaactttatctaaatcccagaaccagaagtaaactatttatcctctcacctctatagcattttttgcctcttgtatggttcttatcccattgagtcttgtatcataatttttcgtatgtatttcctaatctctctgtctagttggaagctcatcgaagacaggaactgtgtcctgctgtcttccattctgcctgtcacaatgtctttaatgtagtgtctgctgaacaatgttgaagacataaattctctttatgctaagactttaaaaatttgttagctctatgtcataagtctatcactggaaaacatcgttttgcattataattctttttaaaaacaatacataatctcattggtatctagatttactatactcattgcataggtgaatgagaaagtcagaactttctcattcaaactttctcaggaagtttttgttttgttgttccctagagttttttgtggttctgttacctgtttgcaatatggctttgattatatatttctgtgtcccacggtactaaagaaatttctagtagtccagcaactttctctcaaataaaattattatagtgttttagatttcttatatgacgatatgtgctctctggtataggtacaattaaaaatttcaaccagtgcctggtccagtagtttctcattggatacagtgggaagttatgggtgtgtgaagtgtcctgccaacaatatggagtacctggtaagattctgcttccttatttacctttgattccgttcacctttgctacagttcaacaaacaagttggaataaacatatgtgtgcatgtgtctttatagcagcatgatttatagtcctttgggtatatacccagtaatgggatggctgggtcaaatggtatttctagttctagatccctgaggaatcgccacactgacttccacaatggttgaactagtttacagtcccaccaacagtgtaaaagtgttcctatttctccacatcctctccagcacctgttgt

SEQ ID NO: 79833 - DNA, 1522 bp, Homo sapiens
gtagaagtcagtgttgcatgattacttggcttgacacataattttgtgttctctcttgtttttcttggttacgaatttattcaaaatttaaattagttactttaatttaaaattaaaatttaatttaaaaatgtcacttataattaatgtatgtcacttaaaatcatgtatgtatatattctcatctgggaaagaatttattataaatatttttctgctttcttttttaaagatttcacccataattcttaatactgtgttgacaatcatggctgcattgtctccaaaaacaaaagaagatggatccaaagatacgtctaaggaaatggaaaatctttggggtatcaaatcgattaatgattataacacttggtttcttggtgttgacacggcaacagaaataacggaaagcttcaaaggcattgaacattcactgatagaggaaaattgtggtgttgttgtagaatccattcaagttaccttagaatgtggccttggacatcgaactgtacctttattattggcagagtctaagttttcaggaaatattaaaaattggacttctctaatggctgctgttgctgacgtgacactacaggtatggccacatcacttaataccttcagagacttcttgaaagtgcgattttggaattaagatatacacttttcttgtttgtgcatggccactatgagtacatatgtgaatagatagtgtgttctgacatttaatttgtcgatgtattgttttttgataattattttttaaagattgatttgctaaataatttatgacaatagagtaagagagtaaaggaaaatacactctatatattgttagatgggttttgaaaatggctaatgatatataacattgattacttaataatttccctattggttacagaaatatgtaattaaagccaaaggactgtcttataattttgtgtgtatctttccaggtgcactattacaatgagatccatgctgtctgggagccactgattgagagagtggaggggaagagacaatggaatttaaggcttgatgtaaggaaatcttaaaatatctttggatagaatgatactatgcatattcattcatagtttttatttcagtgattcttaagatgtggtctaggatccttgaagcccttttaagggctctgtccatgaggtcagaactcttttcatatgtcattttcattctcattctctcacgagtgtatagtggagttttccagagactaatgaaggtgatactgcaacagattgaatgcagaacagaaacgagaatttatctgtcttcccttaaggcaggcagtaaagagatatatgtgtatgttcctcttctcactgtatttttaaaatagttatttttgattaaaaatgttatttatattagcatgtaatttttatttttaaatgaatttttaattttttttcagttttaattgttaatagagtacatattggtagataaaacataaatgaagctctttagtatactcagtgatttttaag

SEQ ID NO: 79834 - DNA, 1045 bp, Homo sapiens
agcacacttgataaacacttgatgatttgagttgtattgaatactttcagactcaaattttcgtaggatgatctttgaagataaattccttcagggaggttttatttcataaataatattaaaaggctgcctttattttgtgtgactacactgatttgttttgttaattgcccaaattcctttccggccattattggtttgtttctttagtattgcattataatgtaatactcaaaaattgcattataatgcaataacatatagaattgcattgtaagtataaaatattcagtaattgcttaataacgtatatcttgctttggagattagtagtcttgtttactaatggataaattagattctagttaatgttgacctgttttctatacagattagaaactgaaaggtgaaataaagattattgaggtatataggaaattcttcatcttttttattgttttagcaagaataaaataatgaatagcatgttttttttcagaatgattgacagaaagaatgaccaagataacaacagttctatgattgatataagttacaaacaagacaaaaatggaagtcaaattgatgctgttcttgacaagctgtatgtatgtgccagtgtggaatttctgatgactgtggcagatttctttatcaaagctgtgcctcagagtccagaaaatgtggcaaaagaaacacagattttaccaagacagactgccacagggaaggtcaagatagagaaaggttagcagaatttatctgtcatagatgacaacttgtatattttgacaagaattacaaaccagaaaaaagagaaatgaaaaatttaagaacgtaaaattagtcttttatatttaaacatattctatataaaaactttagctttttagttttttaaaacatttttaagagagaggtacagtagatattggaccaatggccaggaaagtccgctggttccaactgtgccatgaacatttctttactgatccagaaatgaagttaatttgggtcagtggttagtggcctgttttataggtgg

SEQ ID NO: 79835 - DNA, 1071 bp, Homo sapiens
ttttaaataatttttctaaaatacaaggtttctttttgatttcttaaacagattatattacatataatttcactcttttttcataatttaaagccattgatgtgaatattatgtttaattagactgtaaataggttaatattttcatggctaaaaagagatgaagtaccccttgcccatatagtaaatggtcctggctgctgtgcttttctaatgctctcataccatcagctgttacttcaaatgacagtaatcggtaaaactaccagttgatataccatatcaacactgcttctcctatagttaggctaggtgtgttttgaaatcacacaaacaaatgactagaacagtgtgcaaggtttctggtttaagtggatagttttaagtattgcataagcttgatgaggtcaacatctccccaggtgaagtttgtgccaccatacagacaaatgctagataaaaaggctgttgttatagttagacaggaactatgtagagatgaataaactattaacaggcaagccttatgtgattaatgatctcactgtgttcagccgtgatcacgatcatgtatctggttcttgctatatggacaccgtgtcacttgggaaaatttgtgaattcaaatggaagctgcaaagatgatgaaaattagaatataaattatttctcagaaaaatagaattttctaacttggagaaggcttacgtggttaaagttacgcagtatttgtttttccagtaacttgtaaaaacagactgttctatagtatgacaaaaaattagagtcagtgttgaaaaagattatagaatcagtccgtaagagtgattgaaagcaagatctattcagtctgtgtgatctatctaaagatgagagaaaagactgacttacttcctgaagtctcatttgtctcaaaattccaaagcacccactcctttcccctgcatcatatgtgaactctgtttgattttgctattgagttatattctgttcttctgataaagaaaatggattgggtaatataggtaattaaagataatgaggctgggtgcagtggctcacacctgtaatc

SEQ ID NO: 79836 - DNA, 1101 bp, Homo sapiens
tatatactgagatgaagagctacgtagcaggagagcatctttttactatttggtagagactagaaactgaacaacactcgtcctgtatttagtttcaaggagagtaaataatatagaagaaggaactggtactggttgagatgagagagagacagaatggagatgggaagatagggaaatgggacagataggcacgggtccaggaacaggaagacatagtaacagataagccatagagagtgttggagtgccagaggcaggggcctggatatgggcgaaggcagaagtgtgtgtgcacacagtaaacaaggtgaaatacttctgttctggtatttatagtcctaactctaactctcttctttttaagtaggtgaacaattaatttgaaaaaccacaaatcgagatatagatatgatagtctacattttttttattacttagagttaacaaattattggtggtttctaggttgctctcagtgaagatgacttgacagttttaatgaaaattttgctagaaaatcttggagaagcttcctcacaaccaagccctacacagtctgtgcaggagactgtaagagtgagaaaagttgatgtttcaagtgtacctgaccatctcaaaggtataaattgatgatatttactttatggagaaaaaattggtgttaatgtcatatttatatttagtatttttctagctgtccagcacaatgtggtatgaactaattcagtattgtactacttactgtggaaattcggctggggctgggaggtatgtctgttctctgctacagggggaagggtcacttgttgttggcatggtgcttgtttaccctttacttgtgaatgctaaatttgctgaattcactaggcactgaagtggcgtatcttgagagaagaatcaagctagataggcagtgtagtaaggtcccaaattaattaagagagaaaaggaccttggtatcacatgtcatactcaggtgattgaaccatgagaaaggaaggtattcttgtaacagctttatttatctggacttattggagcgttatgtttcaaatacataagataatttttcagatcattaatttgaacctattaaaa

SEQ ID NO: 79837 - DNA, 1066 bp, Homo sapiens
aaaaaaaaaaagccttatcagaaataagccggcagaagcttagtttctaagactaaactttattgctgtggcctagcagtacagaattgaacccaattttggagaagtacggtactgcccttctccctttcatttaaatttgaatttaaaataaccaacattcttaataaaaaggagatttttaaaagaactgttgcaaaaatttatcatgagaataaaataattctcaattattttatattttataaaatattttataaaatgaaaaatattttatgaaatgtaagaaagagctctttcttcctacagtaactattgttaatagctcagagtgtatgtttctagacttcactctctacatacacaaaatcataaataacatcttttatattacttttttatttagtttttaaagtaaatgctttttaaagttttttcttttaaaaataaatgccttttttcccctaaatatctgtctcttccaacagaacttcctcaacaatttccaaactgctaaagaagctttgagtacagccacagtccaggctgcagaaagagctgcttccagcatgaaagacttggctcaaaagagtttccgccttttgatggatattaatttgaaagcaccagttattattattcctcagtcttcagtatcacctaatgctgttatagcagatctgggtttaatcagagttgaaaacaagtttagcttggttcctatggaacattattctcttcctccagtcattgataaaatgaacatcgaactcactcagttgaagctgtcaaggtataaatatgtaatctaattgtgtattgcttactagaaataggattttcatacaatttttacctaaggtaaaatgttgtagtaatttgtggttttcattccttatttcttctaattatgaaaccttgaccattggcttcttggtcagtggttaaacagtcatgtatgtgcctcatggagtctgtattttcccttactacatatgtaatatgatttttttcattctataaaaattagctattataaaattatagtttactcaatacttagttt

SEQ ID NO: 79838 - DNA, 1196 bp, Homo sapiens
aaactccattctgtttgcaaaacctatcatgtgttatcattccctggttttgctcctttctagtaatgtctccaccgtgtgaggaggtcctttgctctacttgaataatacctcctctaatacatcctttcttgacttctgtataacagtgtcacgctttgttctgtgcttgcagtgcattttatatagagtctattaacatttgttcacttaatgtgactaggtgtggcctgcttgtttgtttgtattttaaatgtatatgtctcttccactaaaccatgagttttccaagggctagcgctgttactaattcgtggattttcattgcctctaccaggtccagaatactcatataagtccacaataaatatttgtggaagaaatttgtgaataaaagtaatgaatttcttttaaacatttcaggtgaaattaaagagccccttgaaatctctatatcacaagatgtacatgattcaaaaaatactttaacaactggagtggaagaaattaggtctgtagacatcattaatatgctgctgaattttgaaattaaagaggtgtgtaattttcatctgtttttgtaaagtgaggtgaataagtaatggatattggaattacctctactaaacttacagataattgatactgatgaaaaaaatctatgtgggctgttcacatgtagcagtgatgttttaaaaattgaaagtttgttaaggatttgggagtttataatatttcatagagaaaatgacagcatgttgtataacatgctttttaatgattttaggacagttggaatgtcacttgctttggatgtcatataagaaatgcaggaaaggacaatagtgtcagataaattcttttcaaatgttagaaactcttgatagaataaaacacaatatgcctgcattttaaaaaaaagttacattactaatatgtttgccatctgcatactcttgaggaaagatgaaatacattttcttctttattcacccatccaacaaatatttattgtatatgcccagtgacaaggatagaggtaaaaggcgtagagtctgaactcatgcaggaaaactgttaacatttttgtaattatttcacgaaaactctgctgaggatactaattggagcttggggtgctgatggtagggagggggcatttaagcaaactgagagggtcataaaagattttccag

SEQ ID NO: 79839 - DNA, 2175 bp, Homo sapiens
ttgaaaaggtcacttagtaacccattcataattgtcctttttatatttaaatttcacggatgccacctttgaagtcatttctagacatagtagtagcacatggtggttctgggatttcgccttttgacttataattttatataatcataattgtccattgaagatccaagaagccgtctgtatgttgaatatcagcatagccatgagaagcagagtatagacttcataaccattatgctttggaaatggagtaattaggttactgtaatattctgatgtacccctgaagtgtataagtgtaatttttctctgtatattccctttttaaggggattgtgaatcttccactttttactcttccttcagagtggtggaaagcaatgatgtaagcccacctgagaatcttttgggtctgtcgtggagactacaggttataattggctgtggaaaactaattttctctttaaaacatttttaggtggccttttcatctttaaatctgttgctgcaaacacaagctcttgtcgcttctattaattacctcacaaccattattccatctgatgatcaaagcataagtgttgctaaggaggtacaaatttcaactgaaaaacaacaaaaaaattcaactctgccaaaaggtatgaaacatacatttttgttttttgttagcaagggttttagaattctaaagctaaatgaggaatactagagactatctgactcagtcatttaaataccattttccccttttcttcaaattaaattatatgcgagcacctgatgtataaggcaaatgtaatcaatactgttgtttttaaaaatgtttcttttagttcttattttggtggtggtgtaggaagcccttaggtaggtaatagggggagaagatctgtatttatactgagctcttcctccccgctcagtggctcctgaaggggctttataaagagttagtctttctttccattttacacataaggaaattaaggctcagagacacaaaggtagggaagggttcaggagtagcatctaattggccaagagcccagattttggatcaggaagaactcagttcacatcctgattttgctacttcaaccatgtaaccttagacacattatttaacttttctgaggttcagtgtccttatttatttattgtagttttttctcttgcttttaaattataaaagtaatatctcactattaaaaatgcaaactttacagaatatataaagcaaaaaaagtgtttgaatctttaagagttggagaatgttataattttttttaacataacagtggttcacttaatatagcgaataaaccttaaaagaatgtagatgactagaatctcaccatgtgacagatgctttgttttatttttagcgattgtatcctccagagatagtgacattattgatttcaggctatttgccaagttgaatgctttctgtgtcattgtttgcaacgaaaagaacaatatcgccgaaatcaagattcaaggtaaaagttcacacggcattgaaaattggcgaaaagataaacttttccttctttttgtctctttgcaatgctaaagaatgtacaaataaagggctctaagctgtgaaacctgaaaagacgtaattggattgtatgcttcctctatttgggatatagatattggtcagaatctgaccatcccaattgacctctacacatatcctggtgtttgggaccttcctgagagttatctaggaagtggaaaagggatactgatgtcaatgtaggaatgctattgatgggctaggagaagtgtcagtctagattttaggtgaaggtctgtggacgtgctttctagtaactttttaatcttttttttttaccttcatatgatttttatatataattatgtatttgtctttatttgtctttccttatgaaaagcaatcttataatggtgacaatatctatgagcccattatgttcttttaggtaaaagctgccaaaactcatctagcttttcctctggcttacttttactagcttgttgtgacctggtagaggtcaagaatatgttgaatatgtttaatgaaattttttaagaacttaaaaactagaaaactaggggcttttttcctttgtcctttccaaactggcagcgcatctactagtctgaatttgatttgtgaaa

SEQ ID NO: 79840 - DNA, 1019 bp, Homo sapiens
tttccattatcttctctcttttgattcttttttttcctgatttcctctctgatatttattatttctttcttttacttactttggatttcgtttgcttttcagtcctagtttcttaaggtagaagctgaggtcactgatttgagaccttagtttttttccaatataggcatttagtgctttatatttccctctctacagtgctttactgtaccccagtgtggcatccagcaattaggcatctgtcagcttgagctgttcacagcttagtcaggaagccaaagataaacaacaacagctagaaagagctttatgactagctgccacaaggctattgagacaaataaacctgaggcaattacattgagtagggaaacagaatagaagcacctgccaaaaagtaagcaactgataaaagcacagtggtgattcgtagtgagtaaaacagatgtcctcatggagctgacattttaatcagaggagacataaacaaatataaatgtgatatgtcaggtgctgccaagtgctatatatagaaagaaataaagcaaggcaatgggatagaaagtgatgaggttaaatactctttgatgtttataataagaatctttgataccaggaagtagtgttttggttttgaaaggtagagaattgtgtttggaaagattttcctaaaaattagttaagttaaagagatttggctacttaagagggatatgttgaaattatctgaaaacttagctaacatagaacttcccatttcctgacaatgttgtctaaatgaggcattagtgtaattagattaaaacatgtcaaaagtttaggcatgttttaatctaattacattaatgcaattctttccctcgtttgtaatgtagagatgctgacttaaaaccactgaattgtatttttagatttaaagtgtcaggaggacttcctttgatgcatgtgagaatttctgaccagaagatgaaagatgtgctatatttgatgaacagtatacctttgccacagaaatcatc

SEQ ID NO: 79841 - DNA, 1071 bp, Homo sapiens
ctatatgcagttttcaccttacatgctgaattgagaatctaatttgtgagaaaaagtaatactcctttgtaatacttttcttttttttttattttttattttcttttattttttgagatggagtcttgctcttttgcccaggctggagtgcagtggcacaatctcagctcactgcaagctccgcctcctgggttcacgccattctcctgcctcagcctcccaagtagctggggctgcaggcgcccgccaccacgcctggctaatttttttttgtatttttagtacagacggggtttcaccgtgttagccaggatggtctcgatctcctgacctcgtgatctgcctgtctcggcctcccaaagtgctgggatgacaggcgtgagccaccgcacccgacctgtaatacttttcaagtaaaactcttattctagttgttaataatatgattacatatttcaacttgaccatctaatctgtcattatttcttacgtctttaggacttacacatattattgaaactcgaaaagtccttgatttaaggataaatctgaagccttcttatctagtagttccacagacgggtttccaccatgaaaagtcagatcttctgattttagattttggtacatttcaggtaggtatatatgcgtttttttgtctgcccatctttgacctgcttgctagctaactctccaacagtttgctgtttttttcttcagagttcactaaactaaatgtagacttattttttagcctgtgtttcaagccttgcttggagtattttatatatgttttatgactattaaaacaaaaaacctccaaattttctgtagtggtagggtgatttgacagtaaggactggattacatctgccttttcctaattagaaagaagcattcgtagttttcatagtttccagggcttaattatacagtgttatttgttgcttataaatttgacaataggaaattgtacatatatgaatgtatatttgttaaaccactgtcagtaactaagtagagcaagacaacttttggattttggattttgaatctcatagaaagccaagc

SEQ ID NO: 79842 - DNA, 1036 bp, Homo sapiens
tcaagaactatataacattagacagctctaaggtaagaaggtattgtaaaattaaatgcctcatagttaatgctacacgagcttagttgtggaagagaataactgagctaggagaaggcctaggatagctgaatggaaatgactaggagaagctggaatggagtaagagggtgttaagagtggcatagaaatagggagaggagttcatccatgtcgtgtgatcttttattcatacaacagtgatcagaacttttacagtattctaaagttggttgaagtgagtttttcacgtagatgaaaggagttaattaaaacaacaagagcagcaaaccagattgtgtgtgagcaattgaatgcctggctaaggaggttgagcttcagctctggataatgtgcatggatggtcctggttctcaaagacgtttttaaaaggaaatttgtattttagtccattagattacaaaagaccttgtctgcatctttccttgttcttcattggattatagggtagaagcgaaattagaacactggtatataacaggtttgagacagcaggatattgtgccatcacttgtggcttcaattggtgacactacatcatccttgcttaaaattaaatttgaaaccaatccggaggatagtcctgctgaccagactctgattgttcagtcccagcctgtggaggtcatctatgatgctgtaagtgcaaggagaaagtaactctttatttaaatcatcttatgcttctgacatactgttttcttatttctcctctttcatatttaacatttatttacttaataagtaagtttcctaataggtttttcttgtttcaaaagcagtatatgttcagcagctaattttgatttttttcatatgcaatacatttttccctactccaaggtttatttatctacgcctttgttaaattttaaaaaatctaatatacttttaaaaattcttgtttatttgccaacgacttccaaattgttacacgtttacttcctactccagttcttttttgtatattttctct

SEQ ID NO: 79843 - DNA, 1131 bp, Homo sapiens
gtatttttagtagagacaggctttcagcatctcgacatcttgaactcctgaccttgtgatctactctcctcggcctcccaaagtgctgggattacaggcgtgagccaccgtgcctggcctaatttttgtatttttagtacagatggggtttcaccatgttggccaggatggtctcaaaatcttgacctcgtgatctgcccgccttggcctctcaaagtgctgggattacagacgtgagcaccctgccggttcccaaattcttaacttaacattcaagacattcaacatttttataaaagttttatcgcttatcagtcatccacatagactcagtgttataaccatactggaatgctatttcccacatgtcgttttgtgccttttggattttgctttggcaaagtctgttccttaagggttttcttatatctaagtctatttaagtcagacaattttactgggaattgctgagctcttataggaagacagttaagaagaacaaaaaatttgacagcataagatctaaaatgtcaagacttttcctgttttctcttaaacctttatattaacatttacgttaacaaaatttgattttcaggtggaaatatgcaattgattctgttcttgaagttcatataagaaggtatacacagatgtggtcatggagtaacataaaaaagcacaggcagttactcaagagttataaaattgcctacaaaaacaagttaacacagtctaaagtctcagaagaaatacagaaagaaattcaggtatatcttgcatatattagtgagagctattatttgtctaatcatcctttaatattcttctgcatgtaatttgaatcaaaaaataattttaggaagaacagaattcacctctttttgagagagaattatgtgggaaaatgcagaattttttttttccagtttttcttctttaaaaaaactttttttccccctgcaaatatcagataaaataaggttactgtaaacaatttggggaaaggtgactggtttttataataatgtttaggaagtcagtatcagagctgtttaaatatgtgtttattagatagatatatcttgttttgttagtaaacatcctgtatttatacggtagtggcttttc

SEQ ID NO: 79844 - DNA, 1029 bp, Homo sapiens
attatgatacaacatgtttgggttataacttattatttaggaatagatcgtaacacacaccactggagaataagagagagagaagggcagtatagctgtagttcattccctacagccaactttctttgaattccatgtattcttcttagcttgctactgtattctttgttttaggatttagattttctttcttttttcaaaaagtaactaaatctctgagattctggtattcaggtcacccttatgttactattgcagtgttaacataatcctgccactctagagaatttttttagtgagcttttctatttcttggcagcctcacctttattttacaactggatctctaacaaagcttcctgttatttatttattttttccatctgttttctttatttcagtttcatggtaatgaagctattggttttttattagtatacccctttatgatttttctcagctttcatactcacgttgttccgtattactctggttcactgttgttttcttcgtgttcttttataactaattgacgctggataatagttggcacttatgttacatagatccctacattttttgatgataaaactttcaagtgctgctagtttgtgaaatcatttaggttcattaatggtaataaatagttaaggaaaatctacaatttcattcttaggcattttccatttataactagcttttaaagcagttgaaaattttgtacagtcttatgcaaattgtaattaccatgagatatcacagtttttatagtttgatactattcacagttaaaatttatcaccttgcattcccctatcatcttccctgatacacctttttatattacttctcaacttgaagattattttctttagttgattctaaggttatatacgtaatgattattttgacaataataaagtggtgagcagtttctttttttggaatgaattttattcatgattttgttactaaattctgctagtgattaaataagacaaatttatcagatcttatttccttttttgt

SEQ ID NO: 79845 - DNA, 1050 bp, Homo sapiens
ataattaaacagatacgtttcattttattttaaactatagagctttagatatgttaacaaacactgtgaatctccaagagggctatttagtatgtagctttcccaccttgttgaccatagactcctctgctaccacctgttttcaggaaacagctattcatatctgctggagggatcatgtcttttttttttcagcaaaatatttacagggtctgttaaatactaatttctgaataaatatttgataattgaatgaatgagttccttggaaatagtgttcttgaaagtgcaatttagcaaatgctagacttaataaagtctgaataacatgaatatattttcccctcatttttatgttattttctttcctttaaaaattcaaaatggcatttgggtaattttggagtggtgaacatgagaataatcttttaatattgattcataatttcagtgtgttgattgcctgatctctttcatttttctcttatagcttatacgacttgatagtcttagcgcctactggaatgtaaattgcagcatgtcttaccagagatcaagggaacagattttggtaatattaatgtatacttggaagagctaacttcactcccatccctaaatttgtttaatataagagggccttcatgaggacaggatatcagccatttgtttaacttgtatttcactaaatcagaaatatgaaaaacatcctttcaaatccactatgtgtcttcacaaaagcagttttgtttttgaagatgtttgtgaaatcattcactgggcagtgatatcagagcccatggtattaaattaaaactgtatttatgcttttttacattctcattttgatgacattcttgtcacattctgatatttcatatcagaatgattaagagtattataaagataatatttctcagatataaagcatgtatctttgacacatgttttagacatttgtgatgattttctgaatagtagaagattaattcaaaacttcaatgtgctaaaccagtcttagccatgtttatttacttagagattaaagaa

SEQ ID NO: 79846 - DNA, 1207 bp, Homo sapiens
gccactttatttctgatttggaatgtgaaatgaatgtcagataacagtataaattcaaaaacaagttttaagttggaaatgcatattaaaatataaataaagacactattggctgtaatttccattgagtagtaccttagctatcctttggttattaattttgaggtatatgagaatttcaactcttgagcttgtatttttctattttttaatagataagccaaaagaagccaaaaaggatacatttgtggaaaaattggcaactcaagtaataaaaaatgtacaagtaaaaatcacagatattcacattaaatatgaagatgatgtaagtaatttttatttactcagttaataattaaatatgtattttataatattcttgacttttctatatgtggattatctgtgcccatttttaaatccgagattaatttttttcttatgagtacactaccatatcctcttgtgttagcctcgttttattgggcatttatgtacataaatatactataaaattaccatgtgttcctttctgaagctgatataagaggtttttggattgtcttctgttattttttttgaattttattttacgtgttaagacataatattataactttaaggaactaatttttgctttatgctgacaaaagagttaattctaaaaggtgatgaataactaatgataatgttaattggccaaaaagtgactaaaatctggtcacttgactgtagtctcattctctttacataccactgagttggattgaacacccaaaattattcacacacatgtgcaacagtagttgcacagaagaaaccaaacttcactcataaccaaaagagtaacatcagctgattaagaactgtttaactggctaattttaattaacatacaacacatattttgaacaatatgcattgctttgtttaaaagtttgaaacatgtaagaacttgaattttttcgtttatctaggaacctggaaatgttcattgcttctaaaaatgagtttgcattctttttgtttttaatttgaattgaattaaagcaatactgacatttgtagaatttgtttttcttttcttggtaagttccctatgtaacttgataagtcagcaggacacatttgtagattgtcaaaaaataccacctctgtcttatactgacttgatttatggagtcattaaaatgaattgtgttaacaa

SEQ ID NO: 79847 - DNA, 1025 bp, Homo sapiens
cttgttgagtttgatatgaaaaggcaatgaatatgctccccccttttctaattatatatctatagtgagatcagattttcatcatgtacttcaattaaaacaacatatctcaacaggttgaaggcagaagcagatatgctaatccaactgtcttctactaagtgagacattaaagagatttgtaagaatgtaaaaccatgcaacttttctcacaacattgtgtttaaaaaatatagctatttttataactgtatgttattatgtaatggcctatttttaaatgaatgtcttttttcagtttttatttataatatggtaaatatcagtagttataacccacataaataaaaagttctttagagtcctcaagttataaatgctaaatgggttgtgaaaccaaagtctttgagaactgctttagtttgtgattgagaatcataaatttattatttattggattaattagaaactttctctaaagagctatattagctctaagattagatttaaactgtttagagaggtttaaacatggtgtatctgccattgagatgaaagacagaacatggtgctagaacaaatatgaaaccagaaagataattggtcaggtaagaagagaatttaacacgaggcagctgagtctatgtctttgaaagctgttctagccaagtggaatggttttcagggctagactggctttcttacttgtttcttttcaaatggtatttctttgagaactcattctttttatgtatgtttgatttatgaatagaacagagtcagtgactttcacagtggcaagaactactggaatagcactatcctgattgtgttacattacttattaaatgtttacttcttgaaactgagggttttatttttgtagttgaggatttgtttcttaatttttgtagtggcagaacaatttgcttttaaaaatcaaggaagaaccaattaaaaatttcaagctccatttcacatatattctctaaaatatatataacatgaatttagttggatctgaa

SEQ ID NO: 79848 - DNA, 1366 bp, Homo sapiens
aatggtgtcactgtgaatatttcctcagaaataaaatagttttggtgtcaccaaattttaattaccctgttacatgatttctaattatatgaaattaaatttaggtatattttacatgtgaaattaaaggtgtctttaaattgctttgcattttggttattgctgccatgtgggatgcaggcacacattcaggggagttcatatatggcttggagaactttgtttacaaggacatcaagcctggtgggtatgcatggttaattatattcaactatataaacatattcttgtgtatgcttgtgcttttggtggagtccatttgatggcatgccatccttttagaaaatatggaaatgcaatttttgttttccccctctaccatcatttccttttccttacctgtagtcgtttattcatttactaaatatttgagtgtcttgtggcaatcactgtgctggatgatgctggatgtttgtggggtaaacaaacatgattcactgttcttacgaagcttagaatatgaactacagataactttcagatttgggctactcttttgagtttagttctagagttcagtagtttctgaattaagcagttcctctctgatagcggtggttttggaacgtaaaaagcaataaagtggaatttttctttgaattcagaaccgtgacaggaggtgttcctctgagctttgatttgtttcacctctgttgtagctctggaggtgcctctagactactgtcctgtacagcatattgaaatttcaagcttcgcaaaaggcaaattaaagtcttactgtttatattaggatttatgatatgattcttttatatactaggaaatctaccaaatatattaaaataatactttttagtattttacataatcttatttgttaaactttatgttttatatcatacttcaagagcttgttagatgaactcagtcacatttaaatttgttttgattaaatggcaagtgggtctgtatcttgaaatttgtaaacaataagcatcatgttagaattatttctgtagctaggaactttaataggttgattcatgtgacagatggaagtggaattttcatgacaggctttacagcattaggtgaaattaccctgaaagcagtttccgttctaataaacctactccttccgtaagtgtgcctgtgttgtcttatagttactttgtttaatatcaaagatagcatggagatactcatggctcactgtctggttttgtaggttataatcaaaccagcttactgtagtctgggtagcattgttaaaaacagcagactataacagctgtcaccgtaaaagaaaacatcattgattcagtttttttttaaaggtatatta

SEQ ID NO: 79849 - DNA, 1082 bp, Homo sapiens
cggtgcggcaggtgctagatgcgggagcctctgccgcccgcggattctcggggtcccagtcccgactccggctggggagatgcggcgggatcccgcccgcgctgccaaagttcccacctttctcgtcccccgaggccaagccctggccctgctgtccccgccctgcccgtttctgtggtcctctcgctgcactcagggtggcccctttggccctacagcataaaaacagagccctttctgtttcggtatcgcgtggagtgagcatggttgtctggtcatatacgctcgaagtggcactaagaaaaaaggaggaagttgcatctcgcagttatcttcactatcattttacagggagcaagaactgggttccttctctttaggattaccgggtttggagaggaacgggcaggagatctttaagataggcgtgtgcttagggattcttactcttaatgctttcagctcctgtgaaaatgatttcttcctttaatatttacttttccgtcaatacgaagaggattttgaattttgttttggagcaatagagagaaattcaagcctcgaccagcatcgtcattaattaggtgtctgcttggttgcatgctcaggaatttatgccaacgtttttatcctggagattaagtgtataaaagtattcaggaaatagtgtacttaaacatacactcttcaacgagcttaatcgtttgcatgaattacgtgttaagctttgaggactttgggactttctcactccacaaaaggtttgggaactttgtcagctttggaggaaaattcaaaaaacgactcaaatgtatggatctgcttttaattcaagcaacaacaaatagctatagacttcccctgtccactagggtaaccactagccactgtagctgtggagcacttgatatgaggttagtgctaattgagacttgctgtatgaattaaaacatcgttttgaataagcattactcctaatgaagtaggagaaaaaaataatacctcaataatttttatgttgcttatgtgttgaaataatatttgaatatattgggttaaattaaatataatattaaagtgta

SEQ ID NO: 79850 - DNA, 1051 bp, Homo sapiens
gacccgggcgcagcggtttgcaaacagcctcgcagtcggcgccagagagcggattcctggccgtgggcagccggtcccctccggggctctcgctgggtttccggtaactgggctttgaaaagcggccccgcctgcatagagtgtcccctcgaccccagccgggcccccgcgccagaagagttggcgctggaggagcagcttcattccagcactggccgccgggactccagcgccactttgcaaacaagtctcccgccgaggctctgggctaagacagcccgccagtgcggagttccttctccggtgccggacactcagacctgccgatcccacgactgccctttacttggcaatctcgccacgggcgaactgctggccgctgagcgacgggggcagtgccgggccgagagcggggccaggctttgcatccagtgcggctggcctcacacagactcagcggctccctctccttcctcggtcccacgagctgaaattttgcgcccattggaagctggagggacctggagacgagtatttcgggatccctgaggggaccgaggaacgactttcgagggcgccatattttcagtgggtcttgactgcggaggggagggggcgagcagtttctgggtcccggggagagccccgcgccccagtcggagaggcctgatcggttgtcgccgggaaagtttgcgcgccgaggcaggcgcggaggcggccgcacaaggcgcgcacgactgctgtccccgcaagggcgcgcggactacagcgcgtcgccacgccagccggcggggcttgggaacgagagccgccgtcacggacagcgtgctgggcttgccgccttcctctgtcccgcctggacccggccttggggctccgaggctcagggaacacgcccctcttccccgcagctaccgctgcccgggtgctcagccggagccgtgcgctgggcggcgtcccggggctgggcgccgagtgtagagcgttctcccggtgcccgggctcgcctgggtgctccgaggggcgcagtagctcacttcctgggggagag

SEQ ID NO: 79851 - DNA, 1035 bp, Homo sapiens
gactagttaaaacataagccacacataactattacaaataatagggataaatggtgggtatgaccagatgttttgcctaaagttcaaagagttagggaatgtgaactctgtcaaatttcccctgcagggcccacaccccctcctcaataacctggagaaaggcaaagaagtcagggtggaggaggggaagataacatgcttaaggtagacctctcttgtgtgttgaccaccctgacaatctttggcttggggcaggtgccatttgaataacagctggtggacaaggttgggtacaaaatgctttagttgtgagagtctttatatgtcacccagagctatgaattaggactgggctcatttgccacccatttcacagtggagtttcagagacggtgccaagaccatggttttgtttttctcttaatcaacaatttaatttcagtcaaactgatgctgttctgaaaatgtagaacaaggaatgaacatttgtattttctttttactcttttagctgcagttttaacaaacttaattccctacgtctgttattcactcattcagtgtatgtttttgagggtttaccatgtactttatgctgagaagacatcccctgccctcacaatgcccacacattgtgttccgaggaggtgatactcttttgtactttgtgtatctagtagccagggcgggggtggggtagagggtggggagatgagaatgtgatgaaatagtaactgaaatacaacattataaaaagatgagaaaaggatgtgagcaggcagttcccagaacaagggatgcaaattattgtgtctcttctcaccttctctagtggacagagaaatacaaatttaaaaacagatattatttcctgtccatacaattgatacatcttttaaaaggttggtaatactctctgctcgatggggcagggtgggaattctcagaccattgatataagtgtgaattgctacaaccttttggaaaagcagatcatttctgtgaaagtttggagcacacgtgccatgtgagcca

SEQ ID NO: 79852 - DNA, 1062 bp, Homo sapiens
gttgagagttaggggttcaagtattgaatgaagaaagcacatccttattaaatacttgttgagtggtagaaggcacctgcagaggacagctggatggagacaaatggttgcagttctcatctttatctctgaagggggtacttaagcagtctacttggcaacttttgtctctgggttgaagatgataaatggacttgtctgaagtgtttatcatggaccttaatgttctggtgacttgttttggtgaatcactcatccccagagtccacttcttcacagggggagatgtctccttcttctcctaagcatttgagctcattggggagttcagtgggccctctctgcgctgctttcagacacccaggttaaaagatccccaaagcattctcgtcctgtgtttaaattaaatctcctcttctttcttcatttgcattgcttcaatatagtccatttaattacttggcaccgcacctaggtcctagtttcatataaatgaggctatttcccaagtgtagcccgaggtcatgcatgctggatcttccaaggggggcgtggattattcctgggtttgggagattacatggagagtactttaagaggcttaattttctccttgaagggctctctactggactcaacacctgtcactcctaggctctccctgatggagttaaaggagcttgccctgtgggtaaaacatcagccaagggcagcctgaggcacagccacaaagcagttaggtttggtacactcaagaagacaggacgtttagtacacccaggaagacagggcagatgtctgtgtgggaaaactcagtgactcgagggaagtttacttttattgtcagtatttattttattttaaagaaaggtggttggaatggctgtaggtgggtgtctccctttgatagggaaagaactgaggctcagaggggtgtgacgcttgacaaagctggcaccagaaccctgcttcctccttttcttgggatgtgctgttggaacctgtctgtaattcagggttgcggttcttagccctgggtacgcttcagaatctctagggaag

SEQ ID NO: 79853 - DNA, 1014 bp, Homo sapiens
gacaggcaccctgcagggcagatgcctgctggccatgtacacttgacagacccaactcctttctgagacacaacacccatctcaactgactgtgtcgcagtttgctcctcactcctgcaccgcttctggtttctaagaccctgtagggctccatttaaaatgcatacagaaagggctttttattttctttggggtaatttaattttctggcattttcccaatgtgttttgtcctacttaggtgagaatgaaagctgcatttagtgtgaggaagtcacctctctgagggcttttatgagtcctcttgattagggtccctaggtgaggctgagactggctctggggtggggtttgggtttaaccagctcttggagaagctggtggggaaccagaagctggcctgagtgctgctctgacagaaggagtagaagggtacaagctggctgcgcagggatggattttaacagtaataaaggatggtaaattgttggctggtttttgctggtgaacctgtcacatgtttgagtgccccgatcttgtgacagtagctataggctggagacagcccaatggagcctgcagcaatgccttgtcgggctgagctggctctttgatgaacctcagaagttgtttagatggagctttatgaatgtgcctggtgaagggcctagagtaagccctggggaatccgagaagcatcaggtggccgtatgcctaaccatagggacaggagaagggcatttttctcttgaattggaagctgacggattgtattagttttctagagctgctgtaacaaagtaccacatactgggtggctgggatcatagaaatttactgtgtcagttctggaagctagaagtctaagagcaaggatttattccttctgaggactgtgagggggagcctgttccatgcctctctgtgtttcttgtagaagggcatcttctccccgtctcttcattgttgtccctctgatgcagggcagatgagccccaaagtggggcttagtcca

SEQ ID NO: 79854 - DNA, 1029 bp, Homo sapiens
atgcacacagtaaaggtttccaactagaagcttattttgtttgtttgtctttgtggatgcacagacatttccttctttacttggttcctgtggtttgcgtttagtgtagacgtaatgtttgtccctctagaatttattttaagaataacagtaggagcaggattgtaaacttggttcaaggaagaaagcacgtgaagccacgtgccttgatcgcccggcctattaaagccaatttcactccttgcccggtgtgtctggagtgggttgattaagttttgctttccatattctcaggtgaatctctttagattctttcccacaactgaatgtggtaaatgcttttgagaagaggaaaagctctttttatgagagttacctgtgcttatttctctaaagagatggcatgtgaaacctggcaggtacctctgggaaaagtatactgatgcatgtgccaggtgtcatacgtcgtgtgttaaagtgtgaattctgagagtgccactgtagtttccagtaggtaatgttataatgtgtgcttattaataatatgaatttagtatgcattaattcttgatcctgactgatcttcaagaatcacctgggacggctttgaatatccagatttcagaatctcacccagactcactgactcagagcttctggagtgggacctggggccctattgaaagcttctctgggggagacagatatcatcagcctgacttccgtctggagaccggccctggagcagcatgccaattttgacaggtcaccaggccagagcttgtggctctgggtgggaaccggggttggcgggggttgggggggtagtggtgagccctaagcaatcactcaagcggggtgcagtgatcttgtgatggtactgtttcaggaaggaggaggagaagatgcctggtagcaaactgaggagaggcctgtgtggttggatggttctgcctgggatatctgagtttgctgttctgggaagccaggaggatgaactgattcatcggttggtgaaagcccctgaac

SEQ ID NO: 79855 - DNA, 1046 bp, Homo sapiens
tcgtgtcctttcagcctgtacgtgacttatccaagatcactggttaaggtttttacataaccgatataaatgcggagacttcctgagagacctggcccgaactgataagaaaaaaggttttgattttatgatgattccaatttagtgatattcctaaactagtttattctagttctcctttgagtcccctggaatgtatatataagtgtacagattttaaaaaggaaaaaattaggtctttgtggctgtgtttacatattctgaacacttattggacttctgttgtaagctagcatttattggtgtttcagaggtggaaaattccattacagttcaattgactttggagaacataccagtgtctagaaagttaaacaactgttttgtgtcttaagtggaaagcaaatttgtatgactttggaaatagtgtatctgtcttattgggccaatcatggttaaattgaagacatggaaactatcaaaaacaattacaactgttattttctgtccaaactcttcccggttagaggaatcttggcctcaattagaactttagcttctgttttgttcgctagatgtttttactctcaattacccttaatctggattatttgcgaggtagcaatttttgttaggaggaggtagcacttgtttgagttaatgatttgcaccacatttttggggatggtgactttaatactttaattctgcaggagttcagatgtatagtggacagatctcatctctgtttgagacttagtcaaacgaaccaataaatatttattgagcatttactggtaccctgcattgtgctcaaaccccatgtcgatcatgagtaaagtataagtcatggcccggtatgtcagattgaacagtaagatggttagagggaacaatccacaaggtaatgtagaagtgtgagtaattcaggataaattgtttgggacagttactgagtgatactcactttagccattggagagatcaatttggtctagaagtctcaaaggcttcctggaggaggcgagaaagatgataaacaggaa

SEQ ID NO: 79856 - DNA, 1436 bp, Homo sapiens
tttgaatctgagatgagagcagcacagcagtagggataaacaactaattaaggccgaatgttctctacatatttgtggaatataatttgactgtgcactgatgacatgttaaacacaaaattagatacttacataattaggcaatttaaacatatgtcatatcccgaagtcaccggaacaggtaacggtaaatgtgaccatactgcttgtttggtttctcagggtttgtgcctggaaggatcacatgtagcctgagactctggaattttgaaaccaaacattgacaagtggcttgtttgatttggtagtttaagtttggatgctgaaagaatctttatagctcagcaaacatggacttgtgcagctttctttagctttctccatttggaaaaacattcagaaagaagaaagggaaaatggcatcagtcgttcctcaaatatataaataaaataaaggaaatttctaaaaatggaagaccagaaacccatgtatatttaattctatgcctctgtgcagcttggtgtaaatattttgtggatttcatctctattggaacaaaatatcagggatacaaatgtagagtgggtgagctccaggccttgggccccgggcatggtcccaggcccatctcttgctctgggttaatgggacttctggaacgctccttggaaaggacgtgttgctcttttagctcctgaatgcagacaacaaattcacttgtgactcagaatcatagcaggcctcgtcctggtgtaatagcagttgggctgtattccttcagtgtctcagtgtgtgtatgtttaattaaatttttttactttttattagtgtatctttattagattttttatcgaattttttattaggtcctctggaaaagaaacactctgggaaagtaatcctctaattgaagacaaaatgaccattttagtctgtttcatgatgcaaaactaaatacctgaggctgggcaattttcaaagaacagacatttatttgtctcagagttcgggaggctgagaggtccaaaatcaaagtgctggcttctggtgagggccttcttgctgtgtcctcacatggtagaagggcaaaagagcaaatccactcctgcaagtgcttttatagtggcattaatccactcatgaggttggagctctcttgacctaaacacctctcaacactgttgcattggggattgtttctaacatatgaattttggatcgtacacagggtaccatattgagatgatgtatgtgaaggcactttgaaaagaaccggaggcatgctaatgtgtgttatgtgatttgatttaatttaatttttaaatgttttgaggtttgggttcttagaggtgaagaaactgcaggaggtgttttatggagcttttactgtgttcttggcaatatactaggagttgttttgctccttcgagtacat

SEQ ID NO: 79857 - DNA, 1147 bp, Homo sapiens
cttggtttaggcacgtttgtatttactcattttacagatgttcatgaagaacccgccatgtgctggacactgctgtctatcccaggttcgttttataccttggctaacctgtctcctcgatctcgtggtcttcctgtctttcaagtctcagtttgggcctctcacgaacttgattctttctgcctctcagagggagaatgtaacttaatgttagcatttaattaatgctgagttgaaacattgatttatggtatgacttacctctttaaactccttgcatttaagattgagatagagaccaaattgtccctaattcttacatatcttccccctctcctttcttaagtatatggtacaggtttcattcattgggagaacagcactgtgaacttggcaagagcacggtcctggctgcagatcggtaaatacaaccaaatggcagagcattttttctgtaatagactcctaacctaacgggtggggtggtgtttgtgccaaacgtcagggaggacggtgctgactgtcctcactgtcctcctctgctttggtgaatgtttccatggcaacctctcttgctgttctcttatacccctatccctgtcttgcccttggctgtggcctcctggatccccgcagcaggaattattgaccgtcctacttttacttaggattgatacctcccttctaaagtagagctgtcatggaaagcagcatgtgataccagtgtacatctcttatcccttcaaaagtttagctccttgaggcagtttcaaccattttttatatcctccctgtgtggtgctcagcaaatactgaaagcacgaatgactgtgacagcaaatactgctctgaaggaagcagtctataaaacaggctatttctatcctggaaaacggcctgtggaaacaaagccaggttctggttatagtcacattggtatataatacatagctggttcatcaggtgctttatccatctcctgctcacttcacattcatgctctgggacagcgtttcctgatgaagctcatttcctagtgaaaatccatcgaactaatgatgggtcagatgtgggtaagtgtaacgtggttccagtacaagcagagatggattggtcatgaagattagctttagggcccctcacatgg

SEQ ID NO: 79858 - DNA, 1518 bp, Homo sapiens
cactgtcccacctcctgtcttctgactttggtcctcctacctcccctcttttcaggacctttgtgattacacgaggtgcacctggataatccagactaatctccccatctcaagatcctcctcaatcatgtttgcaaagttccttttgccatgtaagataccattcacaggttctgaggattggggtgtgaatattgttggggggccattgttcagactactgtagttataattttaatattaaatttgttatattctttggcaatccagcttaataaatgccttctgttatctcttctgatagcagtgtttggtttttgtgcccttcctgcttccttaactggttctaatataaaactttaatttgttttatcaccattaacaatttctgttggacactgacattaattggcaaaagttctgcatctttgttataatactaacacttgggcaataggaacgtattttgggctatgaatgagctttttattaaagctgtaaaggaagatttcttttcctcttcatcaatttgtattcccagctacctcaaaggaggcccaatcaacgtctattaaaattcctgaacttcaaactttagattaaaggagcattggaaagagattagatgagagtagggtatggacattcctccctcattttccctgatttcacctgctgattagagaatctgagattcagtctgtagggtgtgtataaaatgggagtctgagccagatgcagtggttcatgcttataatcccagcactttgggaggcagaggacagaggattgcttgagcccatgaatttgagatcaaccttggtaacggcgaaaccctatctctacagaaaacaaaaaattagccaggcatggtgatatgtggctgtagtcctagctacttgggacgttgaggtgggaggatcccttgagcccatggcagtgagccatgattgtgccactctgctcctgcctgggtgacagagcaagaccctgtctcaaaacaaataaaggggagaatctgttttctagcagttcattgatgttagcagtttaccatccagtcaagaacctttattgagcacctaccgatgtgagccttggagggattttaatagctaatggtggggtggagccgtttgaacctataaagaagtctgagaagccagagagggagaaggcaggccagggaaatattgaggaggagggtgaggctagtaattctggatgctgcttagagggcaggacgaggagatctgagaaatgggccttggtcttcaatgatgtgaggtcactggtctccatggaggtgacaaatcccatgtggaccatatcttcagatgacttcattctctggatgcagtggtttgaatcttatgtaagaagtaagttccatgaagcggcataggcctttgtcttggagcttttgtgaattcccaaatttgtgaatactcccatagcatataacttaacctataaaatggaataatgtagactttgaagattttgaattggtccata

SEQ ID NO: 79859 - DNA, 1373 bp, Homo sapiens
gtgactcacatgcataatacactggtgcacacacacacccttaagtagcatttgtttgaatataatcaggccttacatagtgtataagtaaacataaatgtagctgtttgagaagtaaaatgctgaaactattaatgtgatgttccaataaaaagtcagtcaagcgtcttattcagctatacaaattacagatgtcagtattagatttttttttttttgagggtgggtgttgggggagacagggtcttgctctgtcaccgaggatggagtgcaatggcctgatcacagttcactgcaccctcgacttcctgggctcaaagaatcctttcacctcagcctcccaagtatctggaactacaggcacatgccaccactcacagctaatttttaaatttctagtagagatgagggctcactgtgttgcctaggctgatcttgaactcctgggctcaagggatcctcccaaagtgctgggattacaggcatgagccatcgcctactggccctttcttgatattcttgatactgagctctgtagtcttttttttttgtataaatttatttttatttttatttttttgagacagagtctcactgtcgcccgggctggagtgcagtggctcgatctccactcactgcaagctccgcctcccgggttcacgtcattctcctggctcagcctctagagtagctgagactacaggcgcccgccaccacgccccgctaattttttggtagagacagggtttcaccgtgttagccaggatggtctggatctcctgacctcgtcatccgcccgtctccccaaagtgctgggatcacaggtgcgagccaccgcgcccggcttaagctctgtagtcttaaactcctaataagcatctggaatcttctgagcgcttaactcccattttagcagagcttgggtcttctttttgtattttaattccttgtaattggtatgcctctgtcctactgcctgtggtattcagatcactagactaccttagattcctttacctgctggaaaaccagctggagtctagaagagtgcttacttaaatcacagaaggaacattagctagtgagtcagacgacttgggttctagtcatggttctactgttgacttttttgtgactttggatgatccgttttacatctctggacttcagttttcttatataaaaaaatgaatggaactttacctgatcgctgtgattttaaacatttttttgtattctaagacacatctgtgatttttaccgttgggtctaatactttcaaatcaaacaatgtattcagtatctctacaagggctggactgggggctgtagggtattcaaagacatgtaagttgtgcttctagctcaaatga

SEQ ID NO: 79860 - DNA, 1025 bp, Homo sapiens
agtctttctcctggaagtgctccttggacagagttaactttacttttttttttttttttttgagatggagtctcgctctgtcgcccaggctggagtgcaatggcgcgatcttgctcactgcaagctccgcctcctgggttcacgccattctcctgcctcagcctcctgagtagctgggactgtgggcacccgccaccacgcccggctaattttttgtatttttagtagagacagggtttcactgagttagccaggatggtctcgatctcctgaccccgtgatctgcccgccttggcctcccaaagtgctaggattagcccggcccagagttaacttttctccagagttccatatccccagaggctatgaagggtgctcggccccgccccactcactcttgtgcatttctggttttgttcctgctatgtcccattacaagccaattcgtaggcttgctcagtctgacaggctacaaatgaggtgctcgtgacaccagaatagaacttggctattcctcactgtgagtgggccaggactgagcttccaaaggctggccaagggctggctgccactgatgcagaatcctcccaggaggagcccaggaatctgtatttccaacaggccccaacgccttggatttaggagacgaacttggagcagaagcagcatggctctgactgggcccagggagcctgcatagtgcctccttacattagatttcactggatcctctcagttgtcctggggaaggcttgggtgatctatgtgctatccgctgcagtccacagcactgaggagtgacaggattcccagtcagggcctaattccgtatagctgctcttgaacaagtacatcccaatgctttacagagttaggtagcagttattgagtcactcatttgcaaatgtagttatagaaatgcatgatcatattagaaggatccagggaggaaagagttaggcttgtactgggcaggctgaatgagcttcacttctggattcggtttattctgttgtgtgtttgct

SEQ ID NO: 79861 - DNA, 1071 bp, Homo sapiens
gtagatacctattccgtgaagttagagatgaattagacacaagagagagaaagacctggctaaactggaaatgagaaggacgtcgacagtttaaaaacacattatggtaaaaataaacataacacgaaatttactactttaaccatttgtaagtgtatagttgagtggcatgaagtacattcacattgctgggcagcatcaccaccatccatctccagaactctttcatcttgtaaaactgaaactgcccattactgcttatcctccttccctccagcccttggcaaccaccagtctactttgtctttgtgatttttgactactctaggtacctcaatcagtggaatcataccgcatttgttttctaagttcacatttttctgtgtcgatactttaagtccaataagttaagaggagaagggacttaacttgcctctcctttggagacagtcctcctgctcccttctgcctgtccttgttgcccagagtggcggggccagtgtactgctttacctaatcctctgtgtagaatggactggcagctgggggctctcgaagtttgcttccagctgttcttgggatttagtgttttccctggaatgaagatgaagcagggttgccagataaaatgcaggctgcccaggtgaattaaatctcagataaacagtctatcatttatagtataagtatcttccaaagactgcatgggaaatacttatactgcagaattatctgtggtttacctgaaattcaagtttaactagatttgctgcatttttgctgctaaatttgggtgatccagtggtgaacacacaataaagcagctcattggtaaaagggcatgcggttggctagaaagattttgggagatgggcagatttgatggtgcagagagagaggccatttggcattgtcaacctattttttttttttttttggtagaatattaacttggatcctaaaagtaggattggaaagtagctgcatagactcctgtcatttgttcttcagagaaacaagcagctagtactggctaatgagaatatgatctgcacatggcaggtgccaaaa

SEQ ID NO: 79862 - DNA, 1086 bp, Homo sapiens
tgtgttttctgtgtggctgtttttcacttaccttctcccctttgggtctaggttcctgtggctggtttgctttctcctcagtgttttggaggacataaaatgatagttctcagggtttgcaaacagtgtgagcccttcctgcagctgccggtgggtaggtggataaaatcagttttgctgctattgtccacgggccaggcccacccccaggtgccagtggctgacccctggccacctgtgcgggagtgtgagtggctgcctgctgcaagggcccctgtggctcagaggagacgggcacacgctatgctcccttcagagcagtggtagacatgctttattttggggttttgaagccctagcatttagtggctcattttggcctttttcttcccctaagggattctgtgatgtttaatgactcaactctgattgtactccggatgtttcttttccactgatgtcagtttatagagcagtcctccagcaaatgtttgtgtgggcaggaggcagaaagggaaggaagaggtgagggggcacttcgggaccccaagaataggcttcaactgctgccccacacaccagggaggccaggccctgacattttaatgcccagtgcttttgcttccagacccattggaggggtctggttggggcttggatgaatgggacctgagagccgtctcctgcagggctgctggttctctgtgagaactttgggatgccaggtggggcaccgtcatggggtatgggattatttgtaggtctggtcattaggggtgggatgtctggcagatgccttagagcaagtgtatcaagaagtggggtacagcacaggaccctgtgccccatccttccgtgagtccccttctggcttgtctccataggacttcagcttaacacagggagtgagggagagggcaagagcatgggcaagagggagggtttagttttgagcagatagatccagctcctagtttgccttagaccctggaacactggcttctttcattcggccctttagaggagtggcccagagtagcctagcagggactgaactctttcggatggcttccagagcattgttcc

SEQ ID NO: 79863 - DNA, 1048 bp, Homo sapiens
tcttctgaaaggcccgtgggctgtccacttgaggaaactggctggacacattgttagggccatctgttttggaaaccagcactactcttgggttcctggtttttaaccagtgattcatcttccctggaccctcagggtccagattgccaggctgagagtgtgccaggcatgttagcatcttggggatggagggaagtctggttagccagaggggacccctgtttttaggagacaagtgaggtagtgctataggctgaataatgagagaccagagctggaggaaatggcctggcgctgtgggtgtggctcttgccagctgggctctgggcttcccttccggaaccagaaccagtgtggtgtgaggctctggtgggaatgagacccacatgcaggctggacagcatcctctggccatttctctttccctcgttcattgccttgtgtctcatctttaatgaaaatgcccttgttaggaaattgtctggttctggggaaaatctctcctgaccgcacagctgccacccccatagggaggaggatgtggaaggagacactaaggacagcgccaaactctctagagctccctctttgctgagcagctggctgatggccgtggccacgggggtacttattccccgtcagagtaggggtgcctcttgcctttcccccaacccccctgcctctggcagcccttttctgaacttctttggatgtttttctagtgtatattttcaccctctaattttattagtgaggaaagaagataaaaggctcttgtgtctttcatgaagctcttgaaactgtccctcttacagagcaaggctacagccacccactgacttcccactttctgaccgtccgcccacctctgtgttcccttctggatctcttcctcccttcaaaagtcaaactgcagttctgtgttttggatatgagtggtgagaaccgttgttgttaattgacaggtctttaattcctgattgatttctctatttcacttagcttgtaaatctgaaatgatgtagaaagcataaaagtttgattctag

SEQ ID NO: 79864 - DNA, 1948 bp, Homo sapiens
agaaacagagttttattagagtggtaatttacaggtaaaatgtaagctttatagacttgattctgcaattctattcctggccttgctgttcctcgctgctgatttagggcaaggcctatcttctgagtcttggcttttctcatctgtgaaaagaggggcttaggcctgagtatttccaaggacccttggcagccatatgactggactccacggtgggatatttgcagagaggcttctctggagctgctgcttgtgggctggcaccaaaactggaggcagagggtgccagctgtgttgctgcacagagcctcaggagcatgaaccctgtgtggcatttttccctcctcctgctttgtcacctgaaccccagcagtgttgttcagtgccgggaggatgtcgctcacccgctgacacggctacctgcactgacacatgtcatttgtgtcttctctgccagtgcgctgctgcagggtgacatctggactggcctccttgtccctcggatgctcggctgcccagaagtttctggatcaacttgttgaagaccatgagtaatcttcatttctacttcgcaagcagctctagacctgtggcatctccagccaggtctggctgatggactcctgccctctgtggccagcctctctcacacccaactccaagagcctggaagatggcagcagggactccgtacagggcccttctgttgcccccagcagtcataatggttttggggccttctgaatctaccttcttggagctactttgttccatcaccagagccaaacctacgagtcctgattctcttctttggcagttaggggagttttgaccactttcctctctttcactttgctccagccacaatggcctgcctttactggccttcgagaaagcacccgctttatggtggcagatgcagatgccatttcctctgtccaacatcctcttgcctggcatgtaccttctcatccatcatgtctcatcctaatgccaccccctttagagatgcttatctgactaccttgtttcaatgtcttcctccatccccaggtatgcatcctctttctgtctctgatccttccgtgtgtctgtctttgcacttaaaacaggttagatctctttagtcgttagtagactgcctattcatccattcattcaacaaatatttcttgagtatttactatgtaccagcagctgagataggcacagtctatgctgtctagaaacttccaatccatgaagaaagacgagatcaagtaaaagcctaagtaaactgtcatgctatttgggcagagtgctttgttctaattactctaaagcatcctgggcatcttgttaaaacacagatcctaactcagtaggtctgggtgggcctgagagtctgcatttctaacaagatacaggtgatgctgctgccttctagaccacacttggagaagtaaggctgtaagctttttgatgaaaataagacttgtcctggagtgtgactcttgctgaactgcctgggtggatgtgggtaaagttactggagaccctcagggttttgtctggccttggagtctcttctagctgcaggagactgagtggtctgagatgtgagcctgattgaacagtaggggaacctgttaccatcacctgcatctatgtgcttgtcctccttaaggttatcataggttgtaggtttgtccattgaaccctcccttaaatgttgtgcttttcacattcacttggtggaatcctatgggctctctctgtagggtgtgttctgtataagtcagcatttctgaaaatactgcggatgtttggtttttaagagcagactgtatctgctgggcccatggggcacttgcagtgagatgttgagaatggagaccatactggaagctggggactggggcagaaaccttcgagcaggtagactgagggcaggtcagatgcagggcac

SEQ ID NO: 79865 - DNA, 1032 bp, Homo sapiens
gtgtttccttgtcttctgtggacttcaggagtgaagacctctctggggtcttcagttatttgagtaaaaggggagagcaggtgggtggaaggtgttggatgagtgtcttaagaagtgtctgctccttcctataacagattttgtttatatatcttatttgtttattgttgttattttgagacagagtctcactctgtcgcccaggctggagtgcagcggcgcgatctcagctcactgcgacctctgcctcctgggttcaagcgattctccagcctcaacttcccgagtagctgggagtataggtgcccgccaccatgcctggctaatttttgtatttttattagagacagagtttcaccatgttagccatggttggccaggctgatctcaaactcctggcctcaagtgataacagccacctcggcctcccaaagtgctgggattacaggcgtgagccacggtgcccggcctatatttctttaaaatgtcttcttattttacaaagttagaaaagtaatttacaacctgttgatatatttaaaaataagacaaagaagtaaacatttataaaaagggaaacagctttttccatagtagtcttcatcaccctggtaagctgccagtgcttccagtcttctggtcctgcgttgcatgccctacgttaccacacttgggactgtcttccctcattgtgccgggatgtactttttttctttttttgaagaagtcacaatgtaatataaattttagatggccagagacacaagccctttccctttctgatactgtgctaaagtgttcagacctttcctgcattgctttctttgcttcctggctctgcctcaaggtgggattctgtcaatctcccctcattcgaaatgtccccaccccagagctagcactattgacagggcagttgggatgaggggcacagaagaattttacctgcagcctgtggctgagtacccatgcttaaccccattccaacgaactagtccattttttcattttattaccttgtctgaaattatg

SEQ ID NO: 79866 - DNA, 1012 bp, Homo sapiens
actccaatgttggtaggaagcacatttcttcacggcagagtcacagcccttctctgtcattctgcaggcatctctggcagatcttgcatttaacaggaatggacaatgacaggattataaaaggctgataagattccctgcagggtgagctctgctgacctggctacccaccacaggctgcttccttctgtgttgtagtcagcaccctgcctggcccattcctgtaccaaggtgcttagaacagacctctttcgggccagaaccatttctagtgcaagttcttggtttaattgtgctgtttcctttaaaaatgatgttctctatctctggattgatctctcagacagccagcctctgttttaagtatgtgaaatgcaaatcatcaaaagcaattgctgctcttttttctgggtctaccttgggccgccttgacttccttcctctggaattgctctcctggtgggtatattctctccagctgttggcagacataagaagtaggagctccaagtaggctccactctaaaacgtaccatcttgataaaagctatgagtcttgggcatgggtcttattagttgggacagtagctatctcccccagatgttttgttcaatggaaacatttcaatgataaaaataccttcaaactcccttctgagagcagaggcaatcagttaagtagctcctgctgtgtagctggagcaagccaccacacccatggattacatttggcagcgtttctttggccagctgcatgcctcccagcagataaaagggcagtgcgtagagaagatgttagggaaagtggtggggtggaagtagggaggaggtgagccttgtgcagcagctgaattcccagggtgaagtttgggccttgctgcccccagtttactgtccagctgctgctgctgcttgggcctgcagtgctgcgggatgactgggatctggaaggcggctctggtgatttgtaggatcagaggaaggacaaaagctgggtcagggtgggtgtggc

SEQ ID NO: 79867 - DNA, 1116 bp, Homo sapiens
gtgatcgcagagaccaagtgacaaaaggcactgtgtcttctccttgttctctcacggattgcttcctctgaaagaagtccgctgccatattgtgaaggtgcttcagcagctgatggagagtcccacaaagtgggaaactgcatgttgcccattgtcaacagccatgtgagtaccccatgttggaatgggtcctcagccctggcaaaccttcagatgattgtagctcctgcccacattctgagtccaactcagtgaaagaaccacctagttatgccgctctcaaattcctgactcatgaaatctgtgagattgtgtttatgtgaaggcattgcattcgggggtaatttgttatgcagcacctacaataagtaacagaccttagatcttcagcagtgattttagcatattcgtagtgagactcagtagcactgagacataatccacagggattttactattataagcattgttttgaggcttttaaagtgatagctaacatcatgcgatagatatattaaccacttccctcccctggtgtttattttaaagggattgttaccacaattaaattgatttatggattcatttgtttatgaattttttaaaaattatttgttctggcagttgttaatgcttgaacttacttatgggggttatctctatgtgacttgggatacacgtttgtctctatcctcagaggaattagctgtggcagtagggccttcagcacatcccaaagacagttggttggaaacataaatatacttgggcatgtattcccagagattgtgcttgtgtctaaattggagtaaaaattacaggcagccttaggaaaatacatttggagacattccgtcttccccaaaaagatgttaattatttaataactccttatcttacaccttggtattagcaggagcttctcggtgttgtgtgtgttcttactttttaaagacacagctatatgtcacttgctgttctacctgtggaatttttttgcatgaggaagctgctttggccaggtatacatcactttttctacacaagtcctctgtgtttgatacagaaatgctaggtaaatgtgctagtgctagaaatgccagaaataatttccag

SEQ ID NO: 79868 - DNA, 1096 bp, Homo sapiens
cctgggcccctgagcctagagttccttcactgcacttgcaattgcactgtgcaatgccttctcagtctcctggctagaaaatggaactcctggaggacaggatgtttttcatcctattatttccagtcatttatctagtcattcatttctttatataatgaccctcctaggacctaagaatagagagatgaacgcgatacatgtggtaggaattgtaagttgctgcttctttttgtttttgttttgagtgatccactgatggttgagaaagcctaggatctttctccccagagagaatgccactagagagggggcagaacatgaccctgcctgttgaccccaactgtgacacttctgaaaccaatcttaggaaagcctctcatgggaatggcatttccaagattaggggtaaagtgggacctccctgttgaaaagttgtcctgccctctgtcagctagacatgccataagcaagggaaagaatgacttttaatgacaggggtagaaattgggagcaagaggctgaacacatggaacagaattttttgaagtgccttgttaaatggaaagtagatgtaggaaaatttgaaatgctggtatttcagatgggcccaggcctatcacctattattccacctggagagggtagacttatattactcctcctttttccagaagcagtttgtgtgtaaaagccctaaagggccacattccacttgatcccttttattaacgaaattgtactttgcagcaaggtggggtgtggccacagagctctttaaagatgggagcctggaggcgggaggttggctaattgcatgttgccttttggcttctttccagtctttaatcatggatgacctcttatctgtaagttctaggccaaaaaaaaaaaaacaaaaaccaaaaacaaaaaaaccttctgtttatcttctttgtgtgctttttatgaagctaaacagatgatgatcatgatctaagcactagctttggaaggcaattgtagtggatggaaagggtcagggtggattctacgccagatgtcagcctgcagaggctgtgattccaggcttcacttggttgaagtgaccagtctg

SEQ ID NO: 79869 - DNA, 1067 bp, Homo sapiens
tcagaacccactgtttaaaggatggagaagccctgctccaatatggcatgtggtatgatcagtgcctgattgttcccggaaatggaacattgaccttatgcattgatggctgtggtttaccaatacctatgctcctaagaactgggccaacatctgcatagatccaatttttaaaaattataatgtgaatcgtctctgttatggatcgcgaccaacttctaagttgctttgccttctattgtccattatacacacatcaatggcattcatttaaatatacttaatttgtaaaatgagctgtgttctgtaggcagataggagtatttgtgttctgcctttattgcatgtacacaggcagagcacaggcctctgctcctggtgatggtaagtagtctccagtcgtgcctccctcccctcagatggaggtaatttcttcctcctctggattatacctgtcccttacatgtgtgactgtgattgcacttgccctgtgtgttggaattttttgttgacatttctgacacccgtgggaatgaggccctttttattcatagctgcatcccctgtgtctaagagggcatacttaatacatagcagagattcaataaatgttcgctgagggagtggatgaatgagtggggctgatgattgagaactcccagtatatcctacatatggacttgtgttttctccattccttcctccccaaaatatctggggcagcatgtgagagtctcttcattttctattggaaattggagtacttgaatccagaagtttaaatctatgaaggtgaaatgcggttaggctaagtggatggacccttagttagatcctctctgggtgatttgtttccccagtggtactttcctctgctccttctggaactccagcagttgctccttgccctccaatggctgcaggatgcctgcttcctctgtgtgggaagaatcctatttcctaatccagcaggcatttttgttggtaattctgaaaatcgtttctcagggctctttcctaaagttgtggccacccagcagtgagttagccacaaatggctcagtgat

SEQ ID NO: 79870 - DNA, 1125 bp, Homo sapiens
cttcttagggaagtgattttctttctgtggtgtgaaaaggaaataacaatgtctgtcttgctctttaacctgtctcttcttggaaattcccaggcatcttggaagccatgtgtctgcccttggctgtgctctgtggacctcctgcagtatgcttgccccatttcctctcttggctctttgccagcttgtggcctttctagaaggatattgtcctgttgtgaattttcatcatctttattggtttcttctcattcctctccgttctgtgagcttgtcagagaacctggaagcctcacttagcttctgggagcaggtcctggagctgggctcacaccccttccccagttgtttttctctctcctgccagcctccctttgattcttagttttcagtgaactgtacagtatcaaagaccctggaatctcacgtagaaaaaagagtaccgggatttgggcgccacatctgcctgttttttcatctgtgcttttttgagccttttaaaaaaatcagtggcatcagttgcatgtaaggttcatgaaagaactgtgtaaaattgtaaattattttgcagagatttgctgttttccagcaactcctcccttcttgacacacaggtagtagctctagattttgttgttgttcttgttgaactctgataggtctctcaaataaaaggaaacagataccgtttttatagattagaagacaacattgttaagatgtcatctcaccaaattgatctataggtccattgcattctcattcagaatcccagaagggggtgtatgtgtttgttttaataaatcaacaagctgattctaaaatttacatggaaatgcaaagggctcagagtagccaagttagttttggaaaagaacatagttggagggcttacactacctgatttcaaggtatacgtcaaagctatagaaagcaagacagtgaggtattcgtgtaaaagcagccatattagatggatggaacagaatagagtccagaaatagacccacacatgtatgatcaatggattttcatcaaaggggccactgtaattcaatggagaatggatgggcttttcaacaagtgatgctgaaacagttgggtatccatatggaaaaaagtgaa

SEQ ID NO: 79871 - DNA, 1071 bp, Homo sapiens
cagaaggagaaaaagaaggatgagtttctaagataaatgtgctcagataattgctttttattaaaagatactgttctttttacttcttaggtgttgaaatgtctgtttttaatgagatcgtgcttcgaggttggtttctcaagacgaagttatcagtcagcacaatttgggaaaggtgggggtattctgctatggaataccaaagtctggtaactggtcatctcattgagacccccgtgtgatgcttgagttgcccacctcccgcaaccgagtccccatcaagtagggatgtttatacagtgagtcccttgccctaaggctggtccttctttgggcagctttgactgagtttggagaataattgctattctgtggaaatttcataatcataacccaggcaagtgcctgggaggcagagcacaggtgggtgggggtaaaatgcagagtgggctttggatatcaactctgtgatttctgtggccaaagcagaaatgcccatgagcttgagttagtgcagtgagttaattgcatggtaattaaatgctaacatgattgatcagaggaactgtgtaattgaagcatagtaaaatgtggcatgcttagtaagcaattgagttgtcttcccaaggatgtaggcagtactgggcagaagcacagatgtcttgaacaagctgtgcagtgcacagttttgcccttttgtcttctgaggaagatgtatgggactctaaggagtgaaatcccacattccgtacctgagaacgagattcataactgtatgtgagatattctttattttgtagtactttgcatactttttggtatatagaatatttacttgttatcattggtgaaatttcaaggtttttttttgtttatgggtttttgggcttttctgtatgtattctggaatcaccaagaggcttccatattgaattttctacagtagctctctgaataagccttaattgatatatttggtagagatgaatgaagataccatttaatcgtggtggtaaatttaaatatatgatgtttccttctggatgagtgactatttaagccctatagatg

SEQ ID NO: 79872 - DNA, 1182 bp, Homo sapiens
ttttaatgctaagatttttattatttctgtttctctgatttttttcatcttctatttaaatctgtgtggtagatggctatcttcagtcatactcccaatataattttaatccccccaaaagtatatttatcatatcagttagctcttgctattagctcagcactgtgttggtgagattgatccatgttgttgtttgcatgactggtttgttcatttttattgctgcatagtaatccattgtgtgaatatactataatttatccattttactgtcactggaaatttgcatagtttccagactttggctactccaaagagccagcaagttgtggtcttgttttctggcatacctgtgtgcaggaatttaaaactttctctttctccttttctttgaaatataactataacagatcctattatgtgttgggtttagtaaactttgtgatgagtgttctccctgaaggagagggcatttcttacttagatacaagaaattatccttaggcttatctgtgtagacatactaccagtgactaaaggatcactgaaaacatgcatacagtttctagtttttaatttgatcttcattttaagtgccttctgtgcatgttggggtttttggtgtttttcacacatctgattttttttcagacgtgtgtttttatatcagactccagtgaattcttttggtagtggacaggtcgtaaagtataaataaatccagcagaacatacttgccattcctcttgtaggcaccctctgcctgtcctttatgtgtgctgggcttgccccatagcagctgtggttgctggcatgtcccgctgtgcagtagctcgctgctgctgaaccccctatgcaacaagatcctgggtggggaagggcagctcaggtatgatgtggccaggactcgaagggagccaatcaagtgtgaatttcaaaactgaagacatttgattagtgtgactctactttgtggatcatccaatgcaaccatctctttttacaggtggagacctgggtttagagaggtcaagtgacttgtgcaagtagagaccatgtcttttgctgccgtttccgttgcagcttatatgaaattattatttatagttgagagggtaaggcagtatgaaaagaagacagtgtgctcacaatttattatagtttttggcaataagagcttct

SEQ ID NO: 79873 - DNA, 1033 bp, Homo sapiens
taactttgactttgacaaagattcactcacccactgggatgtgagagaatgttacagaggatttggaagctgctaatgaaatgagtggtctgccctgaatgtggcttacacacacacacacacacacacacacacacacacacactctctcactcacactcattcacttccctcttcccacccccgacaattctatggatcctagggctgggataagtcctcaaaggttatctatagtttagatacaactcttgcctgccttaaatatgcttaaatatgccaaatatttctcaggaccagaagtttatataaagtacatcatggcacagctgttcttacagagccccgaagccagcaacaaggggagataaattccagagagaatgagttaaactgggcaattaagttggggaagataaaatgtttagctgacatatgacttaagattctcagtgaggtatggacatggtggtgttctcctgcacttctctaaccataaagttctggaataaatactttgtacaaacctgccttcccttctgccccatactgctttctgattaagagaagggggtcagagggctttaattctatgctagtgaatagctgtatgtccttagacaagtccaggactattttattagcagctggcagcttcagagctgaacactatgctaactatgttatatgtgctttatataaggatatatatagagagaagaagttggctgaatcttggagggaaaagttcacaaatccattggcgtaagtgggagaatttatcccagtaattgatatatcaaatgggcagaaaaataaataatagagaataactagcttgatctagtggacacacatagaacacagctttcacaacttggaaagtacatatttttaaaacgtggtacatttatgaaaagtgacagtgtacacacctcaataaatgttaaagaggcagtgttgtgtgggccacttaagtcaaaaccaattaagttagaaattaaagacaaaaggcaactaaattgcacagtgc

SEQ ID NO: 79874 - DNA, 1055 bp, Homo sapiens
atcaataaacctaggactgtcattctgaaaaattgttacaatttctaagaacaaatggaatgctttaaaaaaatgtaggggtaagtatatcccatttgatctactttggagagagggtaagtgctttattacctgctgattaccataataaaacatctctgttcttcagagaaacataaaatgtaaaagatcttaaagtatagtagcttacttctggtaggggatttaggagattcagttgtgatttgcaaagggagaatacccatggagtctaaatttcagggccaaccacagcaaaaaccatagcttacctgccggcaaagatttgatgactttctctccctgctcttcccttctccacccttagccaaattagaagcagacattttagggagcttaagcaatgaaaatctgaggcagtgctgatagaattgaggcgtgctttcttggaagcattttcatttttatacaggtaagatgttgggagtgggagaaggttgtcctgttacagtaaatcatgtgtgtgccaagattgagtggtgggtggggttgaaaccttggctcgctgtgctgtgaatagtccttaaggtggtgatggtggcattctcaacaaatctgtcacctagtgggcccatgtccagaaaaggacagcatatatgattgaagtgatagtgcaccttcactgggaggggctgttccagagattagaggtctataggcagactaagacaagggcctgaaggaggatgtgattaaagtcagcatcactctgaaagggcatcagcagagggagtgcagtttgtctaccaaatacctgagcactggaattagtgggcatcttggaaactagaagaaggtagttccagtgcctggtggggccgggtgggtaacccgaggggctcattatctcaggtgaaccactcggacattgagcatctacctggcatgaagcactcattgggagagatttctaatgtttaaggagtgcttcttgctgtctatctggccatcatctacccttttgtttgcttcttttatttattaaacactaactg

SEQ ID NO: 79875 - DNA, 1426 bp, Homo sapiens
tattattattttaattgagacagggtttcactttaattgaggctggtttctaatacctgtacccaagcagtccttccacctcagcctcccaaagtgttgggattacaggtgtgagccaccgcccctggccactgaagtttaatagtgccactcagaggcctgccatgcatgccatgcatccatccatccatccatccatccatccatccatccatccagtgagttcctgctatgtgccaagaactctgctggccactagaggcgaaatctaggtatggcacatggtccctactcaagagctccagtctggttggggaatttgacaaatctacaattttgaatttatgtggtatatactgtatgtagtgtgctgtggaagtttagagaagagtggtttctctcaaccggaggtgtcagctgataacattgtttagtagaaatgatgtttaaaatgggcttagggaattggatagggcagggggcagatgtttaggcagagggaaacatgataaatgaatcaaggccacaatgatgtcatttccaggaagccacaggtgttgttttatagctaagtcttaaatagctgcgaggtggagtggaaatgcagattcccaagcctgccacctgagattctgatcaatcgattgggaatgtggtctgggcaacatactttaatctacactttctagctggttctgatgatggtgatccaaggagtaccagtctggggtaagaattcaggtatggggctgggagggttgagggatgaggcttcaaatgtaggctggggtaggggaagagcaggagtctggagagagtggtcagagtggttaaggaaggatggaggagagcttccaggtctgagtggtcagcaggatcttgtaggaagttaaaggcatcagccagcagagtatgtaatgtccaacagagcatacttacaacaggaaataatagtttaggtttatttttgcagagatgagctaaaacatatttacaggggggaaaatacctctcggaataatgacttggctctaaactcatgcagccgaaaattcaggttccaaacttcaagtgcaattcttagtctgcaagtcggcctcccagttggaaattatttatctttgttatattagctcagtgattttggaatgctcttgagtaactttggaggccactctacaaattgcttgattcattatttaaaaatatgatcgattcaagacagaataaatgttcagaatactgagtatttttcagtatttagaataatactgaatccacatgggtggtgcattaaagggggtgtgcagcatttatgcagtaaggatatttggggggtcacttaaattgggcctcttttcatagaattgttaagactttgcaggacattttaatttcttcccttagacaggtaaccacaagaatc

SEQ ID NO: 79876 - DNA, 1049 bp, Homo sapiens
agctacacaggaggctgaagcaggagagttgcttggacccggaaggcggagataacagtgagccgagatggcaccattgcactccagcctgggcaacaagagtgagactccatcttaaaaaaaaatacatatatatatacatttttttcatatatatatatatatatatatatatatatatatatatatatgaaatatacatatgaaggcctttttaagaatgacaccaaaatatgcaactataaaggactgagacatgtagctagtaacaatttttttaatctaaaatttttgaatggcaaaaatagagcagaaattttaaaaacaatgatacttttgtcaaaaaataaaataacaaactagcaaatgagtactggtactcatttgcttttattttgagtttattcttccataagtagggagagagagatgtagagttttctttcctaaatgctaaacaacaccatttgttaactagtctgtcatacccacccagatttgattgcacgtacttgggactgtttcatatgaatcctgtatctggatgtttattctgtttcgtagataacgtgtgtgtgttctcacacaggcgcctgttcctttactgtggctaggccattttgttgatttctacaattgattatagtgcttctctgcttcaaattgggtttccatggagcaagttcccagtgccttagagaaccaggagccacatgggaacagcaaaatcaagaagggaccacttcacagatgtgttagaggagctaaataggaaaaaaagaagacaagagcacctcatgtaaactaattttaaaaagaagcagagtgcaatgcctgagatttttgttttcgacattgagggaggtggatgtctgtatttggtttttgtttaaattcaaagccattaaagcattcctaccacaaggaagaagaaaatgtgttttgtctctctgccagcagtaacataattttggtcttcaaaataagtgtcttgggacctgaattccctgtgggtaaagaaaattcccagcccatgtgttgtggcagaa

SEQ ID NO: 79877 - DNA, 1121 bp, Homo sapiens
ggtaaggaattaatgtagaaacttctagtggtcttttttttaatttttattttaagttcagggtacatgggcaggtttgtttcgtaggtaaacgtgtcatgggagttcattgtacagattatttcatcacccaggtattaagtctagtgtccattagttatttttcctgatcctctccctcttcccaacctccatgccccagtaggccccagtgtgtgttgttctcctctcttccccattgtttccgtgtgttctcatcatttagctcacatttataagtgagaatatgtggtatttggttttctgttcctgtattagtttactgagaataatggcctccagccccatccatcttcctgcaaagaacatgatcttgttcttttttatggctgcatcgtatcccacggtgtatatgtaccacattttctttatctagtctgtcattgatatctccagtagtctttgaactgaaactggttggtggttgctggagccctccatggttgggaaacaattgttctagcatgagataaagtaaactttggttgtagattattgttttccagttttggttgtcctgggggggttgtgtgatcccaagtagtgtgtacgaagcatcctgggcagagacacagggttcttctgccggtcttagttgatgctcttactcggtagctgtatcatggcacacccagatgtatcagttctgttcctgaccagctgcagaacttgggacaggttagttaatctttgtttccttctcttctttggaaattatgtagattggtctaacctggtcatgcctctactttaaaattttgtggaataggaaaaaaaaagtcaggacctatttctattttttttttttggctgtatataaagaaagttgatgattaaagctggataggtgaatgagggttcactatatatttacatactgttctttgtattttgtgtgtggaatttttaataatcaaaggtttattttcacaaaataactaccatctactaatataattttgccaaagagaaaataatactaaaagaataggattattcctaaatttgtctttagattgtatgtatttagcattatgaaaatgctgtttatttcctatgtc

SEQ ID NO: 79878 - DNA, 1155 bp, Homo sapiens
gtgattcagtcctttggaattgtcccttagtgatttctggctttcatttgtcttaacattctgattttctgggaaacccaaatgaaatttgacagacttacctagttgttttctgttgtgtcaactctcggtttgctgcctaattggtatgcttcacatgggtttcctctacccaggaatgtttattctcttccctttttaggaaaaagctgtattgaacaacaacagaaacatttgttttaaatgtatagtaatatgagagattacctgaagtcctaacatgtctgaaagtatataaagtctgaataaatgctaggaggagcttttattttgacataaaccagaggaaggagaattgctttaagtgatgtggaccagtccaaagtctgaataaaagttaatgaatgaacaatgtaaccaatcaatcatgctcttgagtctttcacaaggctaagacattctggatgagatcttgtagggatgagcagttgagaatttgagacggccacgctttgcaggaataaacatgatgctttaaagagttacatgcattcatggatgtgtgtgcatgtgagaaaagggtgattgatagatggggtgggggaatgataaatgatttgtttggcattttatgtaatgacttgtgatatattctggatttgagattaaatgcaatattctgaccttatctctgtgttccctgaaagcttgtaagaaaaatattttaaaatctattttcaatgaaaaatattgtttttggctctcagggaatttttagttcccactgctatttagggagaattgttgaatctgtgaaattcaaaggaggatctttgcagctctttgtcattctgtaccagtcatttaagggctatgacgtcagtgaagagaagttgttccatgcttccttcattaaaaatgtaacctgttatgcacttttgtcttcctgccaccctccattagctgattctttggattatgcttcttgatgactgtaggcatcatttggtctcccacctgcaggctccctgagtgactgagagttcttcttagcactgtcaatcaagattcctggacctaggctgcgctcctcactctgctgtttgtgcttagtaaatgtttcagaacaacaataacaatttccaggctattttt

SEQ ID NO: 79879 - DNA, 1036 bp, Homo sapiens
gcagaccccaaccgttcatcaagagagggaaacatcagtgaagtttacaaagcctttttacctgatcctaaatatttcccagatatgttctatattcttcagtttatttatctctaagggatgaggagtgactcagtctctcctgcaggagaacttttggctctggtcacccaggtggtccggatgcttggttcatttgccttccctttggagaggttgttgccggcacagagggtgagctgtgtgaacgtgggagtgagcgcttgctgtccctgttggccactcttgtcagaagtttggattcagaggaggtggattcaataccctaaactaggaaggaaataaaaattgaccgtggaggatacaatgacttgggcgttgttctgttgtgtttacatgtttccaaaaacactgcagtgccgaggggtctctggtagatgacaaatgagcagaaagaaagttgagaggaaggaggggatattgctagagcgggtagagcagctttccaagaggaggtgggatttcccgctgagttgatgtgagtttttgctgcttgtagttgaaaagactgaaaacaacagtgggttatacaggacagaagtttagttttctgtcacctagaatgaagtcttgaagagggctgttcaggactgatgggagagctcacagaggttgtgcagcgacttgggctctttccaggatgagtaaaattttggtgcggtgcagtgaaaccttacttggcatgaactaaattcagcacattaggcaaaaattccttatagacaaaattgttcgtgaataccccttaggaaggtgccacattagaggccagtattctgtctcccagtgagtccagcaagtggacttttcctgcagtgttggagtagcctgctgctaagcagttggcccctgtgtttaaggaccatgttttcaacaatggactcactctcagcatcaagacaggatcccaagaggcactgacaagcccagggcactataaattcctatattccctcccacggtcatgtggtctcac

SEQ ID NO: 79880 - DNA, 1038 bp, Homo sapiens
tttctatagctgtgtcatctgccgtgtagtgtggagtgaagtgaatagcaccctcctcgcagtgtttgttgtaaggtgatgctcagcgcaggcttggcacagagcaagtgctccacggtgggccactgttgttgtgtggtccctatcaccacctccgccgctgccaccatcatcatcctcctcctcaccatcaccaccaccgctgcctgtagtcttccgccccttcctcatctccggatgagttttccatatggttgggccactcatgcctcttcacagcagtaattttctcgcccgtgatcctgggtcccttggatgttacttcctttttgagcttgtggggcttgctcctgcccttcaagcacccttggcttcctattagactttctctttcctctggggaaaagatctctcttcatgcttaataggcatcagagcagccttgggtcacagaagtcatggtagctttctatttgtcatcctgacaacaaggcctctctgaggcttgaaaggatgatgctagcccacccgcaccacctcccttcttaattagattactgattccatttccctgatggttttaagctaaaagagctttattctgttgcctttggattgttctttcttgactccatctctcctttgatttgcagcaatacctgaagtaaagtggatgacagtagttgggagcatattggctgctattctttagcaaagcctccagaatgggtgtatcataatggagtttagagaaaatataaggaataataaacgaaacgtccaaaaggatccctcctttcaaactgtcatgtaccaagtgagtttctgtagaaggggcccttttggtttttagctgtgattttgtcttcattccttagggtttatttgacccctgtgtggaaaaggcccgatttccccacttccccgctcttttttgtgtgtgtgtgcacaagtccatgtatgtgtatgtatgcacatacacctctctttctgagttcaccatccacatgccatggggagtgcacccacacattagtg

SEQ ID NO: 79881 - DNA, 1115 bp, Homo sapiens
tgtcagccagtcagtacataaccttgttttatgtgtgtttctatttaaagataccttacttaatatatattgttgattcattaacattgaattcatggccaccagcctgaactaagcttatttaacacatgcattttctctgtaagatacatcacagcctccttctgcttaggaacgctagacagcacctcggcactatgtttaggggccattttaaacagcacaatcaacaaaaggcagaagatggaaaaagcttggcactaaataaactgtgaaacggagacgtttaggagactgaaacaagaaagcagagagttgctgggtgacctcagctgggaacatgcaagcctggcagctcaaatgttttgctgttctgcactcgtccatgagggactgcaaacgtgccaggagtattgattttggggtcacaagtaaattttaacatgtggatttgcaaatacaggctctacaaataatgaggatcacctgtgtatctctgtatgtgcacactgctgcagggcacacgcacgggtgtgtctaacttgaaacccgtgattcacaccaatacttcagattccagcttaacacaatgggcttccttctaatttttcccttttctgggccaccatggcaccccctcctgcatcccttcctggcacctgcctgatattttcccacctgatggctctaagcctgagtttctcagtaagggaagagccgtgggcaagaagcaagagggatgtgattatgtcttatgatgacatttatgttctagtgtgctaacttaagatagagcgatattaacatatttataaagcctctttatatcctcataattgaaaataatgcaagtgtcatcaaaattaagaaaaaaatgtttaagctggtgagccccaatgattgaaaaaaactggctttatgctactggtttatggcagtaccatgccatttgggaaacagaagcacctgctgttttctctaggctcaggtatggatgctgggtgttgtaagagtgtcaggagtatgtccctggctgggagatccactcttgttgaagtagcctgtttcccttgatagacagtagtccccagagggcaagggactgtgtctgattt

SEQ ID NO: 79882 - DNA, 1067 bp, Homo sapiens
caaattcccattgatgaggcccctttccaattcagggagttctttagtcctgccatttctttagggattcttaccttttatccctgtctctctttgactggtctgtgcagttcttctgttatttttccagctttatcttaagttttatatttatttttggaattgtttttcaagaataagtccaggttgtggagatacaacaaacgtgacagtatcttaaaacaatcctttaaaacactgtcctcaactgtgctgtagagaattcatcgtttcatgtcatctctcatggggacatgtttatttcttccttatgcttttgatgaagtaatatgtacgtgtccaggctgcaatttgatttgtttttttgctgtttgaaaatacaaatcttattcataactgactgatgaaattggtaagactttttatctggctttattttattaactaaaggaaaatgatacttcatcagcatacttcaatttagttaatattctttttgtaattcgggttcgatctggtaggcagttctaaaaacctgggcttgcagaaagcagcacgtggctgctcaccatgcacatccacatggctttctgtagtaaagtctagtccaatccttcttcttctctctgtcatttcgactgtttgcaatatattttaaaatttgtattaaacatttatcttttctctgcctcttttctgtaaatctagtttattgtctatgctagatggtttttctcccattcattcctttgtcaattctgtctcttggtctggtcccttgcagcttgagccctggatggcaggatggttctgtggggtggattgaactataaaacctggattgattattggccttctcagttgttaatgcatattcatttaactaacgcataaatcaaacagctgatacttgtacattcagatttcattatttcttgttgttttgttatcttctgggttgttttgtaaaaatactgatgattcctttaacaaaaggaaaaaattttagcttaagaaaataatctgaaataaaaaacagaagaggtttcaaaaaaaaatccttattg

SEQ ID NO: 79883 - DNA, 1927 bp, Homo sapiens
ttattatctcccattttgtagaggaggagactgaggcagatggcagttaagtgaccagctcaagtcacgcagctggtaaggcaggtggggtcagggcacttcgtggtcctcccttacaggcagagatccaagggaaggctgctcatcttgaccaatgacaggcatttattttgaagagaaggaggcctctgctggagctgaacttgtttgtccctgggtgaaccagggtgatcctgagcagcctgcactgctgccatcatcctgggctctttacagctccctgggactgaaaagtatattttaacaggacaatgtctgggtttcaccactggtttcgtcagctccgcttccacaaaggaaaccacagaagggttttgtgttggatcaagcaaccttcacacatacaatgagggcagaaatggtcagagtgagacaagattatgaaaagaaacacaatgcaggttttatgaatttatacccagtctttgagtaaagaaaaaacaaaaacaaccttaagatccaataagatagtagtcattcaaattcgggtaaacgaaaaatgaacaataagataaaatagaaaaagggattagactataacaacactgcaagaaattgtacacagatttggctctgaagtttcacgcagtcaaactagaagaggaaacctgatcagcaatcctaacctcagagtctgcaccatgaaaagcccggagaggggttcgggtgcagaagagtagacgccaggaccagttgcaggctttgctgccctgaaaacatcacagtggacaaggagcataaatctttatcgaggtgtgttgtctgagctgcctcattttcacagggcttcagtggatgtaaatttctcacaagtgtggaaaatacacactcatctttagtctacatttctaggttgctatatgttctaatcctactttctttttgttgttgtttttgtttgtttgtttgttttctgttttttttttttttgagacagagtcttgctctgtcacccaggctggggtgcagtggcacaatctctgctcattgcgggttcaatgagcctcccgggttcaagcgattctcctgcctcagcctcctgagtagctgggattacaggtgcccaccaccacgcccagctaatttttatatttttagtagagaaggggtttcgccatgttggccaggctggtcttgaactcctgacctcaggtgatctgcccaactcggcctcccaaagtgctgggattacaggcgtgagccactgcacctggccttaatcctactttctttttgctatagggtaagtcatagtacttgattccaacaagtgtcctttttgccaggtacttattttgttgtgagtggtgctagaagcagctcattgctgtggttcttgtggggtggtgaataaatcccatatgactgggtttccctatgtcagtgatcatcttgggtgaaaataattaaaatatcttgtctttaaatataatgttgtagattacaaagtattggccttttagagacattcctgggaagtcagttgttggccttatctcaagcttggaaaaactaaatcttaataaaatggggagccagaagtgagaaggcaaccctggggccttttagtcttacactcgtgtgcagtgctctgtaagaatgattagtttggttccaggatttttttttttttttttttttttttttttttttttggtatattgtgttcctgtgatgcttttttgcaatagttgtttttgggtgataaaaaaaaagttgaggccacaagtctcatagtgaatgtagtatttcttgtctgttgaacacctaccctgaactaccctccattccatgccctgccccctcttgagatgtaaggatgaggagactgaggatccaacgggtatagttggccaagcattgagta

SEQ ID NO: 79884 - DNA, 1123 bp, Homo sapiens
tgctgagtcagcaggctcagggcctggaagtcagtgatggcttcatcaccactttgccttctgtttttcttcccatttatatttcagcttctgactatggactctttctttcggatgaagacccgaggaaagggatttggctggaagcgggcagaacactggattactacatgttgcggaatggggtatgctgccaatcccagtgctgtttcttcatccctttgtccctgggccttcttccatagacgccaacacggttacgctattttgattcaagggcatcttattaatagttcgatgcattgtactttgtaagggctgttcaggtggtgatagaaaatgtcagatatccaaattcttgagattccatagaaggattgaagcagttcgaggttagtattttaagtagtttctacttgtcgttgttggatttggtaattgtgagataagatacagcatcttactgtaagtatggaagagatattcctatgcctggagatgggaagtaagaacaaatgagagggaaaaacgaaatgtaaccctaatggtagttagagactgaatattagtgttttgtttctgaaaaagaaacttcaatttgagatgtgagtttaataatgatcagtagtagtaacagcaacaacaaaaatggttgtgttatggaaatagggagaagtaatgagtaaaaacatattaaacattttgttcagcttaacctccaagataccgggttttggtatgtagggtgaagtgcacccatcagattgatgggtattccataaagtaagagtgaaatatgtgatgccaattaatttggataagaaatgaatagtttagttttaggaagttcatacttctagttttaggaagtgtagtaaacaagttacttaaaaatatcccccaaacatgttacccctgtttggtcttgtcattaatgtattttaacacactcttttgaaaatcacgactactgtgatactccactaatatgaagaatgatgaggatgctatttatgtctttcattatttctaagatataaggtaaaatgtatttatagtaaaaattaaaaatatttttatatgcaaatagtaaagacatagagatagtaaaaattgcttatga

SEQ ID NO: 79885 - DNA, 1067 bp, Homo sapiens
tcccaaaaattattatagatgagagaattgaatgtgacataagttctactatacgcgtgacttctttgggtacgatttcactactacatttttaggaaacctttatgaaaggaattacttagcactggagattctgtattgtagtgacaataaccctgtgaaaatgtaggaaggtttcaaagacattttggaagaaagaggaaatcagagtctgatttttaaaaattcgtttttgaaaaaaaagtgttcaagtttgttacctgttttcccccacagtgtgaatatgacttaactagctgaagcttcttcatttaatttgatgtggccacctccctgaccctcatatttgtaaggccgtttctggttctttgccaccaggagctccttggaatatcacaggccttaggctggaagaggttgacagcagtttaattatttataattataacctaatttccaatgtttaggaataacaaattatgaagaatactccttaatccaagaaactattgaagaaaagaaagaggaaggaacgggcacactcaaaaaagacaggacactgttacgagatgagaggaaaatggagaagttgaaggccaagctgcacacagatgatgaccgtaagtgtttgcagaggaagcatgatacagacacacaggctttgctaagcctcacttccctcccaccatccatatgacccaggacaggacttttgatttttgtttttaaaactctattttaaaaaagtaggctgggctcagtggctcacttctataatcccagtattttgggaggccaaggcaggtgtattacctgaggtcaggtttgagaccagcctggccaatatggtgaaacctcatctctactaaaaacacacaaaaaattagctgggcttgctggtgaatgcctgtagtcccagctactcaggaggctcaggcaggagaatcacttgaacctgggaggtggaggttgcagtgagctgaggtcgcaccattgcactccagcctgggtgacagagtgagactcggtctcaaaaaataaataaataaaaattaaaaaaaaaaaag

SEQ ID NO: 79886 - DNA, 2099 bp, Homo sapiens
tcctggtagccaacactgtgtccctctctgccgggctttgagggacagttgtatttcacttaactggctcaccatttcaagtgcactaaaggtttcttagctggcatcttagaatgcaagagaatgttggtcagaaatcaggactctcattaactggaagatatcctctcaataacctttcatgtctttacccttaactaattgttaaaactgacaagtcatttaacatatctgagttgcggtttcccagtatgtaagatgtggattgcactagattgtccccaaggtttcttgtggctcaaggaaaacatcatccatctttgtcctctcctaccagcttcctttcttcctttccttccctccctccctttcctctcgttatttatccatctatctgcccatagaaataatgtaggggttggcaaactacagtcatgccttttgcctgtacttgtcaataaagttgtattggaacacagcttatgtattcaagtattacatattgataaatccccttgagggttatgtaattgttacacatatcttctgtggctgttctcgcattctggtgacagaactcagtgacagagactgtgtggcccaggaggtttgaaatgtttactatttggcctttagagaagtttcctgacccctgagttagtggacggaaggatggcatggaaagagggctgagaggaaagaagtggggaggccaaaaggagagagatagcagggcagtgaaaagatgcttgttggcttaaggcttagagtgatagcttggagtgtccatcttagggtgatctgggggtcatttagagaaaggaaaggctgaaaaggtgggggggggaagcaacagcagtgatggatggagaaactgggaggaggaggagttcagacacaacaagctccccattttaggatgcattcgcttgtcatttcccctgctgtcttgagtattgagttcttgtctgtgtgtgtgtgtgcctatcgcctttctttctcttcctctattacattggtttttatctggggatgggggttgggttgattttacctctagatatttgattagctagctttgtgatttaggattgtaaaaagtacactgtatttgtcttttggcctctttgaagctgatcatttcatatgagtttcctttgcctctttttataatcacttctgcctttctggactgtcatcagactttgcttttgctgtactggacacctctaatgttttccatctacaggccattttggacaaaagtttgtttttcttttgccttagttttctcccatgcggtgatcatccactgtgtcctgcacatgtcaccgtgggttggctggcactgtcccctgctccacagagggtgtactgggccatgggaatgcgtcagtggagagaacgtgtcactccccgaagcctctgatgcttttccttcctcttgtgtttcaggcacgggatgacatcctgaatggctctcaccctgtctccttcgagaaagcttgtgagtttggtggatttcaagcccagatacaatttggacctcatgtggaacataaacacaaacctggatttttagagtaaatgacattttgtttctcttttttctcttttctcctgtcttctttctctttcagctttttatttttgagctaggtgtctaagatcataccctaatttcaatcatttgtgagaatgctagcttttcttccatcgagtagatgaccaaatttgcagattttggggaaagcaagagaaattcagaagtttcttttgctgaatagaaattcagtgatctgtgtccccctccaccccctttttttccttctacttcgtcttagtgaagaggaaagtaaaaaaaaaaaccaaaaaaaaaaccgctccagtagggccaaggtgtgaacgccagtgtgggggttgtggggaggacatgagctttcctgtaggatgtgccagtcagcatgagatgtgtccagcaggccattcttggtattgtgcattcattgtattgtttcaagtgtattgcagggagaggataacggagaggcttctttggcccttgaccccagtttcactttggtggaaagtagttggga

SEQ ID NO: 79887 - DNA, 1004 bp, Homo sapiens
gcattggtattggtcttaaaattaggtcctgcagtttgtggtcctattgaatgctccacactcacactccagcaacagtattcttcccttaataatctgagaccacaagagttaagcaattgcattgagtttgtttctttttttgtaagattataatatcaagtttatgcctgtagtggtacctgtacccttattcagattccaaattaaaataaggtggttttgcctggtggcaattgtttttccttatgaatttgatttactttttaattaggccaaattaggtaatgaggcatttttacttaatgtagatatttaattgggtacattattgcttataccatgcaggtaaaacttcttgaggatataagtcccttcttaattaaaacaaaacagcgaggccacattttgctgatttgcgagttggatagtcaggtcctgtttttacctgggctgtccctggtgactggctgggctctcttttgcagcctttatatctttcccaatctagctttcatatgtgtgatctgcttaaacaatttagggttttaaaataataatgagaaggttggacttgtgacagtcatgctgaagatgcaacccccagaaatttcagttacgtagtttctgaggcaggtacataggaatgtgaacaagggcatatcttttaattttttgaaaatttgctcagcatttttgctcgaagttgcaatatggacatttttatgagattcgcttcgaactttcttcagactctccagtgatttctggatttgttactttagtgaaggtactcatttagaataatgaaaatcatcagagcttgaaagattttcagagttttcagggatttaaggatgatttaatatatccatctactttattgatggggagaataagtgctagagagagacagagacaaggcccagaacagtcaagtgtggggagccaggaaaaagccagttctccttaattgagtctgatgtgctttatctacatgacag

SEQ ID NO: 79888 - DNA, 1028 bp, Homo sapiens
cctctgagtgaaataagccacacagagaaatgaaaatactgtgtgatctcacttatgtggaaccttaaaacataacaaagaactcaaatacatagaaacggtaggaaagtggttactgagggtggggaaatggggagatagtggtcaaagggtacacaggctcagttacatagcataaataagtctagaggcctaatgttccttatgtacagtgtgagggctatagttgatactattgtatactagaaatttgcaaagagtaaattttaggtaattttacaaaggaaatttacaaagagtaaattttaccacacacatagaaactgagatgatggttacattaatttgcttgactgtagaaattccttcactatatattatatgaaaacatcacgttgtattctttgaatatatacaataaaataacaaaattgcaactcatccttcaaatagtagaaaatgaagttttggtgacatctgtgtttgaattcagatcctgctcccctaaatgtgttaaattccccttccctgattccactggcttctgggcatttctataaaactcagtggccaccacctggtcttcattgtcatattctgattattattttattccacagggtctgaaatactgatcacgtgggatgttgtttgcctacagggtaacttggaggggtcagggtgcgtagtggcccagagcatggtccccagtgcccacggatgagacggcgtgtgtgctgtgaccctgggcaacttagcatcgctgagcctcagagtcagtgtgtagaattatctaaagggcttgttacaagatgccggcttcccacggcttttgtcagtactcagttaatctgctggtgcttgtaaagcacctgaaacagggtttggccttcagaaaatggcagctgttttaattgtagaaactctctctcaacctggtttggactattagttggataatccaaaaagtcatttaaaatgtagaatcataacaggtgacatgtaccacttgaaacccattattctaa

SEQ ID NO: 79889 - DNA, 1011 bp, Homo sapiens
cattaccctgtgttgggtgtgtgtagacacatccacaaatgcatagatactttgtgtgaatgtatatatctaggcctctgagaatagcagtttaggtgttgttgctaggtttcagcaaatatgagttgaaaaggttttcctgacagccctaaaaatacacacttaatagtgaaattttggaaataaggaaaagcatgaaaaaataatacaaaacacatgagatgttcagtgcctttttcatgtaatggacataggcctatttttaaatttttatttcctctaagattaggccctatattctgttttttaataatatattatgaataatttacttccataaaaccaattgtttttctacaatatgatttttaataatgtagggtaatctgttatctggatatatcataatttatgtatcaagtcctgtgttattgaaaacttggattgtttcatctacagccataccaccctgaatgggcctaatgttgtctgaaaattgggtggtttctagcttttcactatgatgtactgtggttgagcttcatgtggcataatctttacacacatttataacttttttttaaactaaatttctcaaagctagctgtgtcaaaagtaaggactttttaagggtttggatagatagtgacacattttcccccatgaaggctttgctatcttaagctttcatcactagtgacccgcttcacatcttcctcaaatctgagtattaattttaataagaaaccttagctattttaagtgaaaacttatttgcttatttattttaaaaacattttctgttcatattcttcagcagttattttgttgatttatgaacacatcacatagacagtatatgaagtctattgccattacattcattgtaaatatttattgcccagtctttttcattttttatgaggtttctttagcttctgctctcctccccctggtctatcaaaagtatgtatattttgagttaagcatattaatcgtttcctttatggc

SEQ ID NO: 79890 - DNA, 1076 bp, Homo sapiens
agactttttaccttcagatgatcagcgtcctttgcacttattcttcattctaagacaatatgaagtaaaaaatgcaattttttggctgggcactgtggctcacgcctgtattcccagcactttgggaggctgaggcgggtggttcacctgaggtcaggagttcaagaccagcctggctaatatggtgaaaccctgtctctactaaaaatacagaaaattagccaggtgtggtggcaggtgctggtaatcccagctacttgggaggctgaggcaggagaatcgcttgaacccaggaggcagaggttgcagtgagccgagatcacgccactgcactccagtctggatgacaagagtgaaactctgtcttaaaaaaataaattttaaaaaatgcaattttttccattagataccttaagaatcttcccaatatttagttgaaagcatttggggaaggttccaaagcctcacatggttgaggctctagaggcgatgaaacatcctctgtggtcaatggtggtggacctgaggacccgagggaggggagctaagatgtgggagattttcccctagcttcatttccacatttcccctttcaagctaaagataaatgatctgtatctctgatgcctagaatggaacctggcacaaggttgatacttgtttaatgaatgttctttcagatattatttaccaaaaataatatatcaacatatcaatacattcacttaaaacctggaacatcattattatgggaatctctgtgttgttgtcattttctcttcttgagacagagtctcactcttttgcccaggctggagtacagtggcgcgatcatagctcactgcagcctcaggctcctgggctcaggtgatcctctcacctcatcctcttgaatagctaggactataggcatgtaccaccactcgggactgagttgttgaattttttgtagagacgaggtctcattatgttgcccaggctggtcttgaactcctaacttcaaggaatccttcccatttggcctccaaaagggctgggattacaggggtgagatactgcacccggccttgtttttt

SEQ ID NO: 79891 - DNA, 1059 bp, Homo sapiens
tgcctcctctaccctccatgacacctcctttttttctttttttaaacattcctagaaggtactgccctagagtatctggcttgaggtggcagtttgggaataggggatgagttgtttaatattccttttttttaggacaaaatcagttcttactgctgtggagacctcgctgcttaggtctctcctctctacctcttgctgcccaggagccatcttactttcttttcatctctctatagcctggaagcaagatggtgtcctctgccaaagccgcagtgcccaccgtgagtgaccaggccgcagccatgcagctgagccagtgtgccaagaacctggccaccagcttggcggagctgcgtaccgcctcgcagaaggcaagtggagcgtgtcataggggttaacttgtcaggaagggagctggggtggcatgggtaccacccagggcctgaacactgctgaacctatttcttggcaaagttgtccattctacttgcatgactattaaagatgcccctgtgggttggcttttgttgcattaagccactatctcccagacttagtattcactttttgatttcaaatgcctttcgttgaactattttgagttgtgtacttcctcctcctcctcctctttccatatcctggaacaagcagtggtccatttttcacaagtcttaggggagaatggtagtcatcagtgtctcagtgccagctaaattgtagtccagaataagtgatcatatattccaggtatcattttgtgaacttaataacaaattatataggcagaaaatctattttgaagtgtcatctttattatcttttttgccctgcaaagttttcacttattgcgtgggagcattcaccttaacaaggtcttcaagagaacagagttgaggactaaatttctgtctctggagcatattaattaccaaagggcctcatttactactctgtttgatgtggtattagcatgaagttctagcatgaattcacttttcttcattgtagcaatccctttatagaaacaagcagcctcataaattggtaagagaagaa

SEQ ID NO: 79892 - DNA, 1009 bp, Homo sapiens
gagcatcggggagtccagcaagaagctgcttgtggattcggtgagaggttcttagattgagaaaggacactgggggactaggctcgcgttaggtgtgagtgaagtcttcttctctccatgagatctctgagcagctaacccttcctttaggagtcctgtttttcccgccagtctttgttttccatgttttgctgtctgatcaacaaagttcccaggtggagcttttaaagtttactttttctttgagcccatgttgccatttcctctcggatcgtcccggtgagacaggcaaaggggtatgtgatcacctgtcttctcatcaggacatctcagatagtgacagtcaggtgttggaagggtacgtgtgtccaagcctcagtgagagagcgagtagtctgaggaatttcaccttggggcctgttcccttccctgctttgtgagtctgctgaaggagggtttgtgctggtgcatctttgtttcttctctgcacaggtatagaggcaatgtttgtgggtgatgaatagagtctagcttaactccctagaacttttcacaaatggttatcagtctgctagatgacatttaaaagttattagcaaaggccactaatataattggtggctattagtttggaagaacgtgatttgaagtttgagagcatctgccttttagtttacaaagctaaaacttagctttcatcttaacagagacaaaatagggtagagttttagagaatggaccctggagtcggattgccttggtgtggatcctgtctctgccacttaggaaaccttgagcccctgtagatagcttacatttttagatccacagtgtctagcactgagcaggtgtttgatacatttaaatgaatgaatggatgtatatgttggtggtcaaacctattaataaaatgggctcagatgactcagagccttttaatcgtgatgactcaaatgcatctctgaagagtctgtctcccttccacaataccttccttttatccctcccc

SEQ ID NO: 79893 - DNA, 1050 bp, Homo sapiens
ctcaagaatatctcgatggcatccagcaagctgctgttagctgccaagtctctctctgtagatccaggagctcccaatgcgaaaaatctcctggctgcagctgcaaggtaggagtgggacacaatgtgctttcgtgtgtggttagacagtgtcattgcagtctgaagatgtgcctgacatcctcccacttttgctgagcaaaagaattggtgctgtccttaggtcatgggaggtggagctgagagtgatggacactctgatattttataaaactggctcatttccatgttctttccccactaaaaatatcttctgtcttctcatacagccttttcagtagagacttgtttagacgtaaggtccattttgacttgtaaatgcaatgaattaaacagattttttttaagtagcattatatctttctgattataaaatagtatatatgcttcttgaaacatcagaaaatactgaaaagcgtaaagatgaaaagcagtgctcatcaagtcattcagcagacttttattgagcacttaaccctgtgcctggcatcagtgttagattgaatgtaacatgttgtatctgtcacatggggaaggctccactttaagatgagtagggaggcagtgggaataaattgtttttggaaatatattaaaacatgagtgtgaattttggatgatttgggtgtccttctttcctgttggtttcacccagggaagtggataaaacagtatagtttctgctccagggccacaagttagttcagtaactagtggttgaatgtggtatgtggagcactgcagtgacagcccagggggttctcgtatcagcagcccctctttcattttcctgaacccagagagtagggtggtcatgattctgtggtggtgcaggcatgtttttttagcattatttaccatcatattacgtataagaaagctgacagtggagagagattaaaagcaggactattaggggatagagagtaattggaggcctttttataatgtgcagattcgtgatttttgaaaagcatagctttgattctgc

SEQ ID NO: 79894 - DNA, 1042 bp, Homo sapiens
aggaagctgggcagaagggatctgatcatcatagtctcagtcctcagtcctctgtcctccttgttcttgagactgtcaggtcctgcctgtccttcctgtgtgtatcctcaaagtccccagaaatgccactgcggggacccaggcctggaccaactcagccctgtcccactcctgtgttaacagtctcaaaccccttattatttgtggtctctgtggtccttcttgctctgggaagaaaaggtttgcttctggagaaaaaagtagaggatgtctttttcctctgttcttaattctgcttccgagcctgggtacgtttttgggaccctacctatccccttggttttggatgcctaggggagaggaagtcatttgctatttagtgcctggtttgttcattttcttcccgtgtaactgtttgggttctggctcttttctgacaagttgggtggagctggagaccctttgtcacccattcatcagcctttttcccccaaccaggggctggtcaggtgccccctaaacttagtcaaggaaatagaaagctagcttgcagttgccaaaacgaagggggtatcctacctctgaacaccttccctgaatcactgctcaccaccacagtcatcctggccagaaggactccagaactgagaaggctttaagcccacagcggccagcatcacacccccgggccaggtttcagctgctttccagtccacagaggatgctccctaggaactcaaggtagcacctgcccccctggctcccctttggtctgaggttcttgctggacggggctcctcctgtccccaaagactgtgaagatggatggtctagcaagcagcacaaacgagaagagtgcatttgctccgtaaacagaaaggtgtacaagagacctttgctctctgtgggtcttacctagaatgtttccttccctccatccaaatcaggatgtcactcagccctgacttttccaattgcttcagtctacatcgagccctccctttcaggcagactctgtgcccggcagctgaggctttcattt

SEQ ID NO: 79895 - DNA, 1031 bp, Homo sapiens
ttatcctgctgagaagttgtgctaattgaccacgcatgtattgccttgtattaatgttctaatatgttttaaatgccatccttctgtgtttaccttgtttcttctccttcaaaactgaaaacaagagattctcatctctggccaagctaaccagagaccccctcccctataatgagcattgtgttgctaacaggaaatctgaagtcatgataccatgatgtaaattctcaaacatctgagtaaaagtgatcatgaccagaaacttgtgtatggagggagagttgatagttggcagttgatgttgaatttcttttgctctatgacatttgcttgctttttatgttgtgttcttcttctgtagactgtgaaggggatgttggacaatcctaatgaacctgttagtgacctctcttactttgactgcattgagagtgtgatggaaaactccaaggtaagactgcctatgccgtaagtcagaagttagcattgcttgtcaatgtggggagaagtttagacgtgccttctgtgcatctgcctgtggctggtctgcagggctagccacatgtagcatgaagcctatttgtggagccctttgctcaggagcttctcaaacttgacggtgcatcagaatcacctggagggcttgttaaatacagattgcctacccccaagtttctgtttcagtaggtctgagaggaagctgagattctacatttctgactatctcccaggtcctgcccctgtggtccaggaaccatactttgagaaccatttcctctcttttttcacaaatgggtcttattgtaagtcaaatcgtgtattttctacaccggaactgatttggaaagtccttcagtaacttgacttacgtgggatcctcttatgtgttcttttgcagtctattcatggcatgcattctcaaggagggtgaaattgttttgttttgttttgttttggtaggacattggagagatgttgaaaaaaaattaagataatataatggcttgttaccctgctcctatcttaacctt

SEQ ID NO: 79896 - DNA, 1046 bp, Homo sapiens
tttcttttaaccatgaggatgtgcccaagcctaaatcccagctgccacacccttatagtcatgaagaagggaggggagccaccaagagaagcacgagggagcaggagcagattacctcacacagtggctcatcggcatcagtcactactgatggcactctttaaaatcccagagcagggctccacgagaatccatttctgtgtttctgcctcctgccagggatggctgtaaatgctgggcatggtagaaggatgcacacccctaaccacagcggctgtctctccgagtcaccacatacgctgttgcctgcctttttcctttcattcagctcattacctagtcttgaatcagatgtgtggaatggaatgttattttaaatgtgcagtcactcacatttgggtgccaagtagaaattatgcaacagcagcgtttgtttttctgagaagttgaagtttggccttgcccctcacagcagagttaaagctcggggtttttgcaattaagcactttcagtgtgtaccacagacacccgatccagctctctttaatcgaatttgacttggctgtgagtatgctttcttggtcatccctatgtttggattgggaaagtggtttctttagaaggaaaaggaaaaaggctgttgggctttttactccttgttctgttgcctttgtctaaggtcagcaggagagaagggagccaggaggctcggttcattgtttgaggcatgccagtgagtagcaaggtgaccttgtcaagtcatgtcactttccaggtgctggttttattgtctggagaattgggagtttaagcttaaattgtctttagggtcccctctaacccccaaagtccatgaatctgactttgtgcatacacagaaattgtttctcccagatgtccgtggtattttgctaagggggaacacttggagcaggctccgggcttgggagtgttcttgttctggtggggcctggaaatatggctgagtaaatttaccctttcatcattatggctggtatgccagatgttctgtgacatggaaact

SEQ ID NO: 79897 - DNA, 1837 bp, Homo sapiens
tttttttttatcccaattgtctaaattggctttatatgttgctcataagggttaagttaaaagtttaagtggtcatttaacaaggaaatttgcattcttctgcaaacataactgccttgtcaagtgtagccttttgctgggagggagggtttctgtcattgggtcacaggctgtaggttctaacagtcttgatcctgaggaggtagagtccagggctgggaacctcatcgaagtgttgaccctctgttagcagtctagcatggatcacaggccacattcctggatccttatccatccagaccgtaaatcagcaataggcctgatcatgcaatgccattgtgttacctgctgttagttttttgtttttgtttttttttaattatgaagcataagatacacacagagaaaacacgttatgtttagagttcagtgaattttctcaagtggaacaccccttggtaactctagccagattaagaaacagaatgttattgacacccagaagctttccttatgctctctccggtcttatctgctcttctaacaccctagattaggagggtcacctgtgtttgcacttggtactaatggaattgtacaggaggcacccatttgtgggtggcccgttttgttaaatatgatgtttgtgagatttatttgtatggctgggggtagttctcatctattccttctcattagattccattgtgttcatttcagaatgatgacagttatgcctgccttgcctccatcagtcattagggaatatccaggtaaaacttagaaaaagttaaaagtactgctttaaaatacaatacggtatgtttattgtttggaagagaatagatttaatctgagtaaaatgaaggcaaagatcccaaggattgtagtctcaaaagtgaggaggaaagtagtcccgctgcatagtctggtgcagggggtcacggggcgttgaagagcagggtgctgtttaaatctgtgtctctgcttcctgggagtggaaagttgactgtggagtcagttgtcctgtgagctacacatttaattctccacaacatctaactgggcccctctgcttgatggcaggggtctctttcatcagttcctatttattgtttatgaagtcaccagagattttcagtgttccggttgaaccaccttctttcactaagaggtgattactgtggttcagaaataatttgtgcttctcaattgggcagaatctccctgttttctcccatcaggccctggatggggatttctctgaagacaaccgcaataagtgtcgcatcgccaccgcacccttgattgaagctgtggagaacctgacagcgttcgcctcaaaccctgagtttgtcagcattcctgcccagatcagctccgaggtagggagtgtttacaggaacatcatactaaggtctttggctaactttgtgtggcaccaaatgagttactagttaaaactccaacagctctctctgtcaacatgtaggctactgttactcttgtcaatgatggcatgtgcacagttagtgaaacacaatgactacacctctgttgagagataacatatatgtagagaacaatcttactgcctaggtttggggcgattcttgggatgtgtcacactcaaaaaatgctatttaaggggcaaacatgggcttgagtccccgccatgcagacccctggtaatccagtcttcatggttccctgccctctttgtctccttcaaagggcagaggtggtgatttggcaaagaacaggacctttcagggcccacgtcattcactcatgtcttcgaccctgactttgatttctctgctgtttggtctcaggg

SEQ ID NO: 79898 - DNA, 1038 bp, Homo sapiens
ggaggtgctggctaaaggtttgatcttaagttctcttaaagggtgtaatttagccattagtcattaccgcacagaatgaggcattgaacagaaaagtgtgattcatgccattgtattttatctgagtgaggatagattctgagaggggatagattctggtgtctgaagtgaatatagcaaaatgttaagatctcatattctgatgccaggtagagggtcatccaaacaccaaatgataaacttctaaaagtgcggtgctcccacagcagcaggactggcatcccaatgaaagtgaaagagaccacagactgtggcagctgagagccagggctgtggggtgggatgccgctgtctccacctcttagctgcatgagatggagcatgcgtctcaacccctcaaagcctcggtatcttcatgtgtatctgcctcttaaagttgtggaggctcagtgaggaaatggaagttaaactttcagcagagagcctggcatagggggtgcgcccgctagatgtttgcaacacatggcccacagcgcccagctggtaggcgagctttagtgagcgtggatggatatgcatggcagtgccctcctggaaagaggcctgtgcggaggcagtggttcctgtcgggataagctttttttgttctcccaagttgggcgaatcataaacagagcatctaggctgatgtgaaatcatttgtgctgtttttccaaatcaaggcttggtcaaaatgctctgggcaaaaggcagttgggattggcttcctacaaagcttttgaaggtttctttcatctcctgcttttttctgctcccctgctaccttacccttttccactcctccttcctcctgagtttgtaagatgtctttagttcttttaaaagttgttaatttatagaaattgacagtttgtaaaattgaattcaattctcatatctaactctggatcttggaatgggtttcttagcacctctgccatatttagagagatgaagaactccctggagaaagtaaaaaccaagaaagagtccattaat

SEQ ID NO: 79899 - DNA, 1123 bp, Homo sapiens
tgcctggaagttaccactgaaggactagagatcagagtttaagtaagcagcccgaggttcattcacaagccttggaaacacattttgaatacaaatctcctacaccaatatgtccccaagccttcaagggacatagtcccattgtctcagttcttccaccccacagtgatcttgcccttctctcagttcctattgcatttatagtcaggtgagcaacaatttattcctagtgcttctaattccttctattccccgattgtgctcataaagaacggttccgtggatagccatggactcgaccattcctcaggaagtgcttcctgatggagagtctgcctcctttcccacctcatcttctggcactttgcgcttccctagaagtgtcaggctggctcccgcctccatgtacgtgaattctgttcccttttcttgggatgcctttcccaccttttacatgtggcagactcttcgcctggtaagacttggcggaaacatcactcctctggaaggcctcccactcctctcaggcaaggctgggagcctctccttgccatgtaccctgaatgccttatgtgcccttctgttgaagtccttattgcacaagttgggtaattgagttgacactgggcgaaagaatctctgaggccctctctgtttttcaaagttcctaattctcgtaaatacagtctacacttcagcaggcttcttatgacctttggattcttttcctctcctctgtagctggatgaaggcactcctccagaaccaaagggaacatttgtcgactatcagacgactgtggttaaatactccaaagccattgcggtgacagctcaggaaatggtaagagggaagagagctgccctccccactgttgtttgcctttttatccactgccgccgctgagcctgcaaatcccagatctgtgtcagagagagagcccagaccactctctagtccctcaggggctccagcttctgtcctttatctgtggtctttctggctgcctgtgtccagtagccccagtctgctgcagttcttttctcatgaaaaagctgcaagagggaattaaagatggctgagacttgggcatgaggacagaggagcaaaggaaggagagaaa

SEQ ID NO: 79900 - DNA, 1041 bp, Homo sapiens
ctctccccctctcccctgccctcctggctctctcagggagaacattctcaagacggccaaggccttggtagaagacacgaaactacttgtgtcaggagctgcgtccactcctgacaagctggcccaggcggcccagtcctcagcagccaccatcacccagctcgcagaagtggtcaagctgggggcagccagcctgggctccgacgaccccgagacccaggtaccagcagggcctggggagtgcgtcctcccggtcttcccgtgaacgctgcacatcgggcctcagaagaggcctaaggcagaacaggaacttttgaagtagacaatgtgtgtgtgagtgtgtctggtttgaggaaccggtaggaggcagtcatccaagcgagatagtggcacagactgtggtggtggccatggggatggagacaagcggagggatttgagaagagtctagaaggaaggcttggcctggcccggtgaaggctggagcacggcatacctgagggaggggaaggagtgaaaggcggctccttgtgggccagagcagggcacaggagctccctgaagggagagctggtgtgggcagggggaggtggaggagattgaagtgccggagccacacacaggtagaactagtgagtgcgcgtgagcctgcccaggcacggggctgtgggttcagcgactgttgccatagaggtagcgactgcaaccacacgagaggaaaagccagggagtcggggcagagcctggaggaatccagcatttaggaccactttaccgtgcaagtggcacaggagacggagaagcagcagctgctgcagggaggaaagccgcgggcatcatgttgccaggatggagtgtttcaacccaccagagacagagttaagaaagagggaagactgggaactggttattggcctgttccggtaaccatcgagtgccatcgaggacattggtgtccccagctgcttgtgtggagtggtggggcagcagccagatgggggtggggaaatgaactcagcacctgtagatggcccaggtgag

SEQ ID NO: 79901 - DNA, 1160 bp, Homo sapiens
aacatccttcccttgtcttgagcttaggggaaaatcattcagtcttttgccattaattatgagtgtccgcaccatacctttaaccctttgcttattcatgctgtgttggccactttagagaaaccatttaacaatgcctatggactgcttagctactgagatcctgagccataactattaataacctggtagtcgtacagcatatattgttgcagacaaatatggtacaagccttttgcaattaagtggtgacaaatgccaccatctaagtctagagcagtggtttacaactatggccacatgagtcacccagggaacttaaaaaattcttatgcccaggctacacaccagaagaattttatcagtagctctttatatatatatattaatttatataacctcaccacagctctataaaggaagactgttgtggtcgcttaataaactgaggcttagagagaggataagtacctgtacacaggtacattgatattgactgctgaacctatgcctaactaaattgcctgcccactggctgtcttggaaagtaaaaggcatttatccccttccttctatttctccatggctctagtgttcttttggaactggtctaggaagccatcatagtaggacttgtcccaataatgtattggtttgcttttcactcattaattaatttgttcattcaaaggtctatgctgagttcttaatatctgcagaatgatatatatataggccctagtgtgagagagtgagaatcacagagcacctggaatcatcatggaacagtagcaaatatgaaagaagtataaaagattataagaggagggaagatgaggatagatacatgtgaagtagtgctcaaagattattgactaatccatttgtgcgtacgcataatgtcatctgtacactgccgtgtctagggctggtcatggtgtaacccattgactcctctcatcggtttttttctaagctttctttatagtcatggtgcaaaggggttagtcctggggtctaaaaaccatctttccagattcctgagaaagactgtgctacctgggcaggggaaaggagtgtggggcaccaagaagggaattcacatttaatgaatgtctattgtgttccaagcattgtgagaaatactctccatgtgttat

SEQ ID NO: 79902 - DNA, 1074 bp, Homo sapiens
gagctaagaaagctgttccggatgtgctgcagtgtcccacggtcgcgggagccgtggagctcacatgagcagtggggtgggtcggagggttttctacaaagtgttaggtccatccagcttgttgctttctttctagatcatcgccgcccaggaagaaatgctaaagaaagagcgagaactggaagaagcaaggaaaaaactggcccaaatccgccagcagcagtataagtttttacccaccgagctgagggaagatgagggctaaaggtgcgagcccagatggcgagccccaggggatggccctggctgaactggacagacagtgttcctgagaggctgggcacttagctggaaaccgcccacctccctcccgggtgagcctggagccctgcgtgcttgttctcacatctctgtcccgtcggcactggctgcatgatcgtgatgtcacacggtacaatgtcctacccacaactcctctgccgcctcccctcatgcctcaccgtgtctcaggagagaggggtgcacgtttcatggactgttaccaacaaagaaaagtcagtattatgttgttctcagacactttggcttttgttggtccttctcttaggcctgctcctggacctctttatgatattgtgatagggaaaaaaatcattgacgtcatagaatattcttcttcctctcaggagaagacggaagctggagttggacatggttcataaaagccagaaacacaaacccgtgtggactccgggagggtgactcaggtcctccttccatgtcttgagcactggctcacccagggggtgaaaaattcccgcccctgtttgcacgctttcttgcctccgtgtgtaagctccttgtacaacccagacccatcttgtattttgtggcccagaaaactgaacgattattttgttcctccgtagtccaaagggcagagttgcggaaggccgtcggggcttggtgagcaggggctgtaatacagtctgtgggctccttaccctgcagaggctgtttcagctcacacagagtcatccacacaaacccacggctcccagttgacagtcagtg

SEQ ID NO: 79903 - DNA, 1062 bp, Homo sapiens
acaaaattctttaaaatatgtccatttacatgtaacatcacacaagtatgcagagatttgataaatggaagcattcctctgcctgcctacattggacggcagggaggtttgcccgaagcatcgtggtgatgaataccagtggtgcccagcatccaagatggccccagtgagccacagctcctggctttcaaggctttgtatgaaagccctcgccacattgaatcaaggatgtctgtgtgaccaacagagtatgatagaagtgacaattaggaccaaggctaggtcgtaaagggcattgccatttcagcctcagtctcctgcattgctcactctggagaaagccagtaccataccataaagacactcaagaagccctgtagaaagactcatacggagagaaacggaggcctctggccaacagtcagcacccacttgccattcctgtgagtgagccatctcagagtggagcctctaatcccagcaagcacttacatgcagccccagcagacccttgacagcacttcaggagggaccctgagccagcacctccagctgagcctctctaaatccctgccccacagaaatcaggagaaatttccaatgattagtatggaagctgctacgttttggggtgatttgttatgcaacaattaactgttgtgggcaccctacatgtgttgtggggcccatgggagcgtcatccactagacaacggtctggctataacagcatttaaaaatagaggtaccaattgtgtgttcgatttaaacaagaagtcatgtgctccggcatccttctgtgtgaggagcacaaccactcctaccacatcacacacactcaaattgataacgctacctgttttgtagataatatttagtatgtgagtgttgtgtacgactcaagtatgagtcaagcatatgtggaggttttcagatgctatagttttaggatttaattttggaggaagtgaacttgaacagtttcaaactgcataattaatgacattccattttcatgacaactactaattaatcttgcctgttatcataaacttttagcctg

SEQ ID NO: 79904 - DNA, 1229 bp, Homo sapiens
tggagttgttacctaagaacaaagatggggcggaatggaggctacagcccgaaagccaggccagcagtggcgttcttctgtgtccccaagtagtggacttgagcccgctgagacctcggcaggagtctcgtcccagggcaggtgggtgtgcggggtgagccgcggagcggttccagctcgggtaaagaggaagttacctcgggtcctttgcactccaactcggcggcgccccgagcccgaggggccccagccaacccgacgcccgtgtgttgtgtgtgtctaacacccggtccgtgccggccgcccgcgcccgcccgccgctgcccccagctcgaggaggacatcgcggccaaggagaagttgctgcgggtgtcggaggacgagcgggaccgggtgctggaggagctgcacaaggcggaggacagcctcctggccgccgaagaggccgccgccaaggtacccggggcgcgcggcacggcgtggcgcacgaatggctaactctttctctttctctctctccctccctgtctttccctctgtctctcccgctgtccctgtccttctggttctgtgcacccacacccctccccttcgggatcacgctgcctgctgcacccccctccctccctgtaccccctggccaactcccagctggaagatgagctggtgtcactgcaaaagaaactcaagggcaccgaagatgaactggacaaatactctgaggctctcaaagatgcccaggagaagctggagctggcagagaaaaaggccaccgatgtaagtgcacgctcacactgcttccctcacctcttgcctgcgtggccactccggggtcaccacagggctggagagcaatgaaggaagtttaccttttcctgctggacacctgcacacagccctgccatggcccagagcattggatgccgcctctgactgctactgcacacattcatttatatttcatccactcctctcttcttctcctttcctttacctccctgggggtggaggtgggtggatgagaggctgggagaatagagcagctgaaattggactctggaggtgaacttcacctccctggtggcagaaaacccttgaggtgtcatcaccaaggtttgtgtagagaatgccaggttttcttcactttctttccttttgccgtttccagtgggtgggaagttctgggtttggtggtgggtctagtcagggttcagagaacctggcctcta

SEQ ID NO: 79905 - DNA, 1053 bp, Homo sapiens
agctcccacctacaggatgcaaggacccaagctgggatttgtgagagtctcagcagaggctgtgaggaactccacagaaaatgaggcaggaaagcaaaagttccttgttagggcttggaggaggagagggttgtcaagcatgttttctttattattcccacacataagggagctggctttaagagctttctgtgacaaacctgaggagaaaaagccctgagacttagaaggcatttaagaatacagctcaagggggaaatcggtggagactgtatctgcggtggttttctccacctgtagccagaggctctctcatagggttctgtggctttccttggggtgccttttaaaggcatcccagtccagcccaggactgactggattccaggagatctcagaggctggtctgacaccaaagaaggctgtaaagagaagagaccatttggatgactgttttcatggaaagtgagccccagggaggctggcctgagattacacagctgattatgggcctcagcctgactcttaaaacaatgcttgtgtatttcttaatcgtagctatcatttgagtttttaactatgtacaaggtattgtgctaagcgctttacagtccttcataattctcatagcagccccatggggaaagtactattattattcccacttttacagatgacgcccagagaagacaggtaatgtgtccgaagtcacgcagcaggaaactaggagccagagtcaacctaggaaaactgcatttagaacaggaggtctaaccactgtgctctacacgcgggtggttttcacttcgtgaagttttggggaatgggggtagtgcttgggttataatcttgcggttgggatcaggccctttagggcatattccggctccagacccgccgctcagcttctctggctcccgggcatgggaatctggactcgggagcggagcgctcccgcggccagcaggagtcgctattgcccttagcagccagctccgttaccccgggtcaccaccgcgccgcggaggggccctagaagtggaagccagagcc

SEQ ID NO: 79906 - DNA, 1057 bp, Homo sapiens
tttgaccagagagttggcctaaattcaaatactcagactgtaattaataggccctattaaaccagcccttaccttggaaaaagcagccatcccttacttcctcctagtctgtgtttccaaggtgtgtggatccttcaaaatgttggaatgaggctactttgcttgacatgattgattccagatcttgtgacccactagggttatgtttgctttttttcattatttaaagaaaaaggcaggatgaatcttcctttctgagtagtatccagcaaacaaggagacagggagttgtggccagaaggttcttaattagtaacatgattaaatcatgggaaataaccaatttacaaaaattcccagcactttccctctttacacttggtaagtatttccgggataggaaaaccgagggtgcattttgtgcttgcattggcactcccagagtggctgttaactggaatgtatactctcgatttccgctttcatatgtaggcaaggcagaggcactacaatgccttgttcatgtctgttctccctcattatacaaatatgcttcataaattatgggctttggcacacacaggaggttgtgtttatctgttatccatgggagtgccccttaatgtcatcagtgtttttttttttcccccctttccttaccatataagggcagaagtttagcttggctgtggtcacttggccttacacagcaagttgggtgaaaccttcttcgtataactacagtttgcatgaaataaaaagacctgacctttgatcatcccaagttccactccagttcagtcaggactttggaaacatattccagaggattgatttctagattataatattctcccaccagtattttttcttaataaccttaactggaatacttttttaaaaagtaaaagtcactgccatttttaattttctgttgttgtattggctaaaacatctggatttcatgaaaatctaggcctcataaaagttgtttttttttttttttttcaaatctgatttgggataatattatactatggtggggtgggcatgccct

SEQ ID NO: 79907 - DNA, 1912 bp, Homo sapiens
actccccaggtgccatgatgaaaagaaccttagaaaatattgaaataagctcaaaacttaaaaaaaaaaataccagaaataaaagctagtaaaggtgagaggtgtggggcttttggaacatagagcataataaatcagaataaaaagtaaaaataagaaagagaaaaaagtggccctgattaaattataaaattaagcatatcttgaattctaacgagccaaacaaaaattctactaggccagtataatagggcctgcagagcctgtcatgggttcagggttttcccataaagataggtgtacctcagatactactcctaggtcctggctttaacctcaaagcccctctgcctgtcctgctctgaaacctctggggcagtaggcattgacttctgggctagggagtaaatgttccgtgtccttatgtgagcttcctattacccattagcattgttttatgaagttttcaattttatatcctgcctcatttcaaaaagattgtgataatcactttagcagatgatttgcattgcagcaactgttctcccagtcctggttaggatctgtgcctgaggccttttgtggggagttggggtgggggccggagaacatctcaatctgatctcaggagagataaagacacaggagtgagaactgccagttccaaggtttccgtgatgttccgggaagccaggagaagtgacatagtggagagccggcatgctgggagcctagtgacttggatcttaatcctgtctcacactgatggctgtatggcctccacatacttctgtgcccagggtcagagttccctcctgccgcctgtttctagtcaagagctagaagaatagccagcttctttgggtggtggcaaaggggattgtttatttatagtacagattcctgccctccccctttgacctcctgaatcagaatctctagggacacggcctggaagtttgatttttttttttttttttttgtttttgagacaagagtcttgctctgtcgcccaggctggagtgcagtggcatgatctcggctcactgcagtctctgcctcccgggttcaagcaattctcctgcctcagcctcctgagtagctgggattacaggcatgtgccaccatgcctggctaatttttgtgttttttgtagagacggggtttcaccatgttggtcaggctggtctcgaactcctgacctcatgattgcccgcctcggcctcccaaagtgctgggattacaggcgtgagccacagcgcccagctgaaagttttttttttaatgctcatctctgagttgattctgacactcagccacttgtgggaattgctgatctggacaatgcctagggatccttctagctaaaaaattgagaccctattttttggatttacagggcctcctcaggaaggggcagccactctcaggtctgctgtgtgtgccctaccattcctcccactatatcacaaactggcacctagaaactggtctccatgcccagtcgttgctggggcaccctgtatgaagccctgctggctggtattcctgtaggacatattctctgatgtccaggagtctgaggttctacagaatgcccctggggaaacaagagtggcatttagacaacagcattctgtaaacacagtgccaagagctaagggaaagaatgggggtgggggtgatcggagggaagacacggatggattggtaggggccctttgggtaggaagatctcatgtgcaaggctggaatgaacatgaggtgctgtttccttcctttctggtgactcggctgtgtggggagctggggatagagacctgtcacccagagggttctttccccaaagcataaacagtcgtctttctgtgagtacaaagtccttgaggttcaggcccagatctaaagcaga

SEQ ID NO: 79908 - DNA, 1141 bp, Homo sapiens
gtatttttctgaaacattacaccacgctataggaccctaatatacaccatgccataggaccctaatacactcagtgtagaggacagtgtcaggcctgtctcccagcattgctgtcatgaaagggttccattataggtaaaacttaatttgatgcattcagttgaaccataagaaattgccattattacttgtctgaaatggtcaaatatcagcattctttgtggacttaatagtttattaaatctaacattaagtctaatatttttgtttatgggtggcagggtaagaagattctttgtagaaagaggtatataaagataagtttgattttgttctagctttggttcatgtgcaagctgaggcttcccacaggaaaggcaagaaatctcattatctttttaatagtaaagcatattggcttttccggtttcatactgccaagattcagacagattcctgacgtggtacctttcgtcatcattaatgttagatgcctgatagtttcatcagtactcaaagtgagagagttcattcacagtgaacagagagaaatgtgtctcttttttccacctttagctctggaaattgttgtttcctggtttggaaaataaaagtagctctgtgctctattttggtctaccacttacactaagcctcacaagccacagcagtgcagtgtgcatttgggaagttcagctctaaatcttgggttttcttgcttgtctttcttttcagaggcatgaaagtcattgagagtcgagcccaaaaagatgaagaaaaaatggaaattcaggagatccaactgaaagaggccaagcacattgctgaagatgccgaccgcaaatatgaagaggtcagatcctggggcccaaagccttgtggacacccagcagtggccttcaggaagccagggagcaatgtacagtcttgattcccgagtgaggccatctgctttgttggcagaaatgggtggttttgagaagcagagttcctttgtgtccagaaaacggttctaattttaatcctgctaggggatcccaggctttatcaggaagccaatcagtagcactgcgaagaaggaccaaaactcctctcccccagccacaaagacccggacaaaagatctttggccggaagggag

SEQ ID NO: 79909 - DNA, 3135 bp, Homo sapiens
cttgtctcacgttagtgtctcttgtattcttccactgcagtaaggaggtagatgcacagatcagccatcaaattgatggagttcttaggtttactttgttttcctggcagcccccacctttttagtacatgtctcatcctactgctgtttttgagattgtgaatgtgtattttatccctccttccacattttggtctggctgccggttcacctaggtcagacttccaattgagactgcccaatcacagctaaccattctgagtcaaagcagaagcctctgatctcctctctgctggcactcctaatagagagttgcttctctctggtctaccagaaagaggatcatattgtttgtagacaaaacccttagggcctgatgggatctgatctctacccccatgcccttctgttacacaaagcttgcaagacccatggtgtgtgtgttgtgtcttcctgctgcaggtggcccgtaagctggtcatcattgagagcgacctggaacgtgcagaggagcgggctgagctctcagaagggtaagcgggcccggcgccaggaggccacgaatggggtgctgcagagcagtgactaaacagcatgaccttctggcagctgcacattacctgtttcagctccgggctccttttgtgctcatttgatgtggatgagccacgagtatggaacatggaggactcgtgtggggtgtcttatgtatgaatgcgtgtatcactgcatgccttacctgcacactgattttgtgaatggccttgtgcatttcctgtgtccactaacagccaagtccgacagctggaagaacaattaagaataatggatcagaccttgaaagcattaatggctgcagaggataaggtactgatggctcgtgtggtttttaggtttaactgcaacccagacatctttcagcttccaatgcctcctggttcgtttggtataacgactgcaccttcacttcaccctctgctatttatatcttgccttaagtgctttcccttggtcctttatgctcctttgttttcccttcataaatgctctttgggcagccaaaaaaggagccaaattatcgcacttcaaagttgttggatttggtcaccctgccttctgctgttgcgaggttggggggcagtgttcctggaaaacctaaacattttaatacctgatgatttggctactttaaggcagcccttcgtctctaggactcagttttcattttttcccatccctctcctttttctctcctccttcctttggcttgtctcccaccctttctgcctctgatcgaaaacattagcaaatgtgccgagcttgaagaagaattgaaaactgtgacgaacaacttgaagtcactggaggctcaggctgagaaggtaggccaggaggatggtgtgggggaaaggcatcttttaagagctgctcaaaagaggccctgccagaaagcaacacttacagtagacattttagtaaaatggcaatattgtgaggtgatttttggagagttactagataacaaattcttttttttaactagagaatttattttatgttagggatatgaggcatcaatttaatttaaaccaagtgccaagtggataagttatcttgttgttatcccatgtaaaacaataggcaagaaagcagagaatgtattgcagtgtgccatttgatatcagaggttccattacctcctaagagatccttaacatctgttggctgagctggcgagttctttgcatgagaagccatgagtagattgagctgcagcctgacatctggaatgctctttctaattacagtactcgcagaaggaagacagatatgaggaagagatcaaggtcctttccgacaagctgaaggaggtaatatgagagttgtggatgaagccaactggattttaaatgagtttgttttcatggaaccggtcagggccttttcattttaaagttccaatgatccaagtcaggaatattcaaaggtcgccttggagtttatgtactgtgctaactgccatttctcacagaggtgactgaaactgacaagtagtttctgatccattttataggtgatgtgcttcattttcatcctctagttttccctatgtttgtagctacaggaaacataaaacttcccaactttaactcaaataaatcattacaggctgagactcgggctgagtttgcggagaggtcagtaactaaattggagaaaagcattgatgacttagaaggtaagatcttaagtagtgtttttagtttaatccttatggttgaataccaacctggcaaaacaattttccaattcaagggcatccacattgatacgctcctttgcacttgcacattcttcctgtgtgtcctctggggtttttctctgtggctcttgaactcatgaacctaagtcttctgctcacgaggtgactagttagccaccagccatagtggcaaatgccatccagcttgacttcatgctcattacaagtgtggcaggtttatttttcactgtgagtgaggtgcttattggtgagaatgactctagtatattttatatctttagtgttacttcctaattaaattgggaatgatgtggtgattgtggtcttgtttttagaagaacccatcttcttccaagtatgaattcaaagtaaggatttaggggttattttaagtcatatattatcttaacaaaatactttatatcctgaaggaggagggaaaaattatacttaagcatttcttccctaaggcacttaggttttattttagtaataaccactctatctcacagatatcctaaatgttgagctttgaagcttgtgaaggattagctgtgaacaagaaagaaaaaagacaaatatctacatcacagaagggattagagaaggaactagtgtttggtgcagataataaccaaaatagtggagaagagagaatgacaaatggttgcaaaatgatctgccaaagtgcagcaaagtatgaaacctgcagcattacaaaaactaagttgcagacttgccatataaagtgtggcgcccattgcttttcaagcctcctggaccagtaataggcagcttgagtgggaagaccacaggagtagcttaaatggcactaagaaatcgctatccca

SEQ ID NO: 79910 - DNA, 2966 bp, Homo sapiens
cttgtctgtgtttcaagtgctctcatctattggtttggtttcctttcttttttttttttttctcattgtgccactttttttttcctcccacctttttatcttcacgcagataagtttctttgcttcacttctcccaagactccctcgtcgagctggatgtcccacctctctgagctctgcatttgtctattctccagctgaccctggttctctctcttagcatcctgccttagagccaggcacacactgtgctttctattgtacagaagctcttcgtttcagtgtcaaataaacactgtgtaagctatttctgtttgctattctttttacttcttatttattgacattttagtttcaacattgaataaaactacaaagctgcttcacacatatgagggttagtgtttggctgctgctttttctttttaaatactgaacactatacagaattatatcaggagtttctaaagcagtagttccttgttgaacttcaaaaaaatacccaggcctgcattccctctcagagttctgattttcaaaggttagaatgaggtctggacatctgggggggttttgggggaattgtgatggctctgctttgcagtctgggtcacacaggggacattgcttgttgagagttgaaaggtctggcttgatcagtgtcttcctttgctggaggtttagctcgggatgtagtgacccctctgtgttgattatttcggtggccttacttgggaggacctggctaactaatgaaaggctcatgatgaatggttctgtagctgtcccatattactaggaagttatacattgagaagggtgaaaaagaacttggattcaaacaatgtaagttttggttattgtcgatcatccttttatagcacaaagaaaagttcaagcttttttgaagtatattcatgactcagccacctttattttgatcatgaaaatgacatcttaggttttctaaatatgattactctgtttagtcgtgatttgttttgtgctttttagcacatactctttgggagggattgtacataatctttgtgttcaatggctgtgttttcatttgtggacatttttaaaatatagcaatgaaagtttctttttttttttcccaaaaagatagttggtggaaattgttcagaagacaattgtatttcatttgggcttctgttttatttcacaaacagcaattaagtgatttttttaaaaaaatacattgcaaaaaatagaactttaactaatatggactttagtgttataattcccaacatttctccttcctcaacaatctagctatatatttctcctgttttttttttaacatggatgatctgcatgttttgtatatagtttttttagcccgagagggctgatataccaccatactcaaataaatttggacaaactcagaagatagtgtcattctcactctacagagacttcaaagcatagaggaaatacttttttttaaagaaagctgtgaattaaagtattttagtcatagtatggtggaattttagaatctggacaatgtctctcccttgagtttataaagacttccatgatttcatgcttttcttttcttaaggctccttgggcctgcttctgactatgattccttcctcattcttttttaaattcagaataagagaagtgtacccttctctgagtaaatcctgcttcctgatgtagacaaaatgccaagtctgaaagttctgctgagcagatgttcatgtaattctggaggcacatctgtgttttggaaatccttccagagactttcgcactttctataagtacactctacaaggggaagtggggcactaatggactgggagggcaggtcaggagtagcccaaggtatgcatgtgcaagaggaaaacttgataaactcaagtttatcaagaaattgttgatttcttgttcaactgttgatttgaaccaggcttctggttcaaagggccaggccatagctacagctgctctggtgggccaaaccaaaagcatcactgagtttgggcacttgaagtttcagacagctgggagtctccatagaaccggaagggaaaacacttccaaggatatgagcatgtcttgtccctgcctttgggccacccatgcacaccagctccacagcagctgaagcagagcagatccagaggaggctgtcggagggaccactgtccttcctgctgaattcatactgaccctctggattctccagattttctccaaagttcttccattctagcctggccaaacatttgggctcagcaaactgagacaagctccccacccatggcgacacttcctatgtccatagtgtgaatgtagtaatgggatatatgtcttggaacccccaagcatatgtcacgtgcaaaacaccgtgggaagcagtgggggtgtggtaaagagatgggctggaaaggctctttgtcctcaataagctgggcatctgatggggagatagaggagtgaagcgagtccgaactaataggcatgtgtatttggaggcaacaaggaagagagaaccattctgactgggagctccctggaggaggtagcggacgtttgactggggtttggcatattcaaaaaatgtggatgagcaaagaggacagagcagcagatattccaagcgagaaaacataacgagcatagcatcctcccatgtcctaccatttataagagaatgttaatgtgagaactgctcagtctcctgacagacccgggggctgcaggcacattttccctaggggtaggtctgttagcttttcaagatcatgaagtatttttaggtccaagttgtcaccagcattcaaagccaccgtgcatcctccagctgttcccagtgcataccgggctcttgcttgtcatagcttggatgtcccctggatcatcagatacagactgactcctgcacttgttttcccccgtaagcagatcacgtgtcagtg

SEQ ID NO: 79911 - DNA, 1453 bp, Homo sapiens
actagggaggctgaggcaggagattggcatgaacccgggaggtggagcttgcagtgagctgagatcacgccactgcactccacgctgggggacagagcgagactaagtctcaaaaaacaaaaaaagcaagcagataaattctaaatcagtgttgagtggtgacaagtgcttgttcttttgctgtttgaatggataacactatcaaagctagacaggagtcagaatgtgtaccctgtattgtggtgactgggggaaggacagagacttaattccaaatttcaaaaaatttcagtgcagcaaaagcagtaacccccagttggtcctacctgaggggaaagcctgccctgtgaacggagaggaaaggggttctggaagaggtgggcagcactgggcaggttgatgtttcacttaagttcaacactgagccctagcaaggggtggatgtcacgctgggctcgcctccagccaggcctgcattcccaaatctattgccagaaaccatgtatggctcagctcacaaagtggtttagtgaggtataagaggaacattcactcttcttcctcctcttatcctgttgctcctcctcccctcctttcctcaccaagagagaaattctgacacttcctaagtctaccaagctttttagggtctacccttcctggatacaggacaggtgactatggggtaagagtaaactgctcagcaagtgaccagttgctgtcctgcttgaggtctctttgtgttctctattaactgcctctcaccaagtctgctaacctgtcttccttctgcctcttttctgctaacctgcttgctgacctgtacagatcaactctaccagcaacttgagcaaaatcgccgcctcactaatgaactaaagctggccctgaatgaggattaaacttaagagtgaaaaaacttgggctgaattctaggcgtggagcccatgtgcagaaaatctaagactgtcctaccttcaactaatagagttgaaaacagttgctttctgcagaaatgcaaatgcaaggaattggctgaaaggctggccttgcctgcttgtttctctatatggctggaataattacgttctctttaatcacaaaacagcttttatggtagaatacttatatcaattcagcactgctccttgaaatagcaggtcctcttgtttgaactgataaataatgaggagcccccccaaaaaatgttttctatttcctgacagccatgagtcctactttaagtatgtatatatatatatatatgtgtgtgtgtgtgtgtgtgtatatattcctatcagatactcatattcctaacttctaaatatctggtatagtgtttgaaatatgattaaatgtacctatgcttgggcaaaatagcttttgaaaacaggaactcatgccagaagcccctggttgtctgaaaggtatgctttactcagtctaatggtgc

SEQ ID NO: 79912 - DNA, 1049 bp, Homo sapiens
cttagtatgcatcagatgctggatcagactttactggagttaaacaacatgtgaaaacctccttagctgcgaccacattctttcgttttgttttgttttgtttttaaacacctgcttaccccttaaatgcaatttatttacttttaccactgtcacagaaacatccacaagataccagctaggtcagggggtggggaaaacacatacaaaaaggcaagcccatgtcagggcgatcctggttcaaatgtgccatttcccgggttgatgctgccacactttgtagagagtttagcaacacagtgtgcttagtcagcgtaggaatcctcactaaagcagaagaagttccattcaaagtgccaatgatagagtcaacaggaaggttaatgttggaaacacaatcaggtgtggattggtgctactttgaacaaaaggtccccctgtggtcttttgttcaacattgtacaatgtagaactctgtccaacactaatttattttgtcttgagttttactacaagatgagactatggatcccgcatgcctgaattcactaaagccaagggtctgtaagccacgctgctcttccgagacttccattcctttctgattggcacacgtgcagctcatgacaatctgtaggataacaatcagtgtggatttccactcttttcagtccttcatgttaaagatttagacaccacatacaactggtaaaggacgttttcttgagagttttaactatatgtaaacattgtataatgatatggaataaaatgcacattgtaggacattttctaaatttggtggtcctgtcatttgtatgttcttaatttgtgaacttttgaacgtgtgactgacctgccttcccccacaaataggttctcaaaacaatatcccacagtccaggggaaactgggtttcatgtgttaccttctcagaaacactaaaggcagcattattttggtctgttaaagttataaccaagcaggagagaccctttccaaatgttgttttcaatgttattggtgtatgcctgcacatacatgtagga

SEQ ID NO: 79913 - DNA, 1052 bp, Homo sapiens
caagattactgatttcccatttaagtggaattcgtcattatgaaaaggacataaaaaaggtgaaagaagagaaagcttataaagccttgaagatgatgaaagagaatgttgcatttgagcaagaaaaagaaggcaaaagtaatgaaaagaatgattttactaaatttaaaacagagcaggagaatgaagccaaatgccggaattcaaaacctggcaagaaaaagaatgattttgaacaaggcgaattatatttgagagaaaagtttgaaaattcaattgaatccctaagattatttaaaaatgatcctttgttcttcaaacctggtgagtgttaatcccttctcttaacaaaatcatcattactgaaatgttaattttcaggaaatccaaaatgataccatccggagtgcattcattgaggttgatgattgtgatacggactagtctggtgcttgcgtttttgtctgtagtttctaacaaagcctagcatccaggcagcttgtttaaattttgcctcattggagactacccagtcatttagaggattctcagtatcaagatgttcatgcaaacttatggagaaatgttggaataatagttctctaaatacaacctggaccaaagtagacatgataaggtattgctgatattttagtatttagttagaatttaaattgctcaacttattttgtgcctttatttcttaaagaaatgagtgttcatcactaattttttgccaaaaatctgctctatacaaataattatctttgttttattttttgatttggtgcctattgaagctacttaatatctaaatttaccatagtttgatatacttatattcatttttcattttaaaagcttttagttgaatagatattttatagatatgactaataagagcaaataagatataattatggattttatcttaaaaataaagttccatgctgggcacagttggctcacgcctataatcccagcacttacagagggaaaagtgggaggatcgcttgagcccaggagtttaagactagtctgggcaacaaagc

SEQ ID NO: 79914 - DNA, 1049 bp, Homo sapiens
accaaatgataactttctccatatgcacagggcaaatatgtcatgtgtaatattaaccaatacatttttgcaggtattaaaggtttgatacactcagcatggacaagccataccaatagaaaaaaaccactttctatgctttaattcaaaaggtaattagactatcttacttagttatctgtgtgtcattaggacctgaatcatactgaaaattagtggttagtttatagtttctgagaatgtatgatcattacattgaaatacaatctctctcatgtatacatttttctatcatcatgtgtgaagccagtgactatgaaatttttcatgatcatttcttatttccttttagattttatgtttacaataaaaagaaacgtcttgtcaacacaccttacgtggataactcctataaatgggctggtggtggatttctgtctacagtgggtgaccttctgaaatttgggaatgcaatgctttatggttaccaagttgggctgtttaagaactcaaatgaaaatcttttacctggatacctcaaaccagaaacaatggttatgatgtggaccccagtccctaacacagagatgtcttgggataaagagggtaaatatgcaatggcgtggggtgttgtggaaaggaaacaaacgtatggttcgtgtagaaagcaacggcattatgcttcacatactggaggggcagtgggtgccagtagtgtcctgctggtccttcctgaagaactggatacagagactataaataacaaggttcccccaagaggaatcattgtttctatcatatgtaacatgcaatctgttggcctcaatagcaccgctttgaagattgcccttgaatttgataaagacagatcagactgataaccttaacaccataggtgcaaaatgagttgttctgaggtttttttgaaacattaaagttccaaaacatgacatttttaagaataaatttgaaatagagtataactgaatgcagagaattatgtacctctaattgcttaattttgtaatggtcttttattgtagaattgg

SEQ ID NO: 79915 - DNA, 1058 bp, Homo sapiens
tattgctaagtatacttgggagatttttgaaacaaagtatgtcatgtcatgattttggaatttagtgcccatatgctgacagatggtttaatgggtctatctgttctagagttttcctaataggtctgaaaatacctctaatcaaaattatttacttgagaaaagtattcagaatagttcctaaaaattaagagtatatcttctgacagcttgcttgaaacagtcttcactgttgaattcaggctcatggtcttaagtagacttcattatagcatttgagaaacaggagtgacacttatagtcataccagagtaaactcagatatgatagatgtattatagcaaatttctggtataaaaggataaataatctgtatatgagtattaatccaatattcttaaaacttcagtattttacttaaaagtactttttgtcattaaaattatagcaaaggtagaatgcacttgtttaatatactctcatgattcttttgcagggtgttcatttagaagaaagcaacactaatgattcaaacagcttcctgaattttaattttgtgttgtctcacagaaagccttatcataaattccataattctaattaatttaccaagataatgtaattacatttggttttgtaaggtatacagcagtaatctcctattttggtgtcagtttttcaataaagttttgattatgggcaaatcccctctttttctttttttaaaatatatttgagtatgccatacatttatatatatggtgtatatgaatttggtttaaacattttaaaatttattctgattagtttgtgtctttttttttttttttgagagagagagtcctgctctgtcactcaagctggagtgcagtggtgcgatctcggctcactgcaacctccgcctcccaggtccaagcaattctcttgccttgtcctcccaagtagctgggattataggcacacaccaccatgcctggctaatttgtgtctcattttcaagagtagaaaccctaaatattttattttcattccttttccaaattgctatgaatgggatt

SEQ ID NO: 79916 - DNA, 2788 bp, Homo sapiens
cgagcctctttcataatctctctggcacgtattaatggttaataatactgtattttttaatacacaaaagaagagaatagtggcattgccccgtgtgcccacccccagagctaaccgagagcggccgggccagggggccgggggctgagcggcccgccgggttccggggtggcgccggccccggtggccgcgggcgctccctcgccatggcctaagcccgaggccgctccccagccagattctggcctcaggcactgcagagcccgcggcgctcgccaacaagcccgttagacccacgggacttggcaccctggaacgctcaccatccccgggtcttccctgcgccctggacccgagtaccctgctgcggcgtccccctaccaccgagaggagggcctagagcagacaagcccgccccgccgctcctcccagcagcttctatcccggaagttgatgccgagcgcagatcgcttgcagcttgctagctgtgtgggctgggaggtctggtagggctgagcttgcaagaggatcaacatgcctgtgagttgtttacatcgggctccgggtttgttttgggcttctttaccgagagtcatatgggacggatgagtccggctgcctctcgggcctgtagtgtccgagagtggcgaggcggctcaggttgcgcagcgtcttcgcgcgtggcgggcatgtagtgacttgcccggtcaccgcggcgcggctggccctgcaggggcgtgggctgcaattcagaggcggtggctgggaggggaacagttctctgtgtagcttatgagcggtcttggtctttgaggatgcccctgaggttgtgatctttgggtcttttggctttcccagtgattggtgtttctcgccccctctgccttctttcggaagcgatttcctacttgttttccttttttaaaaactgtcctcgttgttgccttatatattaattccgtcaaggacggtcgctcagcaagaattcctgtcagatcagctgttgagccacaggagcaaaaatcacccaggcgctgacgttgtctggtctacttcagcagtttctactctaagcgagtccacagtcggggtcactttctttgcttagcacctcgacttcgcgcagttttcatcgaagacagttcattacgcagttgagtaaagaaggacaaagtttgccttaccatatgtttcctgatcgtgcgaaagcccttttctagggacttggagaacacaagtattatgaaaagtactgatgaaagttattaacaggtttcgaaaaataactttactatctgacgtgttgcttctgccgaggatgaccgttattcctgtttttgcatgtatatttcacgtatggttaaatgtgccagcgttgtggtttaaaactaatagtaataatatgcttctttgttcagttggctagagatttactacatccgtccttggaagaggaaaagaaaaaacataaaaagaaacgcctagtacaaagtccaaattcttactttatggatgtaaaatgtccaggtaaaatttgaaatcttaattcctttactaaagaaaatttctgtagggattgctagtgtggtgtgtatagttaagatacattagaaccctctgttgagtagaagtgggattacagaattggaaatgtcagggacattttcataataaatgtactgaaaccattgtagaaacatttcggggtaagtgaaaacaggcattcaaaggagatatgccatttgacttagcaagtctttaagctcttcagacgatgagttttctgtttcatgatacaaagaaaagtctgttgattcttcagtctaaagctgtgctgcccaatacaatggccattagctgaatgtggctactgagcacttgtggataatcaaaatgtggatactcaaaatagagatgttctttaattgtaaaatactcactggattttgacgatgtagcacagaaaaaaaatacattgattacatgttgaaatgatattttggaaatattaagtttaatgaaatatattattgattttacctgtttttaaaaaattttgtgtcgctgctagaaaagtttatgttacacatgtggcttgctgtttcatagcactgaagttactgatttttttacatattaccagaaatgtcgaacaggtgctgttttcctctgcttttcatttttaacattgcctttttttttttttaggttgctacaagatcaccacggttttcagccatgctcagacagtggttctttgtgtaggttgttcaacagtgttgtgccagcctacaggaggaaaggccagactcacagaaggtatatcatttggcattctccaacccagtgatgagattgatgattataaatgtctctatcttcactgaaaagtttaaagaaatcttaatgattaccaaaataacttatctttcattgtgtgctttcagtaaagaatggcctgttcaaatggatatatttatactcttgaccttgcagtgaactccattgacttatttttcttagtttagaacacatttattcacttagtttgcttaacttggaataaattaagtcagaatagaagcaaaagaataactacatgttataggacatgcagatttatttatttatttatttattattttttttttttattaggagtctcgctctgtcacccaggctggagtgcagtggcgccatctcagctcactgcaacttctgcctccccggttcaagtgattctcttgcctctgcctcccaagtagctgggaccacaggcgcgtgccac

SEQ ID NO: 79917 - DNA, 1038 bp, Homo sapiens
aagttttaatgtgaagtattggataatctattaaaagttgaattgtaaattcgtttcttatgcaatatttgtttatctggaatggatattgcagcatactctaatctccttatgcacacatacatacgaatacacaaaatccattacaaaaaaaagagtttgtgttgggagatgtcagtgactaacccttctgtaatttgtttattgcttatgaatttggatgtgatagttttttatggttttcaacaaggaatcgtttactttttctcttctaaatatctctgagtaaaatcttgatacagcatggaaaacaattctttattgagagtcaactgttccccttttggaatgactccaaccactttcttgtttcactgtctgttagcacctcacccataccaagatttagagagaggggattgggttgggaagagaaaaatgaaaacatttcccttcccctatctctttggctacttggttcagtctctttttgcttttgttagcaattggagtaaactattggataaagagttagaaatgtctctgtaaaatagtttgagaattaatagtgacctttgacttcgatttttctcttacattgtttagaactagataatttttaaaaaattggtgcctctctctgccatagccagtaatgaacacagaccagggtgttgtccacaaacaaatttgagttgttgcattccctattttgtctacatcattttgaaaatttccaaccttatagaaggatgaaaaatttgtgggaaaagtgaaataatttctttaacatgcacaaaattccattataattaagttgaaaaacatgcatatataaatatatataatatcatcagagttatgtctttattttggcccttcagcgttcaactttgggttttttttgtttgttttttgtttctttgtgggctttttttgagactttgtcatcagtctggaattagtggcctcctgtgcactaccacgcccagccaatttttgtattttttgtagaaacttggcttcacctgttgccca

SEQ ID NO: 79918 - DNA, 1035 bp, Homo sapiens
atcagcaaggtctttatgagctttattttgtgctgacgtcctgtctcatcctgtgacttagaatgccttagctatctgggaatgcagcccagtgggtttcagccttattttacccagctcctgtttaagatggagttgctctggttcacacgcctctgacatttgcatccactgttgtatgtatttcctgacctaatgacaatgaggaccaaactgagaacaccaaaactgtgaccactagatacagaaatcctgccccaggcttgcctgaggacatctttgaaataacactgtgcctgtaaagttatctgtgagtgaatagttctgtttttgtttttcgtgttagtaacttagggttactgttagggtgctgcaaacgtacttttggatcaggcagaaacggggtaaatgaagttaacattgtaaaatactaacttttcaattgcagaggttaatttacaagttgatgttcaattttgttttatttagttttggttgttttcctcaaccgttcatgtatggaaacattctggctctgtccacccaggaacccagaattcttcaccctctgaacccctggatttgtttttaaaataatctgtgcatacctgctgtttgttttgttcttaacttcattgtattatggggctttataaacagaaagatgagttaaaaatataacaaaacaaattgttcaccaaggctgcttttgccctttgtctgtgtgggaattcaccatgatcctcagctgagcagcttttaaaatccagtgagcaccctcttttcttttcttttttctcttttcctttcctttcctttcttttctttcttttctctttcctttcctttcttttcttccttttctctttccttttcttcctttcctttctcttcttccttttctctttccttttcttcctttcctttctctttcacagggtctcactttgtcacccacgctggagcgtagtcacccaggttggagacacaaacatggctcactgcagcttcgacctcctaggctcaagcaattct

SEQ ID NO: 79919 - DNA, 2593 bp, Homo sapiens
ggcctcagttttcttagccacacagacaggactgaactaaatgatctctaaagtacttctcaagtctataattctatgattctctttcatacttatttccctgcctccttatgttataagcaaccatttagcataagagtcaattcaggaaagcaaaatctgttagagagagtttctaaattcaaaatgaaaatgcctttgagtcattcccttgggaatgttttcttacagtttatatttcctactgtattgactagataaatattaataaggaaagtgggactactttaaaaccatcaaaaaatgagtgttgaggtatatttgagcaacatggaaatacctttggaatcttgccttctaaactcagatgttggattgtgtttccagctgggtgggctgcatgcctcctggtgggtcatggactgctcatgagtcaggatgactcagggtcatcattttgaacatgaattattatattatgtgctgccaaaaaatgatgttctcaaaaagacttttgaaatacaaaaagtcttttaaaaaaaaattgtgggtacatagtagatgtatatatttatgggttacatgagatattttgatacaggcatgcaatgagtaataataatcacatcagggtaaatggagtatccatcacctcaagcatttttatcctttgtgttacaaacagtccaattatacttgtagttattttaaaatgtataattaaattatttttgattatagtcacctattgtcctagcaaatactaggtcttattctaactattttttgtacccattaaccattaccactttcccctaccccccactacccttcccagcctaaccattcttctactctctatctccatgaattcaatcattttaatttttagctcccacaaataaattagaacatgcgaagtttgtctttctgtacctggcttatttcacttaatataatgacctccagttccatccatgttgatgcaaatgacaggatctcattctttttatggctgaatagtactccattgtgtatatgtaccacattttctttgtccattcatctgttgatggatgcttagattgcttccaaatcttggctattgtgaatagtgctgcaataaacatgggagtgcagttatttctttgacatactcatttccttccttttggagcaggattgctgggtcatatgatagctctatatttgattttgtgaggagacttcaaactgttctccatagtggctgtactaatttgcattcccacccacagtgtgcaagggttcccttttctccacatccctgccagtgtttgttattgcctatcttttggataaaagccgttttaaatggggtgagatgatatctcattgtagttttcatttgcatttctctgatgatcactgatgttgaacaccttttcatgtatctgtttgccatttgtatgtcttttgaaaaatgtctgcttaggtcttctgctcattttaaaatcagattataagattttttcctgtagagctgtttgagctccttatatattctgattattaatagcttgtcagatgggtagtttgcaaatattttttcccattctgtgtgttgtctcttcactttgctcattgtttcctttgctgtacagaagctttttaacttgatgtgatcctgtttgttcatttttgcattggttgactgtgcttgcagggtattactgtagaaatatttgcccaatccaatgtcctggagagtttccccaatgttttcttttagtagtttcatagtttgaagtcttaggtttaagtctttaatccattttgatttgatttttgtatatggcaagaggtgggggtctagtttcattcttcggcatacagatacccagttttcccagcaccatttattgaagagactgtcctttcccccaatgtatgtacttggcacctttgtcaaaatgagttcactgtagatatatagatttatctctgggttctctgttctgttccactggtatatgtgtctatttttatgctagtaccatgccattttggttaccatagctctgtagtataatttaaacaaagggctttttgacctgaaggataatgtccttcaaaaactatgttttttgagattgtatagtccttttaaattaaaaaaaaaaaaaagttgctcccttactgccaggatgacctctggttcttgctgctgttggtgtgatagccccctccttctttctagtctccagtcatctggggctaggggataagccaagtctttggagttgtgggctggaggactctcctagcagctgtggtcacagttcagcacagagatgttgtggcagctacttgggctgctcattgtcccctttttctttcttattttctagttcttagctgaacactacatgaaattgccttcagagaagtactacagtttctcattaaatgtaataacattcatgacaggatagtagtgcagctctttcatatagatatgagtatacagtttgtcctttcatatagctatgaatataaaattttattaatgagataggtttgagtattatatagaggatatataataggtata

SEQ ID NO: 79920 - DNA, 1004 bp, Homo sapiens
aagatgcttgtctccttcaagagtatgagctgggccgggtgcagtggctcacgcctgtaatgccagcacgttgggaggccgaggcgggtagatcacaaggtcaggagtttgagaccagcctggttaatatggtgaaaccccatctctattaaaaatacaaaaattagcctggcgtggtggtgggcttctgtagtcccagctacttgggaggctgaggcaggagaatcgcttgaacccaggaggcagaggttgcagtgagccaggattgtgccactggaccccagcctgggtgacagagcgagactccatctcaaaaacaaacaaacaaataaataaatacataaagaatatgagctgtttagtggcacagctggggccatagttcctctgagcctgtttcctcatctgcagaacttggatgctggtaacacccccagccagtagcccaccctaatgggctgtggtagacatcacgtgagtgcagtgtgaaagtattttgtaagatatatgtctatgttaaggtgtttattgctttttaacttatgatattcccttgggccttcatcttttattaggatttggtatatactagatttctagtatatttccacaaatgcctctttctctcctgcaattaaattgtcttagtagcacagggaatgaattagttctggctggaagtgggaaatttgagaatattgattttctcaagtatcaaggaaatttaacttcctttataggattgcttctataaatgaaatcagaaactcttatatttttcagaatgcattttaatggtatgccatcagctaaaaagcaaaaatatatgaaagtttatatagttttgacatgttgtttatgtttaaaagtctttgaaaacgttgtcaagatttatgtgttgaactccaggtccccatgaaatcatgggctccatagctgaacaagttcttgaggagatctattttattgtgctctactgagcagaatgtacacagtaataagtc

SEQ ID NO: 79921 - DNA, 2621 bp, Homo sapiens
tttgcttcacaaaggctactatcatgctggatagataagaacaggagatggcagtggaaagggattgcttgttaccacagagaattctcttcaaattaagatatgtcattagaatgcttggaccagtcaatcttttgtacttatttgaaaatataggaacaatttagcagctgcaaatatgcccaagctatttttaatagatatactaaacttattgttgacaaatttcagcctccttaatttttttttttttggtaattacctataggcttaaaagtcattcgttgctgttctagtataattagtagttccgtgattgaaagtttattgtaattctactatcttcaaattagatacattttcaaaaggaaaagataattttttagaaacatcttaatattcactatttcctgaaaaaatccaagcagttaacgctttctggatggtaacaaagtaccttctaaaagataagtgctatgacaccatgtatgaatgtaattctcttagtaatttacctctgactatttggtgtcttaacgctttggtttatataatctcaggggttgtctgcaaaccaaaactgacatattctgtggttagcttttattacttttttttttaacagaatgctttgctttggttatatttcttctttcttcttttgtcttatatggattaataactagtctccatgaacttcacttgaaagagcctgtaaaagttagatgagtctaaaagtgctctttgaagtagcagcaaattgggagtatatgctctgttatatagaaataaattgtccttgctattttcttacatttagctttgctagattgtatatacattgagctaagaccttaggaaattcactttctgcatgataaaatgacccaataaatattccactttgcttaataatgtacatacagtgcattattttttctatttgtagatgaatttaatgacagataattgtctgttccccgctgaaactgaagaaatctagtttttttgtgaacatttttgtggtcttatggataaggtacatgaagatttttgcagcagtattagtggttcagtggctgcactttattaatcagtgtgttaatttttgacagtgattggactagaccttttcaaatagagtctgagggtatcagacagtgaaaatgtgctgtaactaagtagcatgtaaatcagttgattgtaaaacgtttcgctgggaacttattttagctatattttacttcagacagattatgatacaataatctacctgtgcatcagttagtaggtgctgcagggtttcttactatttacagaaacattttgtgcagtctttgttataaattttcagaagactatactctttactttgaaggtctattttttaattatacctcatttagctaactagtattctaatacctggtagaaaaacagtgagccagcctttaagcatctaacaaaatttagactctttgttttgttttgaactgaagacatcattgggaaaggtaggaaatattagtttaggatagagcatacatgtcatatccagtagcataaaaaaagtattatctccctgtctccattaataaatttagctgtgcaatataggtgcgtttttgcagaagtttctagtaagagattataactccattttacaggttctgaatgctcagagtctatattaaggcttataaagtttttcctgtgatcagtaagtgacacatttaagcagacattcttttcaagttcatgacttagattcctttacaaatttagttctcaatctttaaaaaccacatttcattatgttggttaattattataaattttaagcactcatttctgcaatcaggtttctcagaattttttttttttaaacagaagagacattcctttttccttgttacatccaaggggggcacaggggtgggtggaaaggaatgtctaaaaatgaaatcccttgatatagagggacctagacggacaggatatgctaaaataatttcaaattctagcacaattttagagtagaataagtcatttttttagactaataaaattaatggctgtcatgttcactctgaaaaaaatctaaatgactgaaatgtacagaaataaaaattagcaaacaattattctagggatattttcagattttacttcatttcttgaaatgcgtgtgccatatgcaattgcatttcttgtgccaagaaactaatagaacttatttcactttacctttttttaaaatgtgaatttagttattatagttcaattttatggccttacagatggcttttattttgtttgcagctgacactgcagttcctttcatgcaaaataccataaactgtttgatgaaaatcatgcccctaatggaaactctctagtttttccatataactatcctactgtacatgtttaaacatattttatttttgctccaatggcttaatgtgaaaagctcctgcagataagtggacctgtcatgtggttaatcttgtttaagccaattcattaactgtgtactgatactgatgctatgttttttttaaatggattttattccaggtgaactttttttttataataatgttcgtctaaaataaaaa

SEQ ID NO: 79922 - DNA, 3038 bp, Homo sapiens
gaaattgttcccagttgatgtcttttggggagctggtggcatgaaatgcaaatgacctatacattaaagtgatgtctcagtgaataccatacatgcagtagaacattcagaagagaggagcagcaatcctgaggggctgggggagtgacagtggcaggacggatgggcgggtttgacagattgtggtgggaagaagaatgatcatgtttaaagctaacatagccagtgttttgggctagccacacatcattccagagaccaaaaccttactcatgaactagacctttatcgatatcagtgaacccccatgtttaaaatattagaatgtttagagataaaatagagataatagagataaaagaagaggagggcttctatcaatgctgtaaacagtctgataagcgactgtggttattcccctaaagtttacttcagcactaacactagtgcttccgctggagtttgcagttttccagctttatacaggattttcctttgactggaagagtcaaggatatagagactcaacagtgacatttattgtacaacatcaaggggaataggatactcatcaaactgggattattcttatcaaaacatggtcttctttgaataagaaaaatacatagttggttattatggacttaaaactgtgttaaatggatattctgataaaatatttgctgctctgtagagtgtggaaagtctgagaatattagctttactcatcttgagctttgaggatgttctctgtacgccgatggtttcatattaactaaaaaagctgggtattgtaaaatctcatttataaaaactcagatgagaagaaaattttctttgatggtgagactgttgtcttagttcaggaaattatttaataatcctttgttacctgtgaatgaaggaactttgtaattctgatttatcgtaaaacatgagcctttccagagtcagcttagacactgttgtcgcaaatagccatgctttgccttatgccaaggaggcccagagggagggcctagtcttcctctgttgctgtacatatattgaaatgcttttttttttttattttgcatttgttatctataatgagctttctgagccctgatattatgtgagacaaacaggagttattgatgttatacactcccttccattcaggattttctgcttggagggaaatatgttgaccttagagaattgtgaatattgttgcaattcttgaatatattaccatgtgaataatagagactgtgttgctctctagtataagctatatttatttttgattcatttgaattactagttataactggagaaattttgttacctctatcctggcttgcctgactggctgtataatagcagcagcctcttttagagcatcttaatgaaaacatggatgaaaggaattaatgatgatatctgcagactgcgtagaaaatggcttttgttcccagcgttaacattttcttctcaatcacatttcaatgtttgtggagagtggcagattcacaccagaaacactaggtgttcatatccatagcatggatgcagaataagcagttgggagagaagcttcttcctacctggtactcctcccattcacctcagcccagccccagacaggcgttagcattcagtgtgggccctcaggcagccctgaagcctggctgggtcatcagatgggggcagcctgtgacgggcaccagcggcctgattccagggaagagttcctggagggtgttggctgtttttgttagctcagtttttttctgggctccaccattcctaactccaggtagacaagatagatgtcacacacaacaattttaaagtattttgcttagtgcattttgtttatgattgcagtgtttgtttcttatttaataggctttttacttcattctattaaattttagtgtttagaagaggcgggtactgtcactgtgtaaaatatgtaatattttatatgttataccatgtcatatatacttgcaatatcagaccttgcattcaatatacaatgcaattgactctttgcagacctgcatttttcagtgaacaataaaaagattgtctggcactcctcatttcctgtgtttcctgttctgtggaatggtgtatccttcagtatgttactaccgtgttttgtctccttatgaaacttggatgtacattctgttgtttatgactgatcagttcagagacttttttcaaagagaaattctttatctgatttaaaactcctaaggcttatttcatatctgtgtgtttaggagtagtttggttcagagcatttccttgaggtatcttaaaccaagccgggggaatcctcaaagatcctggaagcttgctttgcaaaatctcctaattgtaaaatggtgaatttaaagaatgtttgtataatagtggctaaggattggagtccggtgaagaggagagtacaatttagcttttacctggtgattctgagtagcctatagagtccttttctctttctttcccttggtgaggagacagtgcagctaaagggttgagcttggcccttgccatcagacaggatacataggggattatgatacgatactcaaaaccatttgatgcttgttcactctggcttgaaatgaggctgttgcaggctatgttgatgacgttattggatgaaacgttctcaggtcccaagggctctttgcttctaacctgtaaaccagtggaagaggtgggcattcctcaggtatcagcccagattcctgtacaatttcattggcccttaaacactgaattttggttctaatttaattgttacttgtttggcatttagttggaatggagatttccctatgaccagcctcaacacatgagaaacctctaatggaaagaagtgcatattttactttcacctctttgaaaatgctgaatagaaggaacctctggacaggttgtggtcccagtctcaatagaagaattagatacattgtaaggtgaccataatagattatgagtcccaagcagatcctggctttaatgctcaatta

SEQ ID NO: 79923 - DNA, 1002 bp, Homo sapiens
agttagtatcatctggtaaaatagttaaaaaacaacaaaaaactctgtatctgtttctagcatgtgctgcattgactctattaatcacatttcaaattcaccctacattcctctcctcttcactagcctctctgaaggtgtcctggccagccctggagaagcactggtgtctgcagcacccctcagttcctgtgcctcagcccacaggccactgtgataatggtctgtttagcacttctgtatttattgtaagaatgattataatgaagatacacactgtaactacaagaaattataaatgtttttcacatcaggctgttctttttttttttttggaggcgaggttaaagcattactatttgcaaagcactctgtagctccctgttatggggataggtaactaatcagaataataatgtcactcgcatccacttcttagaacctggctccaaaggaaaataagctgatagactcaatcactttcctgaggatggaggcctatggcatgtgtggctgcaggtcgcgaagctgcttaatggtgctgggaagcctagaggaattaaataaagaccctggaggaggtgggatcggagctgcaccttgaacaaatagctcagatttgaacagatggatggaaaagagggaggtgttcccaaccaaggggacatgatacagggaacaggtcctatgtctctttactcctgagagtattaaacctagtaggtgggcagcccctcttggttgcctgttaccttattttgaattctttttgcaaaacatactatcacccgtccaaataatcttttgtctaaatccagacttcacattctgactggggcaaaaagaggcagtccagtaaaggttataaaataggtaccatcattgtttgccttatttagaaaagcatccaattttcactataatcaccctaagcctgagagaggtgaactgttcaagggtactttggctccagtgggtgacagtacctggcccagctttgga

SEQ ID NO: 79924 - DNA, 1034 bp, Homo sapiens
cgctcgctctcctctctaacaagagttatgtgttctttctgttctagtatcaaaaaaggtgataacaagggagtcatttacaagccagccaccaagatggagactgaggcccacgcttgaggtccccggagctcccgggcacatccaggaaggaccttgctttggaccctacacacttcggctctctggacacttgcgacacctcaaggtgttctctgtagctcaatctgcaaacatgccaggcctcagggatcctctgctgggtgcctccttgccttgggaccatggccaccccagagccatccgatcgatggatgggatgcactctcagaccaagcagcaggaattcaaagctgcttgctgtaactgtgtgagattgtgaagtggtctgaattctggaatcacaaaccaagccatgctggtgggccattaatggttggaaaacactttcatccggggctttgccagagcgtgctttcaagtgtcctggaaattctgctgcttctccaagctttcagacaagaatgtgcactctctgcttaggttttgcttgggaaactcaacttctttcctctggagacggggcatctccctctgatttccttctgctatgacaaaacctttaatctgcaccttacaactcggggacaaatggggacaggaaggatcaagttgtagagagaaaaagaaaacaagagatatacattgtgatatattagggacactttcacagtcctgtcctctggatcacagacactgcacagaccttagggaatggcaggttcaagttccacttcttggtggggatgagaagggagagagagctagagggacaaagagaatgagaagacatggatgatctgggagagtctcactttggaatcagaattggaatcacattctgtttatcaagccataatgtaaggacagaataatacaatattaagtccaaatccaacctcctgtcagtggagcagttatgttttatactctacagattttacaaataatgaggctgttccttgaaaatgtgt

SEQ ID NO: 79925 - DNA, 1095 bp, Homo sapiens
gtcgggagtttgagaccagcctgaccaacatggagaaaccccatctctactaaaaatacaaaattaaccaggcgtgacggtgcgtgcctgtaatcccagctactcaggaggctgaggcaggagaattgcttgaacccaggaggcagaggttgcagtgagccgagatcgcgccactgcactccagcctgggcaacaagagcaatactccaccttgaaaaaaaaaaaaaagaaaaagaaaaagtttcaatttctgggcatcgacctccttttcaatttcgctcatatcaaaacaaaatctgtagtgttttccattactcatctggttccattgtacttacttactgtgttttgttctttgtaggttccaagtggacttattttggtaagtagagattttaaatacttttttgttgaaaagaaaatagaaatggttgtatttaatgagaaaaacagaaacttcatgctctgtggaggtgattttgaagggtcggaagcacagttcttgtattgtagaaagagagtacaaaggcatctcctaagaacacttcaacttgggttgcatactgcactttctccaagcaggcgagcctgctccaggcacaggactgtgagtcatagtgtccaggcttcagattcctgcaaggatttctaccaaacctccaagatttggaggtaacttgccccacctccggactgcaagggtcctgggcaggagagagcctttctcccttgcaggacacatatcctattataaacaaagaagaaagggctcctctctgaaagtttggctgaggtcccagaacttaagctgtcagtatgtctagaattaacttcttgttgccgtgattgtaagctagcgatggatgaagaggtgttggtcagtgcttagtgaaagagggatgcttgtcttaaatgaagcgagaggagcaccagtgtgcttgttgcctgggctttctgtgggacggtctccaagagcatgttagccccatctggcaggcctgccagagaagcagctggaaatcagcttagctggagagttgcagtgaattagaaattggtcattggctggaatggatgtggcaggccagacacctg

SEQ ID NO: 79926 - DNA, 1007 bp, Homo sapiens
tacaggaccagtgacagaccaagggcatgccactgaaggaatccctagacgcacccttctggatgtgagacaggcggatctcacccacgcctgccagcagctcctcggagaactgtgttcctgggtcagccctggcccagaggagcgccggggacccgcagagtgctgctgaagtcaaggctacaactcacctaggatctggggcgccagccctccggtgggcagggcgttctcctcccccaccccctccccgcacgatgacatcaagtgtttggcgttgagttgctccataaaagctgcccggggaagccaggagagcgaagggcggacgtactcgccacggcacccaggctgcgcgcacgcggtcccggtgtgcagctggagagcgagcggccaccgggagcccccggcacagcccgcgcccgccccgcaggagcccgcgaagatgccccggcgcagcctgcacgcggcggccgtgctcctgctggtgatcttaaaggaacagccttccagcccggccccagtgaacggtaaagtttccgcctgcttctttcctaacactcctgagcgctcagccgcccctgggctgaaggctcttcaatgataaagtaaaatcattgctgcggggagcagggaaggtgtagtaccaaatagtagattctcaagaaaggatgctccgttttcctttgctgaggttgggtcgggaagcacgttgctttctagtggcgcttggcgcagatttggtgttaaaatgtttgcgtgtactcccgggcaccgccagctctgaagatgtggcttgggaacttgctaaccagggaggagatgcaaagccaagatttaaaacagcgttcccctgatccacgtttagaaagtagagacatgactgtggcattctgattggggtaagcacagagaaaggtttgctgtgcccctgtgcagaacccgcagacagtggtaggcgcttttctttggaggagaggatctttaccattaagtcttacctacaa

SEQ ID NO: 79927 - DNA, 1034 bp, Homo sapiens
tttcccttctccgcaggctcgggcacctcgaaaccccgagaggcgctgggagctcgggcggcggaggtcggggtctttcatccgtcagggatggtgaagtttgaaaacaggctgcgggctgagaagctcggaggctgagccaacagctgctttggaggggactgctcgagtttgtttttcagaccttttgggttgtccgaaaatgcgttgggattcccagttcctgtgttgtgaaacacttattagatttatataaggcttttgagtagcttaagcgttttaactcctgctggcccccttggaagccccagtgccctctcattgtctgctctaagcgacttcttaggatcgcaccggccacacggctttgcttacttcctggtagggccctggtgccaccgctagtctttgtttattagctttgagatggtcactggtatcttgggttatattaatagcgtacaattcgaattgtgcacttcagaaatctgaagttcatttgaagaaatatagaaaaacggcaatggtatgatttagctgtgacatgtctcattgtgggccggagctgggaagatagtttagagaatgccttagcacttttgacagcttactacttaaatagtgattatgttcttggaaacaacatcggtaggtccacaaagaaaaatgtactctgggataaggaatagaaataactgcggtttcctggcgcgctcagacgtctgatgctttgcttgcctttgtaaagtcaggtatctttttctgcatgaagcctttgaaaattaacggttaattggtttcacagagcagtattgcagttcttttgtgaggatgcagaaacttgtgtaaattagcttttacctgtaaatctgtcgggatgttgagtatagaacaacaaataaggtgtatggcactgctttacaaattggttggtggtggtacattagctataactgtagccattgctgtggtgctataattgtaacttaatttttttcccaaaagaaatttgaagaaaaaaaaaaagaccaaag

SEQ ID NO: 79928 - DNA, 1024 bp, Homo sapiens
ttaaaaagatgccctgaatgcaagtgttttgataactaaggaaagccaaggaccaagcatttgaacttgagggtttgggttaaacagccagttaaattagagatatttagtaggataggcatgctaatttttccctgattaattcttcaatgagttgagagtgcctctttaagttttcagtacacacttgccttcatattactctacccaagaaaagtaagtgtagatcaagtaaatgttctgcaattttgcaccaaaaactgcagataattccacccaaaatactggagataaacccttttttaagagatccattcagtaggatgaggtgttgattattggttgtcagtggtaataaatttgtaatggactgatcaggttgtgataaagagaagaaatcaaccttgatggagtgatgggttattttgtatcgtatttctccacaacctacatttaacactcgtttgcccagtggactaaattttctaaatacaatcagtcatttccttgtcattaggtcaaatgcttttactgctttttagtaacattctatgatgtctttattaagtgcctaatacttaatagagcaattagtaaatatttgcctgataaataaaggaactatcacttagatgtgtctggcagggtctttatgttgaaaataaacgcagagtgaactttccccagaatgctttcactagcccgcactcccagtattttagtcagtaaacgttggctggattgtgagcaaatgaccatctgcagtgttgttatcacaatgaatttgtgttcttttggcagtctgtatttatagatgggcaggtggacaatttagttgtaaatgtggatggggtagttaaaaatcagtggacaggtgatacttttttcacattaattctaaaaagtagtatttgagttttatatatccttctgaagaatttaaacttttttggtaatatttataaagcttaagtcaaatgtctttctagtctttctgcagtattcctccccaaccccgtccccc

SEQ ID NO: 79929 - DNA, 2439 bp, Homo sapiens
gattgagcctaacatttacttgttgtgaagaagttttgacacattgatgagaagttctttccctaataatatgcttaatagtgtatacagaacatccttcatggtctaagcagaagaaatgatggagttgggggaagaattcgaactctttggtgtggtttcctgttatttatcctcaaaataatttattctcattctttgcttgtacaccattagccttaggctcgtgtaacagcctcctttttcctcattgaaatgtatgtaatttccttctccactggaatataaaagattgattttggatccttcaagctagatttagaaatacttatgtttttatagtgtttgcagctcagtgagtagaccagtgagtaatttagtgtgtagctcagtgagtcatttaaattcctgttttaaaatttgagtccctcttccatcaggagctgattaacatgtacatttcccctaacctaacctgctcgttttttttctttttgagcttttctccccttcttgagcttgtttgtttgtttttaatatttttccttctttgaaaacaaaatgttagtctcctttgattaagctgcagtctctgacctacatacatacaggtttgtgttcaaccaaggcattgaaataaatagatttagtcggtagattatcattgtttgaagtggaaaaggtatgctgtttaacatattttgatattttatgtttattcattgcctctttagacaggagagcaattgcattctaggtgtgttaatagagctttcctggacagatggcttggaaggaagtactttgatgggttctcagtaggggctagtactttttggagggtgtgtttgtgattaagcttaccttgattgacagtttagaatgctgagaatagcattaacaacagtaacagcttgttcatcttacctagaattgtcttgtgccaagacccctcaagatgctctgagatttctgtgtagtggtttcttttgagaatgtaggtaagaataggtgtccttgagactgaaaagaaattcacctaaaattgttcattgtggttgtatcttaaaatctttggggtcgttgaatgaactttggcttagaaatttgtagagatcgtctttttaactgctgtgagtctgcagatgtgattatctatagtaattccagatgttttctcatctattagttttactgagtaggaagataactgagaacaacataaagtaacttcaaagcagtttgctagcatttaatcctgactaatttaattaattattcatccttgtagtttttcctattttattgattatgaaactgagacaaaggttacgagttgcccaagatgcttggggagtattaaagatagcccaaagcttaaactctaacactgttcagacttttagcttgctttttcttaaaaaaaaaaaaaaaagagtctttattttgttattcagtaacttaatgcttgacaatttaaaaaatacaaaatgtttggaacacatactttaaataattcctttgaagatttttgatatgaaaatatattttaagttccacatctcaaaaattacttattttaaaatttggtcttttgttacccccctcacccaatttaatattgaaagtgctggcaagttggaacaaggaattggtgatatagtttggaagaaacaactattttaaatgtcaaccttgttatactcagatctaatatttttataggccgaaattcatattgcattagttcagacataataaaccagcctcctcactatagctatggataaaatgcaattagcttttggttatttttaaaatgggtttcagttattgaagtctctccaccccccttattttttcattttgtttctgttagagaagattcttcttggaggtggtttgttgtagggtggaggaaggagagaattcttaaggtatagaattttgcatttgcttctggtagctcagagattatttgaaatctttgcttttagtcagtatactttgttgattccatttagttattctaagattttccaattgtatttcctgtaaaagttatagtctttagaccataaaaactaaaactagtaactgcagatctttttttttttttttttttttgagatggagtctcaccctgttccccaggctggagtgtgatggcacgatcttgtctcactgcaacctccgcctctcgggctcaagtaattctttgcctcagcctcctgagtggctgggattacagacgcacaccaccatacccggctaattttttgtatctttagtagagtcagggtttcactcaaattcctgacctcgtgatcctcctgccttggcctcccaaagtgctgggattacatgtgtgagcctccgtgcctagccagtaactgcagatcttaaaacagatttcccctcttcttcttcttcctcttc

SEQ ID NO: 79930 - DNA, 1036 bp, Homo sapiens
cagctatttagaaaaactgaaatagttaatggttttggagtttgcaggtgcctgttttctgaaatattgattatctatccctcgggcagagtatacgtatttgccaagtttgtatttcttttttctatttcttcaaaataagtcccgttgattttaaaagaataaagagtttcccagtaagtacaagtgtggtactttttccccctccactttgtactttagtgttaacctttattacataaccacagagaatgaggaagagaattgtacaatgcagatattaagcctattgttctccaaggaaagtctttgatgttaagaggtccctaaacctcttaattattttatttacttgtgagagggggtgcttccttaaatatatacgagtcttttcttatattgcatacacttgcaactattattttgaaataatagttgagtggtgtttacatttatgacctgattcatgtcttttgaagtgccaccactgtttcaccatggacttgcttactcaggttgttggcaacagcatggaattgcatcagatcttgctgtattaaataaatgaagatattagatgtcagaatttttaagtagttcatggcttttgtttttattttctatatgatcagcttcatagggaaagttatttttgaaacaatttgagctcctaataattttttgaagctatttgtgtctggtcttccaaaggcaaaaatggcccattttgactctgatttagtaatctcctttggctttagtggtttttatccttcctcccactatcctttcccctcgtttagaggtaggaggagcccagttccagtatttaaaatgaagatcaagagtggcataatagcttcattaggtgtttttcaccaaaataggtctgaataagtctgaatttgtggtagaaggaaccataacaaatttgtttagtgcattacagtttttgagaatatgttgtttcacacacattgtttctatatgttgtttccatttcatggtgaaagcataaggaatccatttaaaaata

SEQ ID NO: 79931 - DNA, 1130 bp, Homo sapiens
cttaagaatctttacctagaatttgggatttctatggaaatagtgcttttgaaaatttgaaggttttaaacttacttgttactgagttattgttaggaatgatgtttgtgctcaagaattaggttgtcctgagatagaggtggcacatctagatttgagttattaaaatattgatgtgatacacaaagatttagtccaaaggacagtggcagcttagttgaagataaatatcaagtctttactctcactacttctgttgtagagggagtagtatagtcattggatagctttgaatcctactgggtaaaaccttctgaagtttcttttgcatcctcacttttcctaaacaacaggtcagtcattccagtgagttgtttggtgggtgtggatgatgctgcatcactgatactgctccctctgttaagtggtggtctggttatctgttgctgcatgacaaacagccatacatcctagaagcctaaagcaaccatttcattttgcttataattttgtgggccaagaattcaggaagaacttgcctgggattgcatcaggtggagaacgtggactcacagagttaccagacgtgtgttaagaagacactttggaggaggatgttctggagtcttcttaactcacctgtctggtacctctgtgctccttggtgtctctctgtcccccagtggtgtcataatctccccagtctccctgcacatggtttgggcttctctcagcatgttggtctctgggtaattagacttcttacatggcggctggctctcccaagagcaagcatttcaagcaatagcaagagggagctgtggatttcataaggcctggagttgcaggttgacatagaatcacttctgccatattcagtgcgttggggcagtcacagagcctgcccagattcggagaatgaggacatagaccctgtctctccatgggaagaatgtcaaagaatttgtggccatctttaatctaccacaaggccattaagcaaaaaggagagggttgttacaagaaatgctgaactgactttaccagcaaatgtaagcctactttatataatgattcagaagagactgattgtcaggaataagaaagggatagaggcaaaagagagcccc

SEQ ID NO: 79932 - DNA, 1031 bp, Homo sapiens
tgcctgccttagcctcccaaagtgttgagattacaggcgtgagccactgcacccagccttacattttattaaatagcgtttcttgacctatacagttacatgttatcttgaaatatgtgctaaatgtgcccaccttctaagcaattgttgtttggattctgaatgagtagtagttaagcacagaaagaagaatgctaataaaatgattgctaacattcatttgttatgaactatggattatgtaatcacctaacaacccatgagacacaaagtactattacgtccattttacaaatgagaaaacaagtacagagaggttaaataattcatccaagctctcatggccaggatgtgataaagcctaattttgaatccaggcagtctagtttttgagcttatcctcttaatcattatttgactctaaaattcattttagtacagttttatgaacagaggactcaggtatatgcaaaagtgtaaagtacagggaaaaaatggagaaagaacgtgatcacattccaagttgaggttaatagtgccttgaatgtgcccagttttcctgggtagaggggctaggtttgaagttgatccttcccagttacggtaactctcctacttcctccaaggtaagtgtttttcctggtgcagttaaggtgcctcatgatgaaaatgtcatctaactctctgcatctgtttattttggtaccatttaaccaacatttgttttgactgagttttcaagtaggccttgccttccacacattggctgctttctaggaactgggaaatgttgcttcttaagggtcttcacgttggtggttagtgacagaattgtgcagtctctagacgaaggtgtagatggatttgggtgtacaccatgtgcatatggagccttatttcagtttcattgtgcctgctgtaatactaaatctgagttggaatgtgttacacaatttttatgaacataatcaacttttgattatctttgtccatgtagagaaatagcagtttttgtaagcttaaggtgattt

SEQ ID NO: 79933 - DNA, 1044 bp, Homo sapiens
ctcacttgtgggttttagaataaaatgctagggaatcaccccgtagcattacactgatggcctaaaagaaatctgtgatagttgtaaattgacgaagatgcagtttaaattaacattcctcccacacctcactgtgatgaagaaacagatttcctatttctgtgtggagtgtgtgcatgtgttgtttcctcgtgcccgttagtaattttacttcaatttattaattttccttgtacactaatttcttgtggttagactgaatgattgatttcagaggtaaaacattggtgcattaggtttaacatgtttgattataaatatcttgactaaagtcaaagccttttttgcagtgtgctctgtgccctagagaagttataacatactctgaggcttgcagttcttctttccctgctttccccttgccaatagtccctgccctgtcctatgtttgcaatcctttatgaagttatcactgaactcttctctttccccagctccagttgtagctgaatgtaatctttcctgaactcacagctcttggaatacttataatttcatgctgcatgttagttatttgtaaatgtccttggagactgcagataccatatctcagatctttgtatttttccctagtatgcagtgtctggtgcagagtaggtgacatacgtttgaaagactgaattttgttaactgtctttcagaaatggggaaggttacatcagatctataatactgtgtcccctgatcatcttgaaggactaaagagccacgtaacatttttcctgcagacaacttaaatcatgatataggtgaactacttcatttccctcccaagatggacacccttgtagagcagtgcccctccaccttgatgtaaacaggagcccagagaggaagcatgcattaaccaggcagaacaatataaatcaggttactgttcattaagagagaaagcagtgcgaaaaggaatgattctgatttgacacaaacccacttcttaaggagataagcacattaacttgaaaatgaaaggtaaattaagat

SEQ ID NO: 79934 - DNA, 3793 bp, Homo sapiens
catggtttgtttttatttgaggaaattattgaataactggaaacaagcaaccgaaaagaaagaaatggtgactacctatagctggagggagaattggggatttttttgaaaagagattttgttttcagctctttgttttttgtttttgtttttttacaaagtcatctgtctatactgttttcttagagagaaggaaaaatcataatgaagaatctgaatgcaagagattgcactgagtacagtttaaatgagacaattgaaaaatggcagtttcaaaatgtatatgtaggcttcatcaactttctttacagtcctattcttttctttttaaaatatttttcccttccttttaaaatagtaacattgagcagttttgctgttatttcaaagaactgcccgccgtggagttaaggaatgggaaaacagcaggaaggcggacataccacaccaggagccaaggggataacaatgtgtgagttataagagtatgtcctttctggctttgagttacaaaacaaattactttcactggtggtttccattgtactaagtgagctaacaggcacatgccttaaaaaaaatcttctaaaaattgtgtttaaatatctagttagcaatcttaataattgttggaattccggccgggtgtggtggctcacgcctgttatcccagcactttgggatgctgaggcgggtggatcacctgaggtcagtcaagaccagcctggtcaacatggtgaaaccccatctctactaaatatacaaaaattagccgggcatggtggcgggtacctgtaatcccagctactcgggaggctgaggcaggagaatcgcttgaacccaagaggcagaggttgcggtgagccgagatcgcgccactgccctccagcctaggtgacagggcgagactccatctcaaaaaaaaaaaaaaaaattgttgggattcctttatttaccgtaacaggagggataaatttagcattctacttattgactctgcagatttgggcattctagaattggcatctagatatgaagtgcagttctaggtgtagatgactatgaatctcattagtccatgtgagttgatttgtccgacagtgttaggtaaacctgtcttggatactgaaattaatttgtagtcaacagattagttgtgggggaataaagtcaatttttggttgatacggagagggggggaagaaaacggacaagtgctcattaagaaccaatcctgtatcctcatttggtgtagacctcccttatttgtggttcagaagatctttcattatgacaattgtagtgagcacatttttcataactttacagctctttttcagaaggactgtgactcgtactccttatatatttaatgttttctctgtctgcctcctccacttccacacactcccattctcactcattctgaaggggtgatcagacactttcctgccttggtggctgagggagagtaggactgaacatgtcagaataatgggcagtagggcgagagtcacagtgcagggaaactggaaagccaggcgtggagcagggctggaatgacgtcactacaagtggtgtttgaagggagtttccctcacagcagcatctaggatgagttgagcagcatctaggatgagttgaaagtgcctgcattcaaggaggctttgcactctacagtaatcaggtcagaggggacagcagtgaaacagtagaaaaaatacatgtgtatgagttaagagaagagttagtagtacttgatgcattcatgtcatgcagggttgagttgcaggctgtagaaattgcctttggctgatttaggcagcaaaggaatttactgcagggctattggtgagctaatcatactgggtgagtgaaaaatcaggtctggagtccgaggcagcagcaccgcagtcacagtcaccccacagaactgtcctgtaaggccaccactgcctctggtgcccagcgcagcagcagagttcctgttgccagcactgctggagatgggtgctggcggacacagccatgctgctgccctgcactccggatggtgctctttgccccccctgctaccagagaggatttggtgccatcccttcttctttgtgtcactaactcctgcttcggatgggcaaagcccaggctgtgtacctgtgctctgactgcaagggagcctgagaaggcgagtgtctggctgtttagcttcggaagtgggaggcaaactcttaaaagtagggattctccaacataggaagagggttcaagtactaggaagtcaaaaatatgatttgtattccagggacctatgtgattgtgagggttgagaaagaagatattgagattctctgagataccaatcaagtatccgaaaatatggtgcttatgttgacagctatggaagttgaagttgagttggatcagtttagccacaggtgtagaaaaccaaaattaagtgacttaaacatccatggtttgtttcctcacataaaagtcagaggctgtctgtctagggtggtttgacaaagccatcgggctcctcctggctttcttttccaccaacctccagaggccctatccatccacatagtcccccatggtgctggggctccccaactccgtcctcattcctagcaggaagaaggaaaggattattataggactactctttctttttaagacatttcccagaatttggacacactcagttttttattgggagagtttatatgcccaggaaaaaaatgagcgttctattcatatgcgagaagagtgtggatattgggtgataggagaggtgtacagagagcagtagatgctggagccggtcagtgcacatagaggtgaaagtgacaagaggacctcccgcagaaaattcctgctggaaactggagaagtttaaataaaaatagtcatgagaaaatctgacttttggagttgagagtcactggtggagagctgagtggtgaaggttagtgacacaggctggagtctgggggtgctagtgagtggcaagaaggacaaggcaggagggggagaaagaaagccgaatgcttgttttgcattttgaaaatgtacattcttaagtcatttggcctataactcacccagtgctgtatggtttgcttgcgtgttttaactcaaagtgtacaaacatggcggtgcatgggcacactcagagttaaccatatggttacaaattagctttgtcagaattactgctacttttatgggtttttgagatgctcttatgtatctttcagactttcttcagaaaagaccaaatcctttttaagtgttcatttcctatatattaggcattttagatgggtggacgctgtgttgaaattgtagcctctcactaatctgagggcactgtcctttcctcttttgcaggtctttggtagaagagtttagaaagacactctgtgctttatggcaaggcagccagactgcatttagcccagagtccttattttatgttgtttggaagattatgccaaactttaggtaagtattatatgaagatatttttaaacattaatattagtgtttatactgttcctgaaataattcctaatgaagtggttgtattctaaatattctaaatacttaagactggtttggtgtttttttctttttaagaagaagagctgaaattgaatacatctgactaaacacatgtgtttatttaaataatagactatagaaatgtctttaacaagaggtggggtattttgttgctataaacataaagcccttataaataacttatgcgcactaggaaaacata

SEQ ID NO: 79935 - DNA, 1161 bp, Homo sapiens
attttctaggccactttaagttaaacctactgcaatgatgacaaaacctactcgagcaattctatttgaaaagtttgattccttttctaggaaaaggcttccttcctttactgacaaaataaataggctgtaactttattattactttttaaagtactgtttgtaagacatattgtcttaaatttttttttaaaagatggcattggggaagaaggattgggagctgtaggacctagtggccatttcagctttaggtttaatatctgtgtcactaaaaaaggacatagcaaaaaaaaaaacaaaaccctgctgaaaatgaagggactctaactgaccctttcatgctgatgttcacatacaagtttgcctttaattaaaatggaaactgcttcattaagaattacatttagactcaatgtagttcttccttgtaatcacttcctctgggaaatggatactcatcaagattttagctgcctgacatgtttaatattaagtttcatatataccatgacttaatattaaaaatgagtttcatttattataaccacaactgtttaaatattgaatacttattggataggctcttatgattctagggtcctttagctggcactaatgatttcctatgtgctataaagatcacatctgccacttatttcttccataccaccgtcctcaccttcaccttcagtaggggtaggtgtgtgtgtgcacaagtcaacaaagacattgcacaagatacctttttctagttgtagcaaatattcttagatcctgaaatggcttttccaatgcactgaaggaaatctgaatttttaatatttgataatgtttggtttctgtccctaactcagtaataaaacttgcaatcctaatctttaaaatgtcatgaaaagggatagattaatcctgaaaactcatgaggcactaaaagaacattctgagtattacacagtgtgattccacagggtgcccaggcatcatgtaaaatcataaagacatataccctctctcacctcacacagcctatccatgatagtgcccagttcaatatcctttgtggatgaatatgccatgataaaatacaaaacagaatttttcatttaatactttttaatttggtgctagcaggaagaacaattctcccaggtcacaggt

SEQ ID NO: 79936 - DNA, 1027 bp, Homo sapiens
taatgctgccaaaatcaatttgtttagattgtcttcgcagttttaccgacttagaagaacttgatgagacagagttatatatgtgccataaatgcaaaaagaaacaaaagtccacaaaaaagttttggattcaaaaactacccaaggtgagtgttgaattttgagttatgaagcaatttcaatgggaaagtgcttgactgctaagaccatgtctataactttacactatgtgaactgttctgtatttttctctaggattttcagtaaaagctaaaccccttacagaatgaatgcataaggtatgcatggaagaatgattgatagggcagctaaaatgttatttactgaactgatagtagtatcaaactttgactgaaaggtaaattaggtgttcacaatctttgaccgcatctctgtcctccaggtgctatgcttacatttgaaaagatttcattggacagcatatttaagaaataaagttgatacatacgtagaatttccactgagaggcctagacatgaaatgctacttactagaggtaaggtggttacctttttagcatggtgaaaaaatggctcttcagtaagattgtcatcacatggagagggtagaggtcatcgagatactgatgtcattgaccactgctccttcttccttgttctgtagcctgagaacagtggcccggagagctgcctgtatgacctcgccgctgtggtggtgcaccatggttccgggtgagtacaacagccagcttctggtgggtgggaatacctggtggccagcccaatgacctgcagttttgtaccactcttgctagttcttcctaaaaaatggattcagataaagtaggtgaaatttccttcagttttggtgcggaagagtactcctcagatgatgttgtgaaggcttaagggaaggtaaataaaagtgaaatgaagaatggttcatttgaacccagtatttacgacccagtctttatttgtccacaaactccaaagttgcttattcgtttaccaactgaaattta

SEQ ID NO: 79937 - DNA, 1122 bp, Homo sapiens
ctgctctgtgggggcatccctgcagctggcttccagtctgcaccctcttggtggatgggtatgaaggacaggtgccctcttactacactctcatcctgtgccaggcgctgtgcgtagtgtattctctcaagcaatcctgccagtcagagcttctcctcactttacacacacaggcactggaggaggtgaggacaagaaggaacatcttcacccagagcctcgagggccacggggcagtagggcctcagctcattctatctggcccagtctctgtgtccacttgacttaaccatgtggccatgttaattccatcttgaaggcagggagaggtcatgggcagccccactcccccttatggcactctgatgtccccagtcacggctctgggtctctctccacagccttacgacagtctgcctacctcacagacctgcttcttccagctgaggctgcccccgtactccagccagctggtcatggccgagcgcctgcgctatgccatcaacaactgccgctcaatcgacatggacaactacatgctctcgagaaacgtggacaacgccgagggctccgacactgactactgaccgtgcgggtgctctcaccctcccttctctccctcaataatgctcacttctgatttgatgttgatatacttttatggtaactacatagatgttataagaacataaaccaacattataaacaatggccacatttagttactctaaatgtaacaaagaaattagatgtttttatttttctgtgattgtacaaaaacaacaaaaacgaagtgctctcagtcaggtttttccctccatatttttggtcacttttgataagtttgcatgaaaccattttggtgcatttttagttgggaatggtacatttttgtaaatccacccagtgaacatgaaattgtacattgtgtataattgttcattagaaaggacagttttacatgaatattcatatatttattttgttttaatttgaattgcctgttcagggttccttatgcagagaaataaagcagattcaggaattggagcgtggctcttggtattgcttcctgcggagcttctgactaggggttaccatcgaggcagacattagcccaga

SEQ ID NO: 79938 - DNA, 1042 bp, Homo sapiens
ccaaagcttcttacctttatgagatgaagtgtccacacatgcatagtttgacagcacatgggcacatatgattaggaatatgagtgagtggggctggcatcagggaaggccccagtgggctgagattttgtggtagagggaaggcaggctcctaaattggacttgaactggaaccaggagtgtaagaatcccacagcagggaggcactctaacaagggttgagaggcagggagggtgggcctttttgactgactctcgtgcctggcggtctgagaaacaagtagagggtctggggagcggacgagcaggcatcaggaggcgcctagccccacagggcccttggtgggtgccaggttcacgcacactcattgaatgagcaacctctcccgggagcaggtggctgcagtccgagaagggatgtcctggattgttcctgtgccgctgctgtccctcctcacagcaaaacaactggagcagatggtgtgtgggatgcccgagatctctgtggaagtcttgaagaaagtggtgcggtaccgtgaggtggatgagcagcatcagctggtgcagtggttctggcacacgctggaagagttctccaatgaggagcgggtgcttttcatgaggtttgtgtcaggaagatctcgactaccagccaacactgctgacatttctcagagatttcaaatcatgaaggttgatagggtaagtaagctattcttttttcctttgtaatgtctgccttattgcttcattgttgtttttgttgagacagggtctcactctgtggcccaggctggagtgcagtggcatgattttagcttactgcaacctccgcttcctagcttcaagcagttctcctgcctcagcctccgcagtagctgggactacaggtgcgtgccaccacgcctggctaatttttttgtatattttggtagagacggggattcaccatgttggccaggctggtcttgaactactgacctcaggtgatctggtcacgttggcctcccaaagtgctgggattacaggcgtgagccaacac

SEQ ID NO: 79939 - DNA, 1016 bp, Homo sapiens
gcctgcctcgatgaacacttaatgcagtttaagtttttaggaattttaatgggggttgccattcgcacaaagaagcctctggacctccacttggcccctctggtgtggaagcagctgtgctgtgtcccactcaccctagaggacctggaggaggtggatctgctctacgtgcagactctcaacagcattcttcacattgaagacagtgggattaccgaggagagtttccatgaggtaaatcctggccagtctatgtttctactggtgttgacgtcctatatgcacagactagaatttttctgtgtaaaattgagatacagtcttccacttgctgtctggctgaacaatgccatatctatgccattgctgcccttagcagctcaaccgcagcagtttaaacagcttctaatagagcaggctcctgcacttagttgctccttcccccttaatttttttctgcctgttagagtgaagaaccaaggtggaaggggaggcctgaggtcacgagagttcaacaggcttggtttgtgaacagagagattttgtcccatttttaactacagctggttgagtcatcacattcctgctgatcaagtagcctgatcagtcctacctgttttgtgttccttgtttttatccttaaaaattgtgagtttgttattgctgtgccgtatttgtatgtaaaatactttttgctgtcatttctaccatgtaataaaaattctgttttcttctgttcctagatgattcctcttgattcttttgttggccagagtgctgatggcaaaatggttcctataatccctggtggaaatagtatcccactcacattttccaacaggaaggaatatgtggagagggccattgaatatcgacttcatgagatggacagacaggtgagatgaaacatctcgggaggtacacatgaatgcttgggtttctctccaaatgagagctgactgggtatgccaaaatctgctaatatgtatttactgtgttaattcctctgtatgtat

SEQ ID NO: 79940 - DNA, 1008 bp, Homo sapiens
agcctcagttgagttatatgtgtcattgccattccaccataataagctaaatgactgatcagaaaatataaaagcactgtgttgtgtggtgcataacatttccacatgtttttgttttgtttttttcagatcgcctgataggcttgccagaggggcgtgctcgcaatcacaatcgaccgcaacaaatccctgtcctggctggagtaatcatagaagatgtggcagttggagctgaacacacacttgctttggcatcaaatggagatgtgtatgcctgggggagcaattcagaagggcaggtaaatatttatattgcttgctgctttctcatattctagaaatctcacagtgttcctcagttggggaaagagataagctaggaaattcataatctactgcaatactccaagcacatcactttgctatgggactgattattttgtaagtctagttatgtctttctctctcgactgcggccaaagaagtattataccatggtttaaaacaattctggtagtacagcaaagtgattaaggggattggctgagtatttatgtgtgtgtcctcatacactgttaagtgcctggcatgtagtaagctgcagtatgtaaggatttgctactgtcaacattatcatcattactacagcaagatgtgagattaggtcctgggaacatcagttgatatgggaaaaagaatgaaacaataatatttttatattttataatatgatggcatacaaagtatctttaggtttttgcaggaagtcttgtcactcccattatttataggattaaactgagcctctgagatactgataagagactcaagaggttgatgtattcaccctcctctatttatgaaggagggagagaccttggtgtgagatgtctgagatgctatgacggtgacttttagctccacatgcagagccacttccccttcctccaaaaatcctctcttggtctggcttcccctagtgccagggacccttaagttcaaggtcta

SEQ ID NO: 79941 - DNA, 1045 bp, Homo sapiens
cttaaaaaatacagatactagtagctcctgtctggtatccttgagttgtatggctgaattgcaacatcactggtagctactgctcctaagtagtaattatctctgtcttgtatacatcaagagtgtcctttaacaaggaaatatttttggctttttctatatcattccttagatactttttgatatgaatgaatatttttgggtcatgtatacttttcctctatctttcatactgattatggtttagccacagacatttgaaggatttcactttgaagaaaaaagttatatatggacattaagaattatttcttgttgacttactttggttaacatttgtagtatgctctgaaaccattgtagatatttggaaacatagccaagtttttcactgaagtagagaaaaagggtcccagaaacgggggagtgtgttttaggtcttgtgatttgccttacggaatgctgttatttctttaggtggcctgtggattaaaccacactttggcagtgtcagcagatggttccatggtgtgggcttttggagatggagactatggaaaactaggcttaggaaattccactgcaaaatcttcacctcaggtcagtactgccttgagtctaggttttcagacaacataaatagttttcatctatgtcagtagttattattagttggaaataatttacctttagtacttttggtagttcataatgaagtttagaagcttctgttgtgcattcttgaatgcccacatgctaggtcttgattttaaataagctattaatccagctaaactggatttaaaattctgcaaggataagcttctgtctccaaaaatgggtttcacactgtaggacctctgatgtagggaagaaatagttagaaacatatctccaggatgtcatggaaggaactatgagtaatcctttgtaaccctctgcatgcagctgccatttctgcttattattaccactgaattaacacaggtacacgtctccttttaagaaaacaatacaaaggaaatctgagtccatgaagaaagaa

SEQ ID NO: 79942 - DNA, 1092 bp, Homo sapiens
ttaggtgactattcgcagttttgctaggttatggctacaaattcaatttaaaactaaagaaattaggccggttactgtggctcatgcctgtaaacccagcgctttgggaggccgaggtgggcggatcacttgaggtcaggagttcatgaccagcctggccagcatggtaaaaccctgtctctgttaaaaatacaaaaattagccagatatggtggcacatgcctgtaatcccagctactcaggaggctgaggcaagagaatcacttgaaccggggaggtggaggttgcagtgagccgagatcacaccactgcactccagcctggatgacagagtgagactccatctaaaaaaaaaaaaaaaactaatgaaattattcttattttcatagtaccaattcggtggtttttgattgagggtattcagtagcagctgcaagtaaagaggagagttttaacatccagtgactcctgttgggtttctgttctgttccaggctttgtggtgacccagctggtgacttcctgtggttctgatgggcactctatggccctaactgaaagtggtgaggtctttagctggggagatggtgactatggtaaacttggccatgggaacagcgacaggcagcggcggcccaggcagatcgaggccttacaaggagaagaagtggtgcaggtcaggcaggaaatggataagtttgcctttcattgtaaatatactagttgttgaataggtttcttaaaattaggtaacagaaaatatagtaaaaatatattacacagtaattataagagatccattggttttggatgttcagattcattcttgagcttgtcagaagtttgaataggctttggtgttagtattggtcttgttagtattggttagaatggtctttttcgtgagccagctggttggcccagactagggtgctgcacgcccttggaaggaatattgtgtggtttaacttctgccacacagttcttaatacacagataaaaggaaaactttgcttttaacctatcatttatgttacaaaagctaagttaacatgcattttctggaaaatagtgttctaaaatcatattgtaa

SEQ ID NO: 79943 - DNA, 1393 bp, Homo sapiens
catttcataatctattatgaggaatcattaaagaaagtcatgatatatagctttcaaataaaaacttggtgtggtttttatcagacttaagaagttaacaaatttctaaatttttctttcaagtttaatgaactaacatcatgatgtgttaggcctgcccagtatgtatttctagcagtttagatactcctaattagtgattttctctttggggctaaaaacttcctaggatctttagccagattttatcgaccactccccttttctaataatcctggtacgatatagcgccaaacccttctcgaggcctctgctttctcttttgctcttctttacctcagctagtccagattgcatgactcattcttatgtacgagtttctgcttctttctagcccagtctttaatgtttccccatcaccccttcctttttctttcatccattttgttgttctaaactattttaaatggatgaatctcatacatctcttggttaaataagcagttttatagtcatcaaggagttacgggactgcatagttatatcaactcttccctttcagtaaaaggataaaacaattataaaagcattctatgtatacgtggaatcatttcaagtgcttgcatgttaaagcaatataataaagaataaaatatttaattctgtgtttttatactaggtcatttgtggtcagaattgtacctttgtcatccaggccaatggcacagtgttggcttgtggggaaggaagttatggcagattaggacaaggaaattcagatgaccttcatgtgctgacagttatttcagccttacaaggtaaaattgtccttaataaaaagatggttagaacctaaggcctaatgtaggtttggtcgtacaaacctttgcccttctcaaacctttgctagataaaatcatatcaggttttcacttacatttaaatccttatttaggcatgtgtgcagccttaatttccatattttaagctatattgcaggttacttatagcaatgctagaattcagtgaaatataaataacactttttgagacccactgaagattgtaaacaaatgcttaaaaattgcaaaagtgtaagtaggcagatgttaatagcagtagcaatcatgcatgtatttcattaaaattaaaaatcagtttatatggaaatctgcaaatgtgctaaagactttaaaggacatcttcatcagagttctttgtgacttggagagagaacacctttggagaaaccactgtacaagcccccggcttgctcattaactgaactcataatgactctgaagcctacaaagagagcaccgacggtttttttaggtaaaagcatacaagtaactatgagttcaaaacaagttcctagaagctcaggttcttt

SEQ ID NO: 79944 - DNA, 1044 bp, Homo sapiens
tgggtgtgatgttgttagaatattggcctcggttgtatttcttgtaaaagattgtatgtactacaaataagtttaaaaaataatgcagtggttctatcagatcttaattgattgcaattcggaaatatttttacttaatgcatattgacatgttttggttttatgtgatcaatttttttaagtggctgtcagagtggcttagtatgtgtttggcgcattcctcaagatactacacagaccaatgtgactagtgcagaaggatggtgggagcaggaatcaaattgccaggtaacattctggtgtttttgaagactgtctgaaactatggaaagtatatgacatcagagtcattctcccttggttactaaaaaagtcattactatatcccaaagggcaagatccattgggaaatataagtaattgtcatcctgaattagcttaattttttataaatcagagataccataattgcttggtaaaatgagatattctatacatattaagtggtgactgttactgtgatagtggatataattgatactacagatagacgagtcataagttgttagtacattaaaatagaaactccatgggagcacatccatccaaagaatctccaactgatgccagaatccttgctatgaagaatgatttatttatattaaacagaagttacaaatgtatatatttatagagagccctctaggcgagtaacataaattcatgaagctagggttagaaggtttggagagggtaaaaagcaaaaacagaaaaaaaaaacaaagaagcttacatgctttatataaaggcacacagctgattgtcagtttctagaattaagagcctgttgttaccagattgttttattttttctatagatgctaagaatccaatgtttaagtaaaatctcccaatattaaacattggcacctaacttaaaattgtttaaaacactgagtggccagtcagatcgcatctctgagctaccagtttgtacattctgttgccttccttttgctcatgatacccttggaagaaatacac

SEQ ID NO: 79945 - DNA, 1050 bp, Homo sapiens
gattgtgagaacagaacattttgatagaatatggaaacatactgaatagggaatattaaataagcaaaaaaagagatgtaattttctttctatgacttgggttctttcacttctcagtttcatggtagattttggtccaaaaggaaagaacctatggtgacttacaatcagcaaaggaatttaatttttgtctctatttttcaacaaccacctgaaaaagaatgaaagattataaagtaggtagcccttgtcacagataagcgacacttttaaaaagtatgttacatggaatccccactgtacgcctacattttgtctaaatgcattaaagagctatttggaaatttacttgcaatggttgcattatcattatttgtttcaaagtctctgtcttttaagtcagacaatgacaaataattatcttttccttactcttttgttttgatcatgttagtgtctgttacttgcattgcatggttcagtgaagacagaccatttgcagtgggatattttgatggaaaactgttactgggaacaaaggaaccacttgagaaaggaggcattgttctaattgatgcacataaggtaaatgcatctttaaaaaacgtaattttatgggatacaaatataattttgttacatgcatagattacacagtggagaagtcagagattttaagatatccatcacccaaatgacatacattgtacccatcaagtaatctctcataatccatcctcctcccagccctcaccttccaagtctcccttgtctatcattccacactctaggcccgtgtgtacacgtgagttcccttttcaccactttcttgccaacatctgttgttttttgtctttttaataataaccacttaaaagtgaaaaaaatgtaatatttgcctttctgtgtctgacttatttcacttaagataatgggcttcagttccaaccatgttgcttaaaatacctgatttcattctttttatggctgcatagtattccattgtttatatataccatgttttcgttatccagtcatccattgatggac

SEQ ID NO: 79946 - DNA, 1065 bp, Homo sapiens
aagaattaagtaaaaactagttaacattttttcccttttaggaggaaaaggattagtagatattcagcctcattgggtatctgccctggcttggccagaagagggtccggctacagcctggtcaggagagtctccagaattgttgttggtgggacggatggatggatctctgggactgattgaagttgttgatgtgtccaccatgcaccgtcgagaattggagcattgctatcgaaaggatggtaaatgactgcacttacgtctagctgacggagtctccaacttcctttctagacttagctttttggcatttgcttttaaaaataccaagtgaatattatcttggctttgttttcaaaattttccagtcatgttttaattttaattagttactgaattgaaagatatttatctcctagcccccaccacacatctctgtcaaaatgagatttaatagtattataacattagtaattcatcttttgtgtggcttaatatttatagcagattccaagtctcctttgaaagttaggactgtccaagagaaaaaaaggtcataatcattggtagagatgaaattgttttttttgtgtgtgttttgttttgttttgttttgagaaggagtctcgctctgtcaccaggctgaagtgcagtggcgcgatctcggctcactgcaacctctgactccctggttcaagctattctcctgcctcagcctcccaagtagctgggattacaggcactcgccaccacgcccagctaatttttgtatttttagtagagacagggtttcaccatgttggccaggatggtctcgatctcctcaccttgtgatccgcccaccttggcctcccaaagtcctgggattacaggcgtgagccaccgtgcctggccgagatgaaattgtcttttaaaaaatgagtaaaattgaagtaatggaggaaggggaagcagggaattcctggtctgacaagagagattaggaagtctgctttcttcttactgtggtgttcctttgaacgtgaatgcatctcacaagattttgttggttgtctgggggaagtg

SEQ ID NO: 79947 - DNA, 1034 bp, Homo sapiens
aagaagccagacacaaaagagtacatatattaattattcaattgatgtaaagttcaaaaacaggcaaaactaacttgtagctttagaagtcaggatagtggttacttctgagagcatcgtgactgagaaaagcccaaagcaggtttctgaggtactggcaatgttctgtttcttgatctggagggcggtgacatgggtttgttcagcttatgaaaatttatgctttgtgaacattcctgttttactttgtcagttcaattgtacttcaagtatatgccaatacttattaaaaggagagaacgtttagatgccagtttccagcttgatacctttggcaactcttaggacatgtatggctaatgatagtgcagcttacattttattatggttgttgatgctgtgaatgttatgtgggactgcaaatggtcccttaagaaatccattttctttatccatctgagatgtttttctttactggcagtggttccagttgtagcctggctgctggtcttgagtctctggggctaacagatatccgaacgctagttcgattaatgtgcttggcagcagcagggagagctggcctctccaccagcccttctgccatggctagcacctcagaacgatcacgaggtgggcatagcaaggctaacaagcctatctcttgcctggcctatttgagcacagcagtgggatgtctggcatcaaatgctcctagtgctgccaaactgcttgtacagttgtgtacacaggtaagctactttcagtacttttccccgttacattgattatttctgactgattcttgagccttttgaaatgaaatatttttgttccaaaattacatgtaaaaattaagtctgtttttccaattgcttcttcagaacttgatttctgctgcaacaggtgtaaatctaaccacagttgatgactcaattcagcgaaagtttctacccagctttctccgaggaattgctgaagagaacaagcttgtgacctccccaaactttgttgtaacacaggcccttgtggca

SEQ ID NO: 79948 - DNA, 1050 bp, Homo sapiens
gcagaagggatggaggggtttcagaaattcatgttcccaggaataatggcatagcaacatatccttccctggagtttgactgtgttaacctctgacttgttggcaagtaatggtcaggacccttgccttaaccctcaggaggcttctactcaattcttttcatttgtattttctaccatatttctggcattttaattaagatctttttcctgatgaaaaaaacagacttttgattaaacgagttccataaaaatattatctctttacatccttaatccctagagagtaggtttgttgcccttaattgtcaactattaaaatctttaaggctttatggaatagaatttggttaaaagagttgttttaggtaacccagaaatctccccagtagtttggtaaaataatcattgattttgtaagcatgtgtgtacctacataccagcagtttttattatgttagcctataacatgaaacatacttttttattttgtgctgctttattaatgacctcttaaaatgttctaatgacttaatttgcatcttggggtactaactgttttatataaaaatgcaatgttcttcatgtttggtgcaggtacaagggacaagctccagatctaattggcaagcaagacagtgtgtatgaaggtagtttgttttgagagcttctttattttacatgtttttttatatatcctctctgcttaacatctgttactaaaattcaccttcgtgtgtgtgtgtgtttgtatttgtgtacatgttaacttaaattttcccttaaaaactcaagggaatttaatagcaacaacgctggtttaaaagtcaaaggaaaagaacgtggtttcaaagaccaactttaccacagaatattaatttctattaggtgtatttttttttcaaagtagggaaaggatgtggtatattttgaatttccaccctaattgtggaaagtaaaaaataaatagagatgagcattgatttttctggagcactcattttcttgaaataactcattccctaatgattacagacagctaagaactctt

SEQ ID NO: 79949 - DNA, 1251 bp, Homo sapiens
atcacttgaggctaggagtttgagaccagcctgggccacatagcaagaccctgtctttacaaaaaaattaaaaaacggttagctgggtatggtggcatgtgcctgtagtcctagctactcagaggctgagacaggaggatgtcttgagcccaggggttcagggttacagtgagctgggattgtgccattgcactccagcttgagtgacagatccagatcctgtctctaaaaacagcaacaaaaacattataaagcatcgcatggattctcttacttaaacctatcaataacccagtgagatatgagtgctattattatccccttttgcaagagaggaaacacacgtgataggtataatttgatgttttatggtctgagatccaataagacaactgagataggttctcacctacatgtatggcagttaagaactggcgaaatattcagaattattttatgcatgcaaataaaatgccttttttgttttgttctgagcgggattataccgctctgtgcaggcccacaggaatcaaagtcggagagaaggaatatctttgcagcaagacccaggggcgttgtatgactttaatttagatgaggaattggaaattgatcttgatgatgaggcgatggaagctatgtttggacaagacctgaccagtgacaatgatattctgggaatgtggatcccagaggtactggattggcctacctgggtgtgtgtgactgcagcgggggctgctctgacttattttcctgccctcctgttcatatagcttactaacagcagccttgcctagagttgaaacactctaaaaagtcttttatctcatcctgaggtttggggatttaaagttatgaggttactttgatacctacaaactaataaggaaaagtctctcttgctttctctgtgggattttattgtttctctccccagacaagatgaatagagtcatactgtggtaatatttgattctgatgtcaaagataaattacaaaacaagcatcaggttccagtagacgttgacaggttatataacatggctgctgtgctcacattgctatctgaatgcatgttcttctccttcataggttccatttaatcaatgtaatgccttattctaggaaccagtgctcacctagatcttgtaaatacctccatttaggggcaaggtacatggtggatttgtatatacattggttagcattacatttttgtagtagggagaccaaaaagctcatagatgt

SEQ ID NO: 79950 - DNA, 1019 bp, Homo sapiens
gccagaagaaatttcataatttttgtgtaaaattgtactgaaaaaggaaacaagtttattttgaagtaaacatgctaataaaataattttatctcgtacaagtgatataaaatcgagtattcattttaatattggacattgatttaatgtatttgatagaattgaacttttttttttctgagacggagtctcgctctgtcgccaggctggagtgcagtggcgcgatatcggctcactgcagcaacctccgcctccccggttcaagcagttccctgcctcagcctcccaagtagctgggactataggcatgtgccaccatgcccggctcattttttgtatttttagtagagacagggtttcaccatgttggccaggacggtctcgaactccagacttcgtgatccacccaccttggtcttccaaagtgctgggattacaggcatgagccaccgttcctggcctagaattgaacttttaagtcttctctgtgtaatatttatattttcatctcttctatagtttttaatatctagtagaagatgcccctttaagtgtaaaaagattgctgtgataatgcctatcctaaaatgagatgtatagaatatcttacaaattctccctaaaatcttttttccttcatcacttcttatgactttaaatctttatttttcattttaactatggagccatatagtaaccaaggcttgtgtcctagatggcatgcaagctttttccaacaagctcagtgaatattttcataacgtatttcaaaatacctgtttttcctaggcaagaattctcaatcatttcaaattttaagtatttaatcttttaggatttagttaaggtcatatttgatctcatttaaatttgagcttcattaaacatcattttgttgttggaagaattcaaaatcagacaaagttattgctcaggtcacaggaaatgttatatgcataattgaactgttcaagggataaagatgtgtttcaaattttatcataaacatattttattct

SEQ ID NO: 79951 - DNA, 1066 bp, Homo sapiens
aaccattactttcaatccatgtgaataatttcatgactagctagtgagtttatattaatatttaaaagtaactgcaagttacctatctttaaaagccttctttgcactgtaactgtacataccaaattacccctcttatcttggtattatagttgaaggaaagctctgtgaaggcaggcatttttcatctattttgctaatggctgtattcccccaacctgctttgttgctggcattttgctgaaagaatcataaggttttattacatttatactgaaagtgctgcatgagataatcatttttaaaactaaggagtctttctccccaccctccattaaactataactaacctgtttagtcttccaggttgcatattcttctataagaagattgtgatgtatgtattatttcgtaaattggatttttatgctaaccactgttattttcttaaaggcaaatgttctctagttacccaactaccactgtacttcccacacgtcgggcacagactcctccaatatcttcgttaccaacctctccttctgatgaagtaggaaggaggcaaagtttaacttctcctgattcccagtcagcaaggccagctaaccgcacaggtgcgtgtgctgatatgcactatgatatccaaagttggcattccagatgtgtgggactttattatgtgggcattgtgttttgtcttcacagaaggtaaaacagtgattttaatgaaggggaactgccccattaaactgagctatgatcttcatgttgaagctgtggattgaattatggccatttcggagagaaataatgtgctgtacattagtcatatcagctcttcatttttcccaatatagccatttttagtgttgtaagtttccctttaagtactgctttagctgcaacccacacattttgaaatgctgtgttttcattttcatttaaagtactttctaatttgcctttgatgtcttctttgccctctggactatttggaagtatgttatttagttttcaaatatttgggggattttctagatatcgttttgttactgctttctaattt

SEQ ID NO: 79952 - DNA, 2070 bp, Homo sapiens
catgcaagtgtcgacctttcctctcattctttgccttgtttcagaaaggatttatgatgcctggttaagatgcatacagtaggctgggcttggtggctcacacttgtaatcccggcagtttgggaggcagaggcaggcagatcacctgaggtcaggagtttgagaccggcctggccaccatggcaaaaccttctttctactaaaaatacaaaaaagccagccgtagtggcgtgcgcctgtaatcccagctactcagggagctaaggcaggagaatctcttgaactcagtagtcagaggttgcagtgagctgagatcgcaccactgcactgcagcctgggtgacagaacaagactccgtctccaaaaaaaaaaaaaaaaagatgtatacagtatagcaaaataagtgaattaataaattaaaacaagaaaaatgagcctagaggaaaatagaaaggtaatatagaaccaagatttaggttagaacaacaaaactttataccagcaaaagctttttattacattttgtataattatatcattcttaaacttcaggaagttcttgccaatatcaggaaatatataattatattttggcttaaactatagaggcattatttgagactacaaagtaaacttttttatgaaatgaagtcctcactgaaataagttataagtaaccatttataaactagatttattatacaaattttctgaatagcttacatcaaactacatctgaccaacctcctgtttttataagtaaaggtacacagccacacccatttgtttagttgtatcagtggctgcttttgcactatgatggcagggttgagtggttgcagctgagactgtgtgccctgcagagtctaaaatatttcctgtctggccccttacagaaagtttgctaactcctggcatacattatatattagtgaatattcttatttgaaagcatctcattgcttctgcatttagtatcacatctccccattttctcataatagactcgtttttctctgtgtttgtaatgatttctctagtttgtgtaaattattctctgtattgtgtacatgatgcaccttattttgtctacattattttccgtaccttcctcccgtctttccctcacttgcttcttcctgtgtcattctgatctttattaaagcttcccaactttttggtcgcctagtgatactccattgtataatctggaaccctgtgaaccattgccgtttgatgtggcgcgattccgaggcctgacggcttctgtgctgctggacctaacatatctcactggcgttcatgaagacatgggcaaacagagcaccaaacgacatgaaaagaaacaccgacatgaatccgaggagaaaggggatgttgagcagaaacctgagagtgaatccgctttagatatgcgaacaggcctaacatctgatgacgtcaaaagtcagagtaccacaagctccaaatcagaaaatgaaatcgcttcattttctttagatccaacactgccaagtgtggaatcccaacatcaaataacagaagggaaaagaaaaaatcatgaacacatgtccaaaaaccatgatgtagcccagtcagaaatcagagcagtccagctgtcctatctttacctcggtgctatgaagtcacttagtgcccttcttggctgtagtaaatatgctgagctgttgctgataccaaaagttctggctgaaaatggccacaactcagactgtgcaagttctccagttgttcatgaagacgtggagatgcgagcagccctgcagttcttgatgcgacacatggtgaagcgagcagtcatgcggtcacccataaagagagcattgggattagctgatctggaacgagcgcaagccatgatctataaattagtggttcatgggcttttggaagaccagtttgggggcaaaattaagcaaggtatgttatctgattttttttttttttgcttttgtgctgttgagattattttcataattgtcagaagtgatacattctgtaagtgatttgtaaaaaaaaaaaaattttttttttggtcaaagcaatttt

SEQ ID NO: 79953 - DNA, 1455 bp, Homo sapiens
tgtatcaattaatttattctatctagaaggcatttttgataaattttagaacctctgagaaacacaatactaatagcagttaaccttttttaacatttacagtgtgactggcaatgtactaataagcactttatgtgcataatctcatttaatctttaaaataactgtaggagacagatgctattattagtgtcaggttttaaatgaaaagctaagacttagaatgattaaataatttcccaagattatacagagttatgatttgaacccaagttttgctcctctttttacttctgtgtcttatttgcagtgtgtatccagattgtgactttatgattttacttttgcaccccttgaacaatgtaaaatgtccaggactcatcattctggagccttgaggatgagaatgagtatatccttaaggcttattttagactaaattgagtcagtcatatacggcttggtctctatattcatctttcaaattttcctaacatctctggaattcatgagttacaggaaatgtaaataacagggcagcttattccagtggaccataccactactaacttcagtgtgtctgtgacatttccttactctttgggggccagttggtataattcacatgtatgaagagacccaaatactagttcaacatgggattctacatgttagaatttatagtgactaagaagaactactaatagcatgtgttttccaccctctttacttttatataggtgaaaatttgtgatatgcagatgcgtggcacaccccgagacttacttccaggagaccctatttgtagtccagtagcagcagtgctggctgaggccactattcagctcatccgtatccttcaccgaacagaccgttggacttactgcattaacaaaaaaatgatggaaaggcttcacaaaattaagatatgtattaaagagtcaggtcagaagctaaagaaaagccgctcggttcagagccgagaggaaaatgaaatgagagaggagaaggagagcaaagaggaagagaaaggtaaacatactaggcatggcctcgctgacctctcagagctgcagctgaggactctttgcatagaggtgtggcccgtgctggctgtgataggaggagttgatgctggtcttagagttggaggtcggtgtgttcacaagcaaactgggcgccatgccacgctgctgggagtggtcaaagagggcagcacgtctgccaaggtccaatgggatgaagcagaaattactatcaggtatgatctgttgagttacacttttagcaaacaaatatttaatggtgaaataggccattgcctgtcgacagtgagtaattatgtattttaggtgagctgccagttaacttttaaaaatatttctcatgcagctagatgtttctactgtaatttcttaaaggagaatttcctaaacccatgttctttgaaatact

SEQ ID NO: 79954 - DNA, 1022 bp, Homo sapiens
ttaaaatctatatgtaaagaattaaagttttcattaatttctggactaaacatacttcctcagcttcattattaagttgtaagttagaattgcttattttaaatactatagatattcaaaggttattctaaatgccctgcaagataaagaatgttttaaaatctttctaaattgatgcgattattttcgtgttatttttatttatgctgaaaataacatgtttccataaatgcattagtattatttataaacatattttcagtattggttaatgcagttaatagtatataaatagattttttgagtattaatgaatatcccacttttattttagttttatattgtgaaggaaaacagaggtaatgaaggcacgtgtgttggagtttctcgctggccagtacatgactttaatcaccgcactacctcggatatgtggctctatagggcctacagtggtaacctctatcacaatggagaacagactctcacattgtccagctttactcaaggagatttcattacctgtgtgttagacatggaagccaggaccatttcttttgggaaaaatggagaggtaccgacacccattcacaagcattacatttttcttgtttctatttatagtcaactcggttattcaagtgccacgtattcagtttatagattatctgctcgtctctcctttctctctaatactttctggttcttaaaacatttattaacaacaaacaggaagatagtaaaaccccaataagatttttgaaacagatgaacacattatgatcacttattatatgtagaattttctcggttagcaaggttaattgagaatttgatctagtaacttttgttctgtctcataaaagctttcaattctaatgtggttagatattgtgaattaaaaaaatttctatttcctttttcttttcctcactgctgccacactgtaggaacccaaattagcttttgaagatgtggatgcagcagagttgtacccatgtgtgatgttctatagtagcaat

SEQ ID NO: 79955 - DNA, 1027 bp, Homo sapiens
aaattcaaacaatatgacacacaaggttttccatgatttgatttcttcttctctttctagacttgttttctgccagtttcatcttccagtcattacatgctgcttgtctttaaatcactgaactctgttgcatgtctgccttggcacatgctgtacacactgccttaaaatgcctctctcatttgaccagctgcttactgccttctcatcattcaggactcaacttagaagtcatctccttttgaacattaccttgtccttctcaagcatggttagacacacttttatgtttctactatacctattatgtaattttgattattctcccactgtaatactagcagtatgtatttgtcttctgtccattaatgaccttaagctctttatggggaagggaccatgctctatttatcattgtgttcctgttgccctgcacagtaactgattcatagtagatacataataaatatttgtaggataaaaccaaggagcctcagaatatatcttatctgagacatggattattccaaaatgctgacccagcttcttttctggtagaagcagggcgagttggaagaagaagatgagaatcttcctatccaagaagtatcctttgacccggagaaagctcagtgttgcctagtggagaatggacagattttaactcacggcagtggagggaaaggatatggattggcatctacaggagtaacttctgggtgctatcagtggaaggtacgtagaaaatctaatagtttttagcattttgtcttttagtccttttttttccaggttcttataataaatgtgtagaaagactgaaaaaaaatcgtgatatgtaaatgttctattattatgtaagataatataaatggaaaccaagtgaaggatatacaggaactctgtgctatttttgtaacccttataattctaaagttatctcaaaaatgttaaaaatggatgtttaaaatcatgctatagccctcccataaggagtcacacagaacacattttcttctagcaatga

SEQ ID NO: 79956 - DNA, 1054 bp, Homo sapiens
tgggttaatatttctaaaaactgatatttaacttataaccactaaaagtagctgttgaacactggtataatcaaacttcgcatgcgagttaatattacagttaacatgatacagcttttctaaaaatacttaaagttactttttacaaattttatccttttttcttcaataaaacagattgttgagcgcttattttcccttctctctgattgtatgtgggagacacccattgctcaggccaaacatgctattcagataaaggaaaaagaacaagaaataaaactacaggtaattggtttttcctaaaaggtatttcttaacagcataagtgaatattctgtcacttgtctctgaatgcctgttcctctgaggcaccttgctctatcatttattccatttcctctcttggcattctgtctccctttccactgattccctcccctcagcttataaccatgcttaactcatttcctctctcctaaatcacatttttatctgtgaagtcttctctgtcttctctcttgtcctgtagtactaagcttcttagaagagtaatctgcatgtttcagccactttcttctcattatctcttcaaccccaccatttatcttgtatcaaagtacgaaattaaatgacaaagataagtgtttgttgctaaatatagtgtatccttttttttccacttcttactttacctctggaaactctagccttttgttattttcaaaacgctttctcccggatctccgtatattctctgccaatcctgattccctttgaaagcaactcttttttggtgccacttttaccttgccttcatctcaaaatgttggtgttccacagagtttgatccttggcttttccagcagtctcatccatacctaaagcaggggaccaacatgctttgatttatggttttaaaagatcactctgcagtgccttccaaacttaaatgctagcctgggtgtctccccctcaaacccttcccccagcccctttttttgtcccatttctgattgaaagcaccaccattcacctagtttcccaaacgcaa

SEQ ID NO: 79957 - DNA, 1050 bp, Homo sapiens
agtcttattttatatacgaggaaacaaattcagtaagttaagtgactttcccaaggccacacagtaagataaaagagtctgtccttgaaaccatgtctcctacatccaaagctactacttttcctattgtactctaaccttttttattctgatgtgtgcttatagagtttttagaaaatcttcaaaaaaagtaataataataaaataaatgtttatcttagaatagattcatatgaaatgtcagaattttctaagtgttaaaaatactgtttttggcatacagagtttcatcatgtctgagttaagtgaagaactctaaaatatgtttttttcctcaagcttcgtttagaggcacttcatcagatcctcgttctattgtctgggatggaagaaaaaggtagcatctcactggcaggaagcagattgagttcaggcttccagtcctccacactactcacgtctgtgaggctgcagttcctagcagggtgttttggtttaggcactgttggacacacaggaggcaagggagagagtggccgattgcatcactatcaggtaggtgacaccttgcagtatatacagattttaactgtcattttacaaagccactttaataatgtgaaactttttggtgtttatgattcagtttaaaaatacaaagactttaaattttttaagatagctccttggttccatttcctaaataatgcagtagagattaggtgagctgtggtattattgtactattgtagattatttgctggctcggttttattaatccagttttattatccagtttggatgggaatagatccaagtaaggatagggattggagtttgggaggatgggtttcaagagcttacgttttagatttgatcgtttacctagtttgtgtgattcctttgataacttagaaaaaaatgttatctttatgtctttcatatttaggcaggaaaaactgctttgtgaggaaatagattatacagactcggccgggcgtggtggctcacacctataatcccagcactttgggaggctgaggtggtcgg

SEQ ID NO: 79958 - DNA, 1173 bp, Homo sapiens
gacaataggtcatcagagccttttttttttttttttttggagacggagtttcgctctcgttgcccaggctgtagtgcaatggtgagatcttgactcactggaacctctgcctcctgggttcaagtgattctcctgcctcagcctccagagtagcagagattataggcatgcgccaccatgcttggctaatttttttgtattattaggagagacaaagtttcaccatgttggccaggctggtctcgagcttctgacctcaggtgatccacttgcctcggcctcccaaagtgctgagattacaggtgtgaaccaccactcctggccctgagccttcatttttgacccatttgtctcagtttaaattagacacctgcttcaggttagaacctcacagaaataattgctgcaatcaagacccactgttgaatgctaaaatgagtgagcaaaacttgaaagagacataagatgtttgcatagccttaaagtatcttcccccaaatatttattaattattgtggttttaacatgtccacaattcttccatagttctccctgcaggaagtggagattaattcttctctccttgagagtgagctggacttagtggcttgcttctaacaaataggctataggaaggagataaaattgtaacttcacattgcagaaacctggcaggtattgccttaactaaatgattaagattggccgggcgcggtggctcactcctgtaatcccagcactttgggaggccaaggtgggtggatcacctgagatcaggagtttgaaaccagcctcaccagcgtggtgaaaccccatctctactaaaaatacaaaaattaactgggcgtggtggtggatgcctgtaatcccagctacttgggaggctgaggcgggagaatcacttgaacccaggaggcagaggttgcagtgagccgagatcgcgccattgcactccagcctgggcaacaagagtgaaactccatctcaaaaaaaaaaaaaaaaaaaaatcaagattaacatcacctgtattaagtcatgtcgatatagtgtaatgagaacactttatgtggtattcttcccccaaatccataattccactgtagtcatgagaaaaaaatcagacaacccaaaatttagggacatctacaaaatatatgaacagctcttccgaag

SEQ ID NO: 79959 - DNA, 1032 bp, Homo sapiens
atttttttccccttttagcttgcctacatattttatggtttataaagtatgtattgcagctctgccatgttcattttgaaaattccatttaaaaaccaaacttgtaaggacaagtaaacaatctcaaaaattttttgttggattttgtattttctttatatagtaggtgattctgaattagtattaagaattgggcttagtctcaattgttatgtagaagcttttaatgcccttttcagatataatatttcctgtattcagatagtacagagcaaaccaaagttatcagattgttatacttaaaaaaaaaattaaagttctttcctctcccatttccatattataaatttttgtgttttaagtctttttgatgtcaaactaaatattttgatggaaattatttatcctgatgcttccacatagtgtgtttcctgttcttaatattttatttatacaaagttacatttgggttaatttcatccgttagggctcagcagactacagctaggaggccaagactgacctggcatctatttttatcaggttttattggaacacagccacactcatttatttaagtggttgctttcatactacaacagcagagttgtgtagttgtcacagagaccttatggtctgcaaagcctaaaatatttactgtctggccctttacagaaaaagtttgccaacccctgctttaaattgcagaagatttaattttgggcttcgtcagccattccatagaatattttggtttatatgaagacagttcagtattggtagattcataattgaacctttatataggcaggcaattgaaatttccatcagtgatttgtgagttggttaataatgaatatgtaagactacctcccataaaattaaggaattaatgtcattatgtgacaaaccaatttttttgtgcctctgtttcctcatttgtgaaaattggactaaataatctttaaggtctctttttcttctgcagttctaatatcagttccttgcgcattttatattcattttgaaaag

SEQ ID NO: 79960 - DNA, 1056 bp, Homo sapiens
aatgtatatcatttggcgctagagagaaaatggctccagacttactgagtagcataagaaatccaatttatagtttatactatattagttaagtttataagtaatagttcattggttaaaattgttttctctcaaatctctatcatgcatatggaaatataatttgagattcagtctgtgttaaccaggtcagcatgtacaaaataatatctttggaataaaagaaagtagaatcttcatctttccaactaagaaaaaactgtaatttgaatgtgaattacttaggcatggatataacacatttaggagattatattttcaaagagattttacaaaaatattgtatatttagtgactgccctttgacacagtagggtttttttgttttgcttttaaatgatagtaaaataaatgactgtattttttttccttttttgtcagtatagaccagatgccttaagccataaaatcttcagttgggcagttgaacctgccaagtctgagaactgtttgggagccattcaaactgttgagtattctgattctgacttgagccatgaaggacaaacaaatgtccagccaagtgagaattctctttttttttctttcttttttttttttgagacagtgtcttgctctgtcacccaggctggagtacagtggtgcgatcacagctcactgcaccactgaggctcaacctccccaggctcaagtgaccctcccatctgagcctctcaagtagctgggagggactgcaggcacatgccactatgcctggctaattttatttatttattttatatatttttttattttgtagaaacggggtttcgccatgttgctcagtctggtcttgaactgggctcaagcagtccacccaccttggcctcccaaagtgctggaattacagaaatgagccaccgtgcctggccaagaattctatgtgcttgtttaccccttccaatattttgaggaggaaatgtaaaatgttttccctcatacagcatttgcatttactagtctcagtggtcttgaattactaaaagcctgatgaga

SEQ ID NO: 79961 - DNA, 1667 bp, Homo sapiens
ccaagtaggcagttgtctacatccccccaccagatacacaggtaacacacagaaatatacttccattcttcttgtaagccttcactgctttattaaactgtctgtagttcaccagttttgagatttgtctattgtaataggttttttaaaaagacatttaaaaatcttttcaaatactaccagaaggtttaggactgttatttttctgttagtacggagactatcagattttcttcttctaaacacctagcgaaggctagtggaagttttgaaaagaaagtgaagctagaggaaggagtagtaattttggaaaataaggcactacttcaaggctttaggcatccggaaggtgctaataagatcatactgtgtctggaagataaaagacaaagattccaatggaaaaaggtaacaaaaactactgctactctgcaatgttaattaatgtgagttttttagttagtgtttcagagttatatgtgcttgagcctccttatagctatgttcagtgggtttttagggacattttgttattagtttgacttgaatgatgaataagtaagacattgctgtaattacatgaatttctattctaatactctattaaatcttaatcttaaaatacttttcacaactaaattttatttatttactttttacttttaatagagtggcagacgaaatgttgatttggatttggcagcatctcacagaaagagaggtaagtgtaagtattaagaacatagtaaatatcttagtgagaccctgtctcaaaaaaaaaaaaagagcatagtaaataaattaagaagctgtttttatatctgatgtatttagatatgattgtctttgaaatgtaactgcaaaaaatttcagaatcattttatcagaagagttaaaacgaagactattttctttaaaatatgtacgctttaaaaatctgggaatgtttaggagttaataatcagttattttctcatttgtcatgtattttgactttttaaaagtcctatagaattctaaaaacagtacattccattatgatggaaaggggttatttacaaaattttccatgttttagctcacagagttgttacagtttaaatggtgttacagggagaacttcttaccccgtacacgtgtacacacacgttgaaataaaaagtttctattttttttccctcttggcctattaagataaagcatgtaagagatgctttatctcttacatgaagagatattatatctcttacataaaaaatattttaaaaatttcatgaggaacaaattagagtgtcattgagagttaaggtcttttgttaatgaatagtatagttaactcatggttgtgtgtacaaattgaggaaaaacccagcagttttagatagtgtaaatccaatgataactaaaaactctcttaagcatttttctctattaactggtactgctgcttttttttttttttttttttttggagacagggtcttgctttgttgtccaggctggagtgcagtggcaccatcatagctcactgcagccttggcctcctgtgctcaagggatcctcctactccagcctcccaagtagctgggactgcaggtgtgcaccaccatgctcagctagttttttattatttttgtagagataaggtctccctatttgcccaggct

SEQ ID NO: 79962 - DNA, 1148 bp, Homo sapiens
aaaacatgacctactcacttccctttattactttatgcactgaaatggtttgtttccaaagttacagtgttctgatgttaacatagacatgaaagaagaaatgcaaattgactaggatgaacttaaagtaaagtaaatactgatactgattcagcatgggctataaatttctgattaaatgaggaggcacaatttttcgtatatataaacaacagcagtgaaaaagcatgtgaagttacttgcattgctctgtagtttagtgacatgcaaattattttgagaaggtctttgtgctcagacaagagtcaggatttcctgtcaactgacattactcctccctgtgtgtgtatattatctctgtgctccaattccattcaattttatgttcactaacagtcctaaatcaaaaaacttttttttttgtacatgtgagacaggagtgaaagtcttactgcagagagccggctagtccacacaagcccaaattatagactgatcaaatcgaggagtgaatctgatttgtctcagcctgaatcagatgaagagggttacgcactggtaggtatacccagattcagtaaagaaagatttttgttttcaaggtatatgatatgtaaggctttggttagagtaagtaatatgtttgttttagacatataaaaattttttcaaaaataactttaagagaaataactatattgcatatatgtttaccacatatgtgttaatggtttcaatctcttgttctgacttctttttaaactctaaattcatatatctgactctttgatggacattccacccgaatgagttgggttaccccaatcttaacctatctacaagtgaactcgtctctctccaaacctgtttctcttttattccctattttagtaggtggtacattaactatccaagcaagaaacttgggatcatccttgactcttttttcttatctcctgatccctttattctccaccccttcccaatccagttaagtcttaaaaattttaccgttagtgtgtctccaatgtcctctcctctccctttccttctgccactgctctgttttaaactttctcttttgagtggacgtgtgcagaagccttcaaactggttgcctcacctcttgccttgtgcccaccttccac

SEQ ID NO: 79963 - DNA, 1157 bp, Homo sapiens
tctagatgactgctaggtagaaaccactgtgggaaatcaagttaacattgtccttagcagatttctaatttttggtttgttcaggggcaaagttaaagaaaaaaaattaaaaccaatactgttttaaatttagaattattaaacatttatgcagagtaatagtaacataaacaacttgaagaaaatggaatagaataaaaattctctgccttaattaccttttatgcttggtatcatgttcattacaacttactaagttgcagctctgtaggaatttatagctgaatagcaatatagatatgaataaatttacagcatgatattttaatcaaaataatgaggaaggaagagcatatatgtgtctatatattttgtgtacatacattatttctataagatttatctagtgtatcttttgggtttttgtagtaaagttcatgtgttattactgatatcaacaatattttccatgataaaaaattaaaggttttttaaagttttaaaaagattttggaaaaaatgtatttagtgtagtttctgataatttctttaagatatcagaaaaccaggactctgcagatgttgatcctcaggagcattcatttactcgaactattgatgaagaagctgaaatggaagaacaggctgagagagaccgggaagaggggcatccggagccagaggatgaagaggaggaacgggaacatgaagtgatgacagctggcagtgagtatacccttcttactttctagatacaaactgtggcatgctttttgataggggaactaacttgaaagagaaaggcaaagtttctccatagtttttctaaaaggactttatattctgctggtgatctcaatttgtattagctgacaggggctcctacaactgtgctagtactattctgatgcttttgggttacatattcagggctgagaagctctggaagcaggaatgtcagtacctgcttcactgagcctcatcatgaaatgaaactcatgagtcatcagatagggccattcaaaatatgtcctctggggcaacaagttgtccaccagcctcgaagacgtctgagcggtgaggaagagagcccctttctatgcctattaggagagccataatgttttccacgtgtggaacttctaaaattataaatt

SEQ ID NO: 79964 - DNA, 1555 bp, Homo sapiens
cgaaactgttcatgtggtcttcctttctcagtaaatgccaactacattttaaatacatttagaatcacctttgacttctctcatattctcacatcacagatctgatctatcaacaaattctgtcaattctgccttcaaaatgcatgtggactctccagccacttgtcattaccttcgctgctcttacctttttctgagtcatcatcatttctcacttgaattactgcaataattacttctgctattgctgtccctataagtcagttctccactcagcagagtgagctttcaaaaatacatctcagatcatgttgtatctctgttcaaagccttctaatgctgcttctcatttttccccgagtaaaacctggaggacttgtactggcctgcaaggccgttgggatctggtccccagccagctctctgatgtcttctacccattctgtgcatgcacggtttgccccagccacactggcctccttgaacccatcccagatcctctgcactagctttttctgaggggacccattttcacaagctttttcccccacttcatttagatctctgctcaaatgtaaccttatcagaaactttcccagaccaccttatataaaatagtaatcccacatatacagtactccctgttctccttaccctgctttattttccctcatagcacttacctgtcatattaatgttttcttttaaattttatctcccaccctgctcctcctaacaataatataagctctgttagatcagggatttagttttgttcactgctatatccacagcgcttggaacagtaagtgggatctaatgaggtgcatttgttaagtaacagtttagaaagatgataaaattcaggtgttggatgactaaagctataaaaattacctctgaactgttttctgagcccttttaaatgtcaatgcatcatttttattttcagattgggacagtgcaactttaagtaatgagtcactcttggacactgtgtctagatttgttcttgcagctcttctgaaacacacaaatttacttagtcaagcatgtggagaaagccggcaagtaacttaaaactatcctcagacaaatatttgctctcatgatgtcagaaattaggtaacttttctattttggttcttcatttagatatcaacctggtaaacacttatcagaagtgtaccgttgtgtatacaaagttcgaagtcgtttacttgcttgcaagaaccttgaacttattcaaacaaggtcatcatcacgggacagatgggtaaagtttgaaatcaattaatttctatgtttttctgcaagctgtgagagctagctctaaattggtttatgtgagaaaaaaatgtgccttggttattgcatatgttcaatacatgttgagtagttcttttcctagcagaaaaaaaaaaaggaaaagatttgagatttacttaacctcacatttaccaagtgtgatattggttctaagaaactttagttggctgcataaatattaataacaaattgaatgattcaaatcatatgaatgattattcctctc

SEQ ID NO: 79965 - DNA, 1006 bp, Homo sapiens
ttttgaacgcgttggttttttgttatacaagaccattgcacgtgtaggacatttagtttctctggcctctgcctgccaaaacgccagagttgtagggtatagctcagaggtaaagcatttgactgcaaaataccagaggtttttttggagtgtcacaattggtagagtgtcacatccttttggagaatgtaaaagggttgatactacctccaactgaaaaacattaaaggactttaccttggtagcatctacttaaaatggtttgaagtttatcatttcataatcattaaataaatgtggtaagattttatctgtagcaccaaaatttatgatgttaaaattggtaacgtgagtattttttttagataaatgtatgagttgcctgttagaagtagcactttctggaaatgaagaacagaagccttttgattataaattgcggcctgaaattgctgtctatgtagacttggcattgggttgttctaaagagcctgcccgaagcctttggatcagcatgcaggactatgctgttagtaaaggtaagataaagaagataaagggagtaaatttgtagttagctcataatgctcgcaaatatatatgcaatatatgtaagtgaaaattatagggatcacccttttttttaatagaaaaagatattttattaacatttttaaacaatttgtttttccctttgtggaaaatagtgtaactattttttatatacatgtattccacttaaacctactgtgtgaaaattgagatttatataatacatttataggtaatcattttactgaagtatagtagtctccccatatccgcgggtgatgtgttccaagactcccagtagattgcttgaaaccacaggtagtaccgtaccttatatacattacgttttttcctgtgtgtacatacttgcccatggtaaagtttaatttataaattaggcatagtaagacattaacaacaacagtaataaaatagaacaattacaataatatgc

SEQ ID NO: 79966 - DNA, 4166 bp, Homo sapiens
tgatataaactcaaaaatattaattttaaatggcagaaagtgagattttttaatctgctctttttttttttttttaaaacctgctctttctttacctttctcttcagcatttaccattttttcactttccttcttgaaattctttctttgggcttctgtgtagtcacagtccttttttctctcctcttcctctgactcttctttttcagtgggttcctataggctcctcttccttggacatgccctctaatgttgaggatcctccgaattttgccttctatcctctttgctcccccaatggtcttatctagtctcagtgtctttaacaaccatttacatattaatgactcctatatttccatctagctgagaacacctttcctgagtcctagagcctttctttaattgcctactgggtgtcttttcttggttatccaaaagacaaccaaaatttattgtttatctaaaaccagctgcccctgaagttcccccactgaaaaaagaaagaagggaacactgtgaaactgaaacctttcctcattagatacctccatttggctgttccacagcaactaaaatattttcaaactgagctcatttctgaatgaccttctctgccctgatatacaatgaaatagtgaaataaaattgatttaaaaccaatatggattataaaaacacatgatttaaggtgatcttgatttttaaaaaagcaaattttgtttaaaaaatatgaaagcattccctcactagcaggtaagcaccagggggacaggaagttttaaccactttcttcaaggctgtatccctttcacctagaactgtgcctggtatgtcaataaatatttcttgagtaaataaatatttcttgagtaaattataaaatgaagataaattaatgaatgagaaattcataatgaattttaaggaaaacagttttaatcctttgaatttgttggtacggagaatacatatgctttcctataaagtgtttgttggtggtactttctgaaagtgaataaacactgatactacatcagctaccaggtaggtgttcaacagagagttgttgaatgagtctactctagttccaagctaaaataatatttattaggttcctttttttaaagttcatttgaagcaattgtcccatgtttaatttcttgcccttcatagatgtgatatacgtctcagctgctggcagtatgctctgccagattgttaactccctgctgttactccctgtgtcagtggctcggcctttattgagttacctcctcgacttgttgccacctcttgattgccttaatagactcctgccagctgctgatcttttagaagaccaggagttacagtggcctcttcatggtaagtaaagacaataaaagagcaaataatgcctttgagaaaagttgttcctcttgcacacatcactgtgtttttccattggagtctatctatcctaaggctatcaaaggaatttcatcactgaaatcttaaaagcttttcaaatttaagtaagtcctcttattttattggaaagaatcctgggctggagcataaaaggaaaagcattggagttggaaagatgaccttgagggcctatcttattttaacattatacagttcagtgatcaagtgtcacttagtccaagtgtcaaatttacaaccatatcaggatgttgattaggctttatatggagttgttccaaatttattctttccttttttctttttttgagatggagtcttgctctgttgcccaggctggaatgcagtggcgcaatcttgcctcattgcaacctctgcctcccgggttcaagtgattctcctggctcaacctcctgagtagctgggattacaggcatgcaccaccacgtccagctaatttttgtatttttagtagagacggggtttcaccatgttggccaggctgttcttgaactcctgaccttgtgatccgcccacctcagcctcccaaaatgctgggattacagacgggagccaccgcccctggccagtttattcttttctaaagcgtctcagaacttgctaagattcagtctatcaggtgagtaaggtgtcattttattttttcatctatgtttataactgatatttttctataattttattttttcatgctatcctttcctagtttttactaccaaaattatactaatctcataacatgaacgcggaactttcttttattcctgttcactgaaataatttgtgtaagatacgagttatctcttcctgaggttttagaagaatttatctgtgaaactatctggccctggtgttttgtttgtagacagactctggcaattctcattctttagtgattagtattcccttccatcttatgtttcttcttaagtccattttggaaatatatatatttccaggaatgttattttgttggttttcaaatttattggcataaagttatttgtaatattcatggttttaaaaaatctctagtatatctatggttatatcctgtttattcctattttttgaatttgtgccatctttttttcttgagtaattttattaatcatttatccattttccttttagataacttatccattatcatttcaaataactgctttttggatttttcagtctctatttttatttcattggtatgtgttccttatagctgtcatttcgtgaagtcaagaacttttaaaaacaaatgtacaataaaaaagcatggatctgggcccggcatgatggctcatgcctataatcccagcactttgggaggctgaggccgccggatcacctgaggtcaggagttcaagaccagcctggccaacatggtgaaaccccatctctactaaaaatacaaaaattagccaggcaccgtggtgcacacctatactcccagctacttgggaggctgagacaggagaattgtttgaacctgggaggcagaggtttcagtgacccaagatcatgccactgcactccagcctgagtgacagaacgagactctgtctgctcccctccacccccgccccccagaaaaaaagaaagcatgggtctggatcttagtattaagacaattctgaattcaggccttaaaaagcattaaacaatcttgaatgtcattttaatggataaatttgtgtgttgattttggaggaataaactcagaatactccctaaagatagtgaattttggtctgggtaatgaaaagtaggaatataattgattggaataatgttgtcatatgttgttttaatgtttatcttaaaattagtaacttttccaaggaaaattttatttgatagcataacttctctggatattattttaaatcagtctggtaaagagaaaaaatacagaaagtattataatttgtgttttcatcataaaatattttgcatcagtatcttattgcagtacggtaggagactatgagaaatattttgaatcttaaaagtaccagataaagacacaataactaatgattttgtctttaggagggccagaactaattgatcctgctggtctgccattacctcagccagctcagtcctgggtatggcttgtggatctagaaagaacaattgctctccttattgggcggtgtcttggtggcatgcttcagggctcccctgtgtctccagaggaacaggacactgcatattggatgaaaacgccactgttcagtgacggtgtagaaatggacactcctcaattgggtaatgtgcttctctgcagcatttaaaatacatgcctgtttgtacctcagttggagatttctctattctgatttgctaaatagagaactgacaggcaccaattgcaacattagcagtgtagggaatctggggctatgacttggagccctaagaaaaatggttaaatcgtgcagcacaatatggtgaaaagagcccccagaggaaatagaaattgtaggtctggtcctactctgtcatatttatcactcattttgagcaagtcatctaactcaatgcttcatcacttattttccgaggcttggaggttatgaaactgcttcccagaatgtaaagcactgtaagagtacttaaccatgacttatcagtgcagcacccctgagatgtgagtggcagcctcttttcctcccagcctgtcttgctttcatgctgacattatattatgt

SEQ ID NO: 79967 - DNA, 1138 bp, Homo sapiens
gactcaagcggatccacctgccttggcctcccaaagtgctgtgattacaggtgtgagccactgcgcccagcctacagatgatttttaatgagtattttgcattagtttagatttcaagtgatttattttgaacattagaataagtaattgtcattggtaatgtcacactgtagaatcatgtgtcatattatttatctattggcatttcgtactcctctctacttacagtactaaaatcattatgcatagtatgccatgttagcttagagatttaggcattataatgaaggctgaaataaaaacctgtaagttgcattttcctaaatcccatttcctaaatgggattaattgggtagtttttataattatgtacttcctgaagatgattatttattaagctagtaagtggattagtatagtttttttctgggatccttttgtgttcttttctagtgcatattacgctagttacttgttcctattttattgttctttagagaatgcaactggatatcatcctgacaagtttgcaagatcatacccacgtagcctccctacttggctatagttcaccctctgatgctgctgacctatcttctgtgtgtactggctacggaaatctgtcagatcaaccttacggcactcagagctgccatccagatacccacctggctgaaattttgatgaagaccctcttaagaaatttaggattttatacagtaagttgttctttcattgtagtaaaaaaagaataaaggggtagggatctctttagtcaaggtattttgacatttaaacacctatgatagaaatcaaactctagacccctctcccccaaggggaaaaacatgtcagggtttctgaaatattgtggggacaaaataacatgtaattgagaatttcaaagggatttattttagaattttaccagatttttctgatattgtagaataataaacagaataaaataggaacatttttagagagaagaataatgagcaagggattaaccttgccagttataatcttataatgaaacaatgtacttggaactgaatgagaataggttggtcagtaggatagaggacagtggaccctatagctttccctgtattagtatgccattaattctaaatct

SEQ ID NO: 79968 - DNA, 1046 bp, Homo sapiens
gggtctttctttcccattagactgtaggctcatgaaagcagagattttgtctgtcttattcatttctgcacccaaatcactttgcgcagagccttaccagggtgaatgctatagaatcaacactaaatatttgttaggtgatgattagctatttagtggcaaatcgaaaatatgtattcatagtcttcttaaagacatctgaaggaggacttgcatgctttcttttttatcatgccatcttttttagacttacatgatcctagtagtcagtgagttcgctttaagtgtgtttttattaaaaactaagaaccaggccaatcagtatacttttctcttttgatattaggtggtaattgaaactttatcagtgggagcaaccatgctgttacctccattacgagaacggatggaattacttcattctcttttacctcaaggacctgatagatgggaaagcttatctaaaggacaggtaggcctttgcttgctgtgtaagtaaaccagtagtatcctaaaaatttggactgagaaggaaataaaactaataaattgccatgtgttcttggagcataagtacttgatgggttaatgtgttgtgctggaagaattcccagttgtcttaacaaccttaggtgaagcaagtgataatttattaagttatttggggctaattattaaaataaggactaatttttccagtgtttcttatggtactaagccagacactctgtggtttatttgtagtatgctgagttgaaatcaagtgtatgtgctactgttggttccatgctgagaactttgtctgaaatcgtttgtataaagagtatagatgactattaggaaaaagtatttgataatatgagtatacttttctttccatttttatcttatataccttaaaatagtacattttgctcaaccaagtagaagttatcagattcagagatacagatttgaggaaaaaaaattggtacttatttgcagtgtaatatttactgatacttttctttctttttaaatctttttttggagacagagtcttgctc

SEQ ID NO: 79969 - DNA, 1799 bp, Homo sapiens
tttcaatttcatgagctattgattttttaaaaagtttatgaaaaattatatgcatatacattcttttttaaagtttatgaaaaattatacgcatatagtacctgtatattttgtcagcaaatttgaagttagaaatatagccattaaagggggagaaagacagaaaaataattgtctatgtttcttttaaagtgattttaaattgcttgattttaattgcttgaaattaagatataaaaggctatcagtggttgttaactttcttgtaataaaaatgctcgtttgttaacatcctcagctatcagaaacatagcttttcatatctgccaggttagtgatggaaacattagagctccttatcaactttagtagtgttaaaaagagtagaggttctttaaaacaagtaaattgtttaatgtgtttgtttttataggtaaacttggtcatggtgataccaacagagtgtataaacctaaagttattgaagctttacaaggaatgttcattcgcaaagtttgtgctgggagccagtcttcacttgctttgacatcaacagggcaggtaggactaagggatgagtataaaagacttagagtatttcagaggattaggtgactaaaaagtaatacttgtatttaaattttaaagttcaaataaatacatttttaggcaacatgctaaaatgaaatatcttcttctgtttgaagtagagtatctgagaaggaaccaggttttctaacctggcatatgtgacccagataaatcttagtggagcctctgttctttgtattaaactgactttctaaaatgttttagcatttagcttcccttaaaccttttctaaaacattatggatagtcggggaaagctgaactagatcttgatggagccagtgatatgaactaagaaggcaagagggtgatcaaaaaggagggtaaagagaacacttaggtatggaaaatattctgagagagttaggtgtttctgagaaacagtgtgaagtcaagcttaggatagtcagaattttatgagcctttataaaggctcataagctttgtacttttatagcttataagcttcgaacttttacatgcgtattttcactcttaccctatttgtttgttgaggatagggaggagccaggtataattatagactgacaatatttgtccctgtgtatccatcagttatggcagtaaaaaagtgagctggccacttattctgtcatgtataggaggccaccttgtgtcaggcagtggtataaaagtgttttatgactaattgacaaggcagaggagcagaaaagctgaaatcagcatataatttgattattcactgagaaactagaatgccttgtgttctaaaaatcttcaagctattcatcattacattagctagttgctgccttaagaatatctcttctacgtgtttctcactatggtttttgtagtaagaatccatgaattgaagttagaagatgcttatgtatttgatgtatacacacaggcaaataacagacaccccttgagcatcatgtgcttctttttttatgaaggagtaataatttctgctttgcatacaagtgatcacataagataatcattagaattgagagtttctatagattatccaatactattcaactattagttggtagtggtagtaataatagtaataataataataaatccattacattgaattccaagagaacttgtaaactgtttgctgtatagaatagttgtattatgagtaccttaagttatatgaaatcaaatatatatgcgtgaaaaaaataa

SEQ ID NO: 79970 - DNA, 1052 bp, Homo sapiens
aaacaagtcaacatgagcatgaaacaggacaacacaaggtaagtgctgtgaggggagcatgaaaagaatattctaatggttcaccgaagtgactctatgacccagtttaggagcaccttggaagattgagaagatgttagaaatgattgtgtttttcatattgcattgcattaaaaaaatctcaattctattttaaagttgtaacatttattatacttgtgaagtcaaggcctagagaaaaagagttaatgttgtttctttgttgttgtgtgtgttttatccaaggtcatggtgacagcaatagtcgtaacattccaacattagtaaaagacatcagcaatgtaggagaggtttcttgtggcagttcacatactattgctctgtctaaagatgggagaactgtatggtcttttggaggaggagacaatggtatgtaaaaaattatttatcagtagctttggcttttttcttgagttttttaaaaatttatttttcagttatatatgcctagtgtagaatgactcaaatacagatgagcagaaattaaaaaatgaactgagcttttacaaatgttactttaaccattgttaacattttggaaatagacttctaaataaatacacatttatacaaatatttacatatatttctacttagatgtgtttttaaaaaccaaagtatacctacatgtgtatgttttatataagtttatatatgttttgacatatatatgttttactctaatagtttttttttttttgagatagggtcttgctttgttacccaggctagagtgcagtgatgcaaacctggctcactgcagcctcaacctcctgggctcaagcgatcctcctgcctcagccccccaagtagctgggactacaggcatgcaccaccatgcctgactaagttttgtattttttttagagacaggattttgctttattgcccaggctggcctcgaacttctgggctcaagtgatctgccagatttagtctcccaaagtgcttgtattacaggcatgaacctccgtgcccggcatgagtatctt

SEQ ID NO: 79971 - DNA, 1036 bp, Homo sapiens
ttcttgaatactttgtctttttaaattttttaatttctaaaaatgctttttgtctttcattactcttagggcattatctactgtatttatttacttttgggtttcttctagtttagtcttcagttccaaaatgatttttttctcttatttctaattcttgagttatgttacctcatttttgagggtttgtaattcagatttctgtttttcctttgtgtcttttttttttttttttttttggatggtgtctctgctgcccgggctggagtacagtggcatgatcttggctcactgcaactttataataacttcatatgggatttgacctcaatacttttctgttgcttatttctacgtaggattagttttcctgaactcttagaatgagttgggatttaagatggctttttaaactccatagactccctccctctgtttttttttgtgtgtaatgttaaaaaaaagtcgttttccagtttgttccccttcccaacttttgtcttggtattctctttcctttccatctttcctttctgttgtccctatccagttcaatttttttttctgcccccagtagtttttctcagtgtaggggctttgtcctggaaaggaatcctggctggccagtatcaagaggcatgagccaccacactggctgtgatagacctgtagatgagcaattctgactcccttggccccactatcctcctttatctccagcaaaattccagaccttttattagggactggcagctgtcctcagatactgtcctcatgttcactggaaaatatttgtctaacacacatattattctattgtttggatactatttaaagtatctgaccaagatgaccctatcctctcccatttcatgtgctagcaaactaatatgttgacttcttaaatttcttttatcgttttgcttgattcagcaaaaccaaaaaactaaaaggcagaaaacaaattgatagtcactgtagtcagttaatatctttattgtattgagttcatacaagtcaatttaaaaatctatta

SEQ ID NO: 79972 - DNA, 1092 bp, Homo sapiens
ttttttaacataaacttttttttttttttttgagacggagtctcgctttgtcacccaggctggagtgcagtggcgcgatctcggctcactgcaacctccgcctcccaggttcaagcgattctcctgcctcagcctcccaagcagctgggactagaggtatgtgccaccatgcctggctaatttttgtatttttagtagagatggggtttcataatgttggccaggctcgtcttgaactcctggcctcaagtgatctgcccactttggcctcccaaagtgttgggattacaggcgtgagccaccgcacccggctgcatttcaccagtttgaaatcattaattgtaatgtaagatgaaattttggaaacattttatgagtcctctgtatgtttttgactgttttctcttctccctttgcaggactaatggctgaaggataaatcaacatggcaactatgattccaccagtgaagctgaaatggcttgaacacttgaacagctcctggattacagaggacagtgaatctattgctacaagagagggagttgctgttctgtattctaaactggttagcaataaggaagtagtacctttgccccaacaagttttatgcctcaaaggaccacagttgccagactttgaacgtgagtctctttcaagtgatgagcaggaccactatttggatgcccttcttagcagccagctagcattggcaaagatggtatgttcagattccccatttgccggggcacttagaaaacgactgcttgtactccagcgtgtcttttatgcactttctaataaataccatgacaaaggcaaggtgaagcagcagcagcattctccggagagcagttctggttcagcagatgtccattctgttagtgaacgcccccggtcaagcactgatgcacttatagaaatgggtgttcgaactggtctaagtttattatttgcgcttctaagacaaagttggatgatgcctgtgtcaggacctggtctcagtctttgcaacgatgtcattcatactgcaattgaagttgtgagctctttgccaccattatcattagcaaatgaaagcaagattcctcc

SEQ ID NO: 79973 - DNA, 1036 bp, Homo sapiens
ttggctgtaatcttctccacctgttccttagccattagcaacaactgatgtgctttttatcaccgtggtttttactctagaatttcatgcagctagaaccatagttatgtagtctttgtgtctggcttatttcgcttagcataatgcttttgagattcatccatgttgaatctccaaataatgaataataatgcttattattcattttgcttgtaatgaataaccattgtgttgtttgaatcagtcgttcattcctttttattactgagtagtatgccattgtatgcatatattatgatgtacctattcattcatcagatgatggacagtcgagtttccagtttttggctattatgaataaagacgctataaatactgatgaccaggtctttatgtaatcatgtattctcatttttctgggcaaatacctaaggagtagaattgttgcatatgtgctaagtacagcgtgtgtttatgataaactgccaagcagtttcccatgtcacatttctaccagcagtgtatgagagttctacacactggtggtgacatcctcaccaatacctagtattatctgtgtctttaaattgagccatttattgaatttgtaatagtatcttgttgtggtttcaatttccatttccctactgactaatggtgttgaacatcctttcatgcgcttttttggctgtttatgtatctttggtgaagtgtccagatattttgctcattttaaaaattgagttttcttattgagttgtaagggttctttttatatattcttgatacacgtctcattggatatgttttacaaaatagtttctttcatcttggggcttgccttttcattttcttatttatgtatgtgttcatcatatctaagtcttttcattttcttaacagtgttgtttttttttttgagacagttttgctcttgttgcccaggctggagtgcaatggtacgatctcggctcactgcaacttccacctcctgggttcaagtgattctcctgcctcagcctcccaagtagctgga

SEQ ID NO: 79974 - DNA, 1101 bp, Homo sapiens
tagggtaacaagtgctgcccagcaacactggaaatttaggttcattcccagaaagagtgctgctccaggtgcttggaacacattaattgaaaatcaaagattctggcacttgatgagtttatattccattcgttttctttttaagaaattattatttggccgggcgtggtggctcacacctgttagttccagcactttgggaggctgaggtgggtggatcacctgaggtcaggagtttgagaccagcctggccaacatggtgaaaccccgtctctactaaaaaaacaaaaattaactgagcatggtggcgggtgcctgtaatcccagctactcgggaggctgaggcaggagaatcacttgaacccaggaggtggaggttgcagtgagctgagacccaccgctatactcagcctgggggacaagaacgagactccatctcaaaaaaaaaaaaattattatttttcttttttttcgtggttttctaatgaactgatgttcccaggaaaatagatgctgagtgctgattgtgaatggaaccagtaaaggcctgggatagtcttaaagtacaatcacctttgctgctataaaaacttcaaataatacttcattttactgattacaaaataagcccacaaaagtcacaggatggtaacatattgttcaccagtctcttctctctcattttatttgtttatttcaggcttacttacttatttattgtataaatttaatgtgtacacatgatgttttgatatacatagtgaaatgattgctgtatgtaagcaatttaagatacccatcatctcacatagttactttttttgtatgtgctaggaacatttaaaatctacttttagaaaatttctggtatataatatgctaatattaattatattgctcttgctaactttatttattttttgagacagagtcttgctctgtcacctaggctggggtgcaatggcatgatctgcgttcactgtaacctccaccttgggttcaggtgattctcatgccttagccattggagtagctgggtgtgtgctgccacacctggctaattttttgtatttttgaggagatggggttttgccaagttgg

SEQ ID NO: 79975 - DNA, 1062 bp, Homo sapiens
ttttctttaccactccctttagtttaatcttattcatccctaatgcattaagttcatttgttattgttactgttccattttgggttccctccaaccctagttgattttaattattattattttttggcatatgaaacattatagttactaaacactgcttctactaaacactactgtataaaaaggtgtactgggctgggtgcggtggctcatgcctgtaatcccagcactttgggaggccgaggagggcggatcacctgaggttgggagtttgagaccagcctggccaacatggagaaaccccatctctactaaaaatacaaaattagcttggtgtggtggcgcttgcctgtaatcccagctacccaagagtctgaggcaggagaatcacttgaacctgggaggcggaggttgcggtatgccaagatcacgccattgcactgcagcctgggcaacaagagcaaaactttgtcttaaaaaaaaaaaaggaaaaaagttgtactgaaaagtgtcactctctccttgtttttactatctcatttccatccctccatctttgtttctacctcttgcccatgccctgtgggtacatagtctctttagtttctggtttgtcccttcctttatttctgttacacaaatgaaaatatatgtgggtgttctcttatattccttttcttctgatacagttacttattgccatacaattcacataccatacaactcacccttttaaagtgtacaattcagtggtttctagtatattcacaagatggtgcaaccatcacaactatctaattccggaacactttcatcacccccaaaagaaactgtgtatccattagcagtcacttcccaggtccgcttcccagtctactttctgtctgtgtgtgtttgcctattctggatgttttgtgttaatggatcatataatatgtggcgttttgtgcctggcttctttcacttagcataattttgtcaaggttcatccatgttgtagcatgtatcagtacttcattccttttgataactgaatgttattccgttatgtgaatatactac

SEQ ID NO: 79976 - DNA, 1077 bp, Homo sapiens
ccaaatcacatgacaaggttgtatggcagaatgagatatctagggaggttggaaatctggagccttttaaaaataggatagattgtcatctggggttgttgttattggaatggattaaatggcctattaaggcctcttgtaattctaaacttttatgaattttgcgttccctaaggttcttatcattttgcttcttaaatttccagtcatgctgtttgcatgtgacacatccattcatttgctggtcatgtattccatttccaatgcaggcaccctgatgttgcatggaagagaaagcaaatgtaaatgcgtcacttaatctgcttattaatataaacatctcttgaaaatctcaatttaaagaaattttggagaatgtgttggtgattggactggattgggttagtagagggtgcaaataataaatagtaataacaattccaacgttccaagcatgttttcccccaaaaaagtcatactgaatactccctaatatttgaaatagaaaaaaaagggggctgggtatattgaaggagctgaccttttaaaatttttaaaattcagattttcagatcttaaaatgatgataatgatgacatcgtggcttggagagtgagaaggttgtgttaggataaaaagaaacttgtgaaacaaaacttgaatgttatagttggataactatataatagcaagtaacaaacttactataatctgttgaagctatttttaaaaattgtaaatagaacttttggccagattacagtagctcacgcctgtaatctcagcccttggggaggccgaggtgggaggatggcttgagcccaggagtttaagatcagtctgggcaacatggtgaaaccttgtctctatggtaaatacaaaaatttgctggacgtggtggtgcatacctgcaattcctgctattagggaggctgagatgggaggatcaattgagcctgggagattgaggctgcagtgagctgtgattgcaccactctactccagcctgggagacacagtgagactctatctcaaaagcaaaataaaacaaaacaaacaacaacaaaggtctacaca

SEQ ID NO: 79977 - DNA, 1145 bp, Homo sapiens
ccgtgccctggtggaggcccacgataccatccaggacgatgtggaggccctggtctccatcttcaatgagaaggaagcttggtaccgagaggagaatgagagcgcccggcatgacctgtcccagctcaggtatgagttccgcaaggtggagtcattgaagaagctgctgcgagaagacatccaggccacgggatgtagcctcggaagcatggccaggaaactggaccatctgcaagcccagtttgagattctgaggcaggagctctccgcagacctgcagtggattcaggagctggtgggcagcttccagctggagagtgggagctctgagggcctgggctccacattctaccaggacaccagtgaatccctgtcagagctgctcagcagatcatgcactgaggaatttctggcaggctggaagctctaatcgccagaatccagtcagtgatgcatcccaagaggtttgcagaagcatgttctcatccaccctgctgcggcctccagctagaattatcctgcaggggtgtgtgtctgtagtatagccttccagcccctccacagaatccagaattgctgaggtgccagttaattcttcattctgcacctcccctcaccaatctggttttctgggagggctctggcagggcagccaagctgttaaaacaattagagagtgagtacccctcagggtccccttctgcagagggaggatggctggccctggggaaatgcttgagaattgatttgtgatgaaggatttgttcatatctcactttctgcctacataccttatggactgtagatcttgggtaatatttgagttaattaggaataactaagtcagcatggtgctttcctgctacagaagcagggatttacaatgcatagagaaaataatattgcctttcgtttgcattgatttttcacttaccaagcactcatgtctgacaaatgacctcacttggtccttaaaagaactcagtgagataggaaggtgggtggcattattattattattatttacatgtaactgatgagaaaattgactcagagagggaaaatgatatagtcaatcagtacagatgaaacagaaacccaggatgcccatctctaagatgaggtatatgggagaaagtagtaag

SEQ ID NO: 79978 - DNA, 1004 bp, Homo sapiens
tgcctcctttaaacaaagaggtcttatgtttgcagactgaaaaggggatcctaccctttcctcccctgtcatctgtaaggcccttggtgatgctgcagctctgtggcctgtccctcaagtacacccttgattggatgacagcagtgcactgctctgttggttagggatgtctatgcaggtgtttcttctcattttcttacttttaaaacacaggaaattttaaaaggaaaagtttcactcaactatttgttatcctcatgcacttttgcatctgtgttctctaatacaaaaattgaatcaaaccatacatatcatttgtgcatgttcacttattattttataaacatgtcccttatgatgttcatacttgctattttaatgtttatataattgtctattgcatccagaacatctgattgccaaagctgttccttagtggagaatgcttagcttgtttccagctttttcttgtctatgaaactatgttctttcatttgaagtctctctagaggccaaattcccagaatacaatgcacctggactcagataatctgactttaagttctagatctgtggcaaattggctctgtgactgtaactctgtgagtctcaacttcctgatctctataatggggagagcactgactgtgcagggtgttgagatactgtctgaggccaatatatgaaaagtgcttcataaagaacctgcatatagggtagagttgatatcacctggtgaaagcatgtgagtatttttatggttcttttttaaaaaaacagatataatttatatacaattcacccatttatagtgtcctaaagccattagtacattcgcatatagtgtattaaagccattaaatggctttaatgtattcagagttgtgtgaccatcatcatcatcaattttagaacatttcattaccaaaaaacccccttacccattagcagtcactctctgcttctcccaaacccactagccctaggcaaccactaatcttcct

SEQ ID NO: 79979 - DNA, 1030 bp, Homo sapiens
tgctgggaaagtgaaaacgattgacatatgttaagaatctactgttggggcaggcatggtggctgacgcttgtaatcccaacactttgggaggacgaggtgggaggattgcttgagcccaggagtttgagaccagtcagggcaacatatgtgaaactctgtctctacaaaacatgaagaattagccaagtgtggtggcacacgcctgtagtcccagctacttgggaggatgagatgggaggattgcttgagcatgggaagttgaagctgcagtgagctgtgattgcaccactacactcctgcctgggcgacagagcaagaccctgtctcaaaaaaaaaaaaaagaaaatctgccctcctgtgagtatctgtgctgagtacttcctgccctttcagaacaattggacttggatcacattcccatttcccaggtgaggacaatgaggctcagagaagttaaataaagtattcatggtcacacactttaaacaaggcagtcaggattccatcctagctctgtcagattacaaagctcatactgtttctattatactatgcaaattccgtgtgtgtgtgtgtgtgtgtgtgtgtgtgtgtgtgtatgtgtgtattttgagacagggtcttgctctgttgcccaggctggaatgcaatggcgcaaccacagctcactgcagcttcaagctccccggctccagcatcctcccgcctcagcttcctgagtagctagggctataggcatgtgccctagactttgataattttaaaattttttgtagagacgggtgtcttactgtattgcccaggctgatcttgacctcctggcctcaagcgctcttttcgcctcagcctaattctataatttaataaaaatcaatccaggagattcttcagaggtcatctattctagtaaaggcccagggctcagggtggttgagggcgagtaggggtaggggatcaaagagtttgtcagtaaaaggggctggaaggggaggaagggagacagggcagatatatccattctctgcata

SEQ ID NO: 79980 - DNA, 1657 bp, Homo sapiens
gacgagaaagccaaaaagccctccccatgccatacctgactacctcactggcttcccatgacatcccttttcacagcaactgaaacctacttcctgtccgatcaggaagtaagaaagacgttggctgtcagcggatcccgcggagaaataattgtaaagagtctccgtgctggagaactcaagatctcctttcccctaccccttcaggattcatctttaacttatcacggatactgagtgagtcagtcgcggttaacagaccgttacatccacttctaccaggcggacactacaagtcccagaatacaattcgctgccttccgaagaaaatagctcacgcatcccagcatgcaatgtgctgacgagccgcgaagattgtttttgtcccgccgaaatcgagcaaagcacgctggaacttgtagtccttgaggccccttccctaggtccttcgagctactccgtctggccccgccttttctctgctctcctgaacctttaggcttgtctcggcccatttgaagaccaggaagttgatcaatcccgaggctgctgagagacggtggcgcgattgggacagtcgccagggatggctgagcgtgaagatgcagcgggtgtccgggctgctctcctggacgctgagcagagtcctgtggctctccggcctctctgagccgggagctgcccggcagccccggatcatggaagagaaagcgctagaagtttatggtaattaattttacccagcacagcatttggcgttataggtgcaggccggagctgaggggtgcggggatgatggcctcacctgagggctgggaggggagacctttttttttgtttgtttgtttgtttgtttttggccagatcttgtccggggcgtagcaggcgctttcttcggggtcctaagtcacgtggggggtgtgggtctttctgggaactgggctcttcgtaaacctggggcaagccgaacccagaggtcttaaaagcttcattctccacgtgtggcctacgtcttagtaaccattccaagacttgtggggagaccacaagtctagggtgcctggttaggaagcaaagctggcctgattgcactactagagcctcgttctctagctcctggacacgcactcttgctaccgctgagggcgcttgtgggtgacagtcgagttggggactggcccaaggtcacagccactctatccggcaaagtcagtaagcagaggtccccgaaagaagagaacgagattggcttcttgtagcaaggccttgtgtacacacacataacgcacacacacacatacacactcttccatgttgcatattaaatattttctgtttaacccttggggccatctttattgtacaaatgaggaaacaaaggttaaagaactacctggaggtcacactgccagtaaggaacagagccaaaaagcaaaggctgtgcctactggttctaaccgtaatgcactttccaccacttcacaattgccttacaactttttgtttgtttgtttttttaattatgttgtattgtttttgaaaaccgaaaagactggatataatattgagagatctaaccatagaatacaaatataattcaagtaaggattataggccagtagaaggaagccagggttaggaaatactctgggagcta

SEQ ID NO: 79981 - DNA, 1041 bp, Homo sapiens
tggccgggtgccgccccgcccccagcgcctaagccccgcccctaggtctccgcccctcggatcccacggggtcccttgcggccctcccactcctcgcaccgttggatcgctttgctcacggcgctatctctcgataaagttgttgttgcggcttccgccgcgggtggaagaagatggcgtcgggtggtggtggctgtagcgcttcggagagactgcctccgcccttccccggcctggagccggagtccgagggggcggccgggggatcagaacccgaggctggggacagcgacaccgagggggaggacattttcaccggcgccgcggtggtcgtgagtttgcacccctcggggtagcaggcgggagggcaccccgaaagggaagagaggctaagcgagaatcggggaggttgggcagagtgggcccggtgagaccttgcctcggtgtcagcagtccgggccccggggaccctggatgtgctcgaagcggtagagcttggcttcccggcccccaggcgggaagagtaaagaatgagggttgtggtgccttcgtcggctagctccctaacagccgagaaccgccgacgccgtcctttgaccctgcagtgtggtgacactccacggatccacggggttattttgcaggtcgtgtcctgccaaggcagattcagtaggacggaataagcgaatgggatgcagacctttcccccgtcttactgcttctaagatgaatagcgttatgtggactagcctggggtggtgacccgcccaccagttctttctttagcccagcatttaccgataataaccaaaggccctttctggatcttagtttacaaaagttatgttgattcttctgatctctaggaaaatcaggccagaggctggtggacagaaggcactgccagataaatcactacatagatcagaaagctttctcctttttaaagggatgtgttcaagtgcccacgtacctcactgggagcaaatctgaaatgtgatgaggaaatggtgtttcccgtaatgttaccggtaggaggcc

SEQ ID NO: 79982 - DNA, 1099 bp, Homo sapiens
ttcagcgtcctttccatgccctaggagagtactggggagactgaacagcaatcagattgtttctgaatatttggcatgcttgactactaggttatccctgaaagtagccttgatctgaatcaataattttcttgtcctcggatatttgttcactgaagaaaattcgaacacagcacgatttcagtgtcttaagacttttaagtctggttttgtacaaagtgtgctaatccaagggaacttttgacttttaacaagagtatgcttggtacttaagcagttcatgcctgggtaggcagacaatctcaatttgaggtcacctggccacgtaacaccccagtctactttttttctgtataaaatatcaaaagctgaaaatgttgctgattctttttaacatggttctttgatttttctgtatggacatgttagttgtggattcctcagactgcctttgaaaacaatttacagttcaaataatttgtctggcaagttttggcatgccatctgatggatactaattcttctgaacctaaaataggggcagcagataacttgccatccctgccttcttggtcttgtagctgccacgtgccgtgggtacccagacattgagtggtgctggtctcctcaagatgttcaacaaagccacagatgccgtcagcaaaatgaccatcaagatgaatgaatcagacattgtgagtagccctgtgcctcttacctccacctacacctcaggcttatgggtcagaacccctaaggagtcctgaaatttctgagattagaaacttttttataagatttttcagtccctttttgagaaacaactgctaaagaaagactgtactgcacccataaaagtaatctcattaaagttctgggcttttgtgtttcagtggtttgaggagaagctccaggaggtagagtgtgaggagcagcgcttacggaaactgcatgctgttgtagaaactctagtcaaccataggaaaggtaacaagctctgaaatgcacttggagctaggggaaattgttgtctctagtgaactggagatgcgagggcatgctgttccaatcctctcagccatccaagttgaaattctca

SEQ ID NO: 79983 - DNA, 1047 bp, Homo sapiens
cctgtgtgacgctgcctttttatacactgtcctcctccaccttgatggacccctagtgatgcatcctgcctaggctggacttaaccccttcctccctgtccccacgaccaactgtccccagttactctaaccgttatttcatttagcttccatatatattttcttacctaagagaatagtttcctgctttaagcaaaagacctacaataggtggtggaattatgggatggggtggagtattgatataaatatataaatacaaatgtatatttttcaggatgtggtttaggaactgggaataacgttttctgttactcctgatggtgccatgaaaaggttatgtaataaaatattttaaaatcaggtcacatgactcagaatgttggtggtttttgcttaggctggggagcagttgggaatcaggtctggaatactcctaaccaagaagttgcccaggtatagtaagtttttctctaccgttcacaagttttgtgctgctgcttccctctggaaatggggtttctttctctccgcctacctcagctacctgttctgagggtctcaatctgtttcgtattcccacttctttagggaaggagttttaaaaacatctcttaaaataagaggagcaaaatctattaaaacctattctcctgcaaaggaggcagagactttctctctctcttttttttttttttttggtgtccctatcattaagcaagagcctttctcttttattcttcctgcttccctaagctgctcagggttctctgagtcttgccctctgatggcaagtcttatatataactaaacctatttttgtcacccatcaaaacacatcctcagtagactgtgtgaaggtgtgaaggtctgataatgacttgatgctttgtctccatagacatgaaagccatgccctctgcctctagatagggtgatccaagagctcctgaaccttaggaggttcaaagaagctctactgtctgtgcccaggaggtagcctgccagcaagagccctcaggagttgcacacacagccaaagggtgt

SEQ ID NO: 79984 - DNA, 2146 bp, Homo sapiens
gcagcccctcttttctgcccctccccacacatctctggctgctttctcctctgcagctatgcctgtgtcttttgtgctcataggaaaacaggctggtcagccacagcagtcctccttttctggagagttccgaccctgttgactcccctgcatcctgcacggcacttccctccaccaaagtccctccgtggcaggcctgggccatagctaaggggagctgataacatgcgccttatttaaaagccacaaaactatcttctcaaagtaatccttctgtgagctgttcaccacatcagcctggcctgatgccccacttggcctcagtcagcatggcttggctctgaggccagaagataggaaggacgctgcttttatgtccttgtagtccactccagcctagcctggcacagaggacaggttaagccccctcagtcctggccccgaatgtctgcttggtttggcgcaatccagcgcccctgacctgctctgtcttttttcccaggaaagagcatctacggtgagcgcttccccgatgagaacttcaaactgaagcactacgggcctggctgggtgagcatggccaacgcaggcaaagacaccaacggctcccagttcttcatcacgacagtcaagacagcctggctagatggcaagcatgtggtgtttggcaaagttctagagggcatggtgagttgtggaagcaagggctactactgggcaatcctcaccggggattcaacacagaccccagggcaggagctccatgtgtccatccctttcccaaaaggacccaacccacagatgcagcccagtgctcctgtccagaataaaccctgtacctccatgcctccaaggttctaaattcttccagccccctcagagcccagccaggaaggctgcacaactgccagagcctccctcccctccttcactcagtgacgtgctggtcccacccctgaggtatacagagtgcagctgaacgcaatgtccctgagaagccacatgccctggtcaccctcttcctcctcctcacccttggcccaacctgggtcttacttcaaaggaacaaaattcctgtaccccctcgtcaaatctgcattctccctgctctggccaggagtctgttagaattttggtgcctccagttttgtgtgctgttgatcacttgtgggtcttagccctcctgagccatacgctggggcctttctcctgagcggtggacctcctgatccaccatgccctcctgcttccacctttcttttccaggaggtggtgcggaaggtggagagcaccaagacagacagccgggataaacccctgaaggatgtgatcatcgcagactgcggcaagatcgaggtggagaagccctttgccatcgccaaggagtagggcacagggacatctttctttgagtgaccgtctgtgcaggccctgtagtccgccacagggctctgagctgcactggccccggtgctggcatctggtggagcggacccactcccctcacattccacaggcccatggactcacttttgtaacaaactcctaccaacactgaccaataaaaaaaaatgtgggtttttttttttttaatatataatgtgtgggcctggttcttgagcctgcagcacctcccctaggcctacatcccaacatgcctgcaactctcctgtggcaatgggtgcctgccccttccctgggatcctgcctgaaattttgacccaggagctacccaggaaaagtcaggcaggagcttttgccccctgcttctaaactttgccagctactgggcctccacatttgctccccttgccaccaccctccagtctatgttaagggatgtatctgtactttttcatagcctacctctaaattgattttttttttttttttttttttttggtagagacaggtctcactatgttgcgctggctggtctcaaacttccagacccaagcatcctcctgccttggcctcctaaagtattgggattacaggcatgagcctctgcacccagctgacttcttcctttattatttatttattttgagacggagtttcactcttgttgcccaggctggagtgcagtggcgcgatctcggctcaccacaacttccgcctcctggcttcaagagattctcctgcc

SEQ ID NO: 79985 - DNA, 1793 bp, Homo sapiens
cagctaccgcaggccagtggaacagcgctccgggcggggcgggccgcggagcatgccggggcttgtggtcttctcggagcccgggcccgtgctctgcgaggccgccttccgccggtggccttcctgtgggcgggagagggcggccgggagcccaatgagggagcaataacgtggcaaccacccacgagcccgcgtcggtgcccgccccgcagggggacctactatccggcgccgagccggaggggggaaacggcgcccgccgcccgcccggagcccgcgagcaaccccagtcccccccacccgcgcgtggcggcgccggctccctagccaccgcggccccaccctcttccggcctcagctgtccgggctgctttcgcctccgcctgtggatgctgcgcctctccgaacgcaacatgaaggtgctccttgccgccgccctcatcgcggggtccgtcttcttcctgctgctgccgggaccttctgcggccgatgagaagaagaaggggcccaaagtcaccgtcaaggtccggtggagtccgcggcatttacggtgccggagctcgggcccgggcggccttggcttggccttggctcagcccctcctccctcggcttctgtctgtggcctcgtggcgtctgggccgtcctgcccattcagtccagggaacgacccggacccaccccgacacccccagcccctgccctgacccagggagttagttggatccccggatacccatctggggccgacactggcagtctcagagcaggctttttgcaaacacccctcagtgctggggagatggtgaaagatcacgcctgccggattccgaatcctttctctccttaagccaaattttagccacttccaattacaaagcacagtatgtatacttcaaacttaagtggtgaacttaggctccgctccttatgggttttctaatgttaatttttagaatctgggtccattagctgtttagagcaaatattgttatcctgtagtccaaggagggtatagataagcatgttttccaagaaaagggtctggagctttcattagattctcataggatttttaccgtcaccaaaatcagattcagaaccacttctctaaaaatatggctctattctctctcccatcctcaggttagcttcttgtaccttccctcccctagcaacgcccctttaaagaagctaagttggaaatggtctctttcctcaggtgtattttgacctacgaattggagatgaagatgtaggccgggtgatctttggtctcttcggaaagactgttccaaaaacagtggataattttgtggccttagctacaggagaggtaagtggctggagcaggggtagtcaactcacatgaagtgaaattggcactggggatggcagcaaactgacctgcagagttcagccgatctgtagcgtggacctcactgagcaccgactgcctgttgccctgggaacacagtattgccctttcttaagagtaatggggccctgaccaggcacagtggctcacacttaaaatcccagcacttttggaggccaaagtaggaggattgcttgagcccaggagttcaaggccaacctgagcaacatagcaagaccctgtctctacccccgcaaatttttttttttttttgagacggagtttcactcttgtcgcctgggctggagtgcagtggtgcggcctcagctcactgcaacctccgcctcccgggtttaagtgattctcctgcctcagcctcctgagtagctgggattacaggcatgcgccaccacgct

SEQ ID NO: 79986 - DNA, 1083 bp, Homo sapiens
ctactctttaattactttttcacaggcaggtagcagtggaagaatcatgagagaaaagtttcacattgagagcattttatccatcaacctgatttcttttgaaagtgggagtgggagaaaggctgctgtgatgccattttagccttagctcctcatgtgcaggaggctacttgggttttttgagtgtttctttgtttttgagacagggtggagtgcagtttcacgatcacagtacactgcagccttgaccttctgggctcaggtgattcccccacctcagcctctggggtagctgcgactacagatgcgcaccaccacgccctgctaatttttgtattttttgtagagacaggtttcaccatgttgcccaggctcaaactcctggactcaagtcatctgcctgccacagcctctcaaagtgctgggattacaggtatgagctactgtgcccagctggaggctactttgaaaacatgatttagtaaacatttttctctggctatggcagcctgagaccagtgagtgaagaaagaggcttaacaaaataggagaaaaaaaaaaaaaagggatgagagatggatctggaagatcatctttgtcagtataacaatgtttaaaacttcctcctgattggggttgtctgaattgaggtgcaaggatgggaaataagagaactgtcttgaagctctacaacctgtgtaaggccgctgtaatgaacaacaaagttaatgccagtggccttgcataacttcagtctcaggtcagcgcctcatgaagactacattgcataatttatgtaaatggagccctgcctataatctgtgctgtgacgacctggaatttctacgaagttaatcgttgaaaattagttttaaagacgttttaacgccataggtccaaattttggaagtttgtgttttggtttgttttggtgtgtaagactcccagtaccaaagtatctatgttgtagattgggacaacactaagtgtgtgaagacctaaaatagccctgtggggacatctagtaactattcctgacctccggaaaaaggcattgtatcctcaggccgtggcataaattat

SEQ ID NO: 79987 - DNA, 2773 bp, Homo sapiens
taggattgatgcagttgtttttcctgaaagctaactcagcatctattcataaaaacccttaatagtatacattaggagttttcccaagctctacagtccctcagacattgcatcctaaacagatttgaggcacacaggccaagactccaccaaggcataaatggtcccccctactcccttttgaccagggtatcacttgtgtctctgcagtaagagttggtcaagttgctctacgcaccttggtgctttccagagatctcactccagactgcccccaagggtggatagagtatcctgacagccagtgtgcactcatgactgccttaattaacattcttctgctattatggagcctgtccagcaataaacagggtctaggaaggtacaagattagcttccagttaaaatcccattttatattggaatgcatgagctacagatgacagcagagatcctgaggtttctagacatgttgattgtctcttttttctaaatgaactccaagtacttagaaaacagtccctgtccatcagccagaaaaggtgaccatcacccctaaagtaatttccaaacttagttcagtgggaagatatgctggtagtgcatattcagtgttgattttcagtgctagtaaccacttttaatgccagaaatatgtaacaatgataatgtaacgtcaaagtggttactaaagattatagccttaacttttttatgtaaaagataaaatccattcctcctcccagtgagcaagcatggcttgcatttctcaaaaatgagaacttccatggcagccaagaaaacgtcttctcagaggaactttcgtttgatgcatctcccaagcccacatgcctcctgtgttccagccacctcttccatttcacatttaaaccagctctccattcccattgagttgccctaacaacattgtctccagtgtcagaaccatattaaggttcgtttctcagattgggagcctgcaacaccatacagccaacattgcctttgccacgccactgccaccatccccaccattgccctatggtgggcagatgaattccagaaaccctcagggagccaggataattaggcaacccatctgaattggccacgtaagtgacaggcacttatctctcgggttcttgcttttgcagactccagggaagtcctgtctagaggtcgatggcagagactcctagtctttcccatgaggggttgataggaatcaaattgggattcctttggctttgggttttgtttttttgttgttgtttttggttttcagtttgttttttggtgtatggggggtgattttgtttctgaataagaaaaagaagaggcaaccatggcccttatgtgggtttatcctttttgagcaatgttttagccacaagtaaggaatcttgaaagtcttttgtccagcaagcagtcttaaaaatgtttttcctaactccttttgcaggtgactaagtacaaaaaaatagttttctcattgtattcaaaatagtgagtaggttccctggataatacacagtggtagttgacatattttctcaaaacacaaccagaaaacccacttccggtatttgtaaatcacctttcaagggaaaaagtgaacacgtattccttgtatttctagtttgattaccaaacctgatgttacaaagaaacctccgttctgtagacagaatttcttttatttttcttcttttactcctcacaatcactttcccagtgccatcaccatctataaggtctcagagcagaggattattcatggtaataagtgggggtgtggtgcagccattccagtaacacccacaagaggacagctgttctgaatgtccccacccacccctctttcagtacaggtgagacattttcagttcatgagctccagaccaaatcccaggccagcccttgcaccaaaagccttttttagaaggcttatcagtctattaggaatgtctcaggaaagatgagccatttctttggggagaaatatatttacagatggaagtgtgtgactgcgtgtctgtgtgtgtgtgtggtgtgtgtgcgcacgtgagtgcgtgtgttcatctatgtgcatttcacttccataaagacccagcccaagctgctgggaaccatgtgttcctgagtattctcagaggttaaacaagtgacaagtgagcttctgaaattagtgtctcagcaagctggctttaggaatgagccccattttatcaagcagagaaaaaaaataacagcagaaaagataaagataaaccaaaaatatataccccccaatggaaaataatgttgattcagcaattcccataggatgtattacatgctctaatttattatattattatttatctgtctttgatctttgcccattgtactcttaaaaagatgttgggatgttgattgcgatttttaaacaactagataatgtataaatcagcagtggaaatcagttttaatgtgtggatgtgtctgattattgttaaatgcctctttttttactttttttttttttagatgtataatgtttcataaaccctggcactggtcacaaagctcagctgtgaaaatgaaatttgtagtatttttaaacatgaatgtcaatttcaagtgtatttgaaatggttcctccaggagagatatttgtgcaccattaggaaaatcttctctgcagaggaagtagccttctttggagaaaatggaaaatgggttctgatatgtgatctcagagtagcccatttcctagggcaccatggaaaac

SEQ ID NO: 79988 - DNA, 3161 bp, Homo sapiens
ccagtaatgcctatttcagccctgcctagcctgcaccatcttgataattaggtaggatgactgcagattgaaatcaagcagctatttcctttggcttttctggcagacactgcccactgcctccagtgcgtgcactgtagatggtgggtggtccctatgggtgggtgctagggggaaaattccacccctgcagtaagcagaagcaggcagaagtctgctggaagctgcaggcctcccgcactgacttgcaatgttccttgtgctccaggtgctgctgtttctttaagaggaaaaggaagaagactgctcagcgccacaagtgaccagtgcctcccaggagtcctcaggccctggggactctgactcaattgtacctgcagctcctgccatttctcattggaagggactcctctttgggggagggtggatatccaaaccaaaaagaagaaaacagatgcccccagaaggggccagtgcgggcagccagggcctagtgggtcattggccatctccgcctgcctaaggctctgagcaggtcccagagctgctgttcctccactgcttgcccatagggctgcctggttgactctccttcccattgtttacagtgaaggtgtcattcacaaaaactcaaggactgctattctccttcttccccttagtttactcctggtttttaccccaccctcaaccctctccagcataaaacctagtgagctaaaggctttgtctgcagaaggagatcaagaggctgggggtaaggccaagaaggtaggaggaaaatggcagacctgggctggagaagaaccttctccgtatcccaggtgtgcctggcagtatggtttcctcttcctctgtgcctgtgcagcattcatcccagctggccttggggttcaggttccttcttccctccctcctgtgaagttacactgtaggacacaagctgtgagcaatctgcagtctactgtccctgtgtgttggcgttcttagcttttttgacaaactcttttctccaggtagtaggacaatgaaaattgttctaagcaaaggaaagaaaactgactttgttgcacttttagtttttttaaaaaaaacaaaaacaaaaacatggcagatgcatattgtgtctggttatattgggggttttacttttacctgttttgagggggatggggccggccaagccattcagagagaacatgggtccagaggacattctcagtggaaagagtttgatctgcagcacccagaagagaagccaaactcggtgtcattctgagtgaacactcaggttggcaagaaaacatacttgaattttcattcatcttctcagcagctgaagaatgtccctaccagagcatcttgacctaatcagcttacagtttgaaaacctagctctccagaacatgagatgagccagccgagccagactgtgaccaggaaacagctcatcccagagaaggagatgcttaacaaaaaaaaattgaaattgtttcccatgctgccagggacttccaactagatagccatgtgacgtcctggtgacttgggggaaaaattagtgatgaaacagccaccaccatattgccattagtggaaaaaaagaggacagtgaacctgccttccacctgccagagggacctcagggtgtggcattatagggccaggaaaagaaaatcggtgtatcctatctgccccaatagctgagctgtagcatttgggctggcctgccttatcagaaaccaagcttatgaagatcttctcccagcaggtccatagcagtaggcttaggatgcagtatatggggccgcatttaaaaggagggaaagattgtttggtgctggaacattccagggaaaaggagactggaatgaaaggtctgaaattatcttctcaattggactccttccagaaaggtggccgtgcctctaagcatgtttttcccagtatgccctaggcctccccccatggtgttttcatatgaggtactactgtgaaggatctggttcctcattcactgtttgacaagtctttcatgtgtggagttactcttctcatgcccaattttcatttgagtttagtggcttaaccaaacaatgactcctcattccagcggtgacagaagagaaagggtcatttacatcaggaaagaggtcttgtatctgggagtagagagctaaccatggagcacagtggctggtgggtgacttagtctgatggtttgtggaccatagaagtcttcacctctggtttgaggtgcagggctgtcttttgtactggagggtgtggggatattttctgatagttgccatttcttgaaaaattcccttgatgtaccttacacagagcagaaataacattaacatggatcagaggtactgggcttcatctgttccattggaccttggctagggaatatcatttcactggcatcaaacctgcttagcttatgaaaagatggtaatatgtcatttctataaatgtttctatatatgaaacataaagtggcagggagatacaatatcacaccccttccccacaaggactgtgaatattgggatttatgtccttgccattacctagtggttacagccctatcactaaaatttacatcgtttctcagttgggatttgggcattgctaacttactgtatagaaagtttaacttttcctcacccctgtatagaaaatgccttgcctctcaagagagggcagagggggggccaggtgcagtggctcacgcctgtaatcccagcagtttgggaggccaaggcaagtggatcatgtgaggtcaagagttcgagaccagcctggccaacatggtgaaaccccgtctctacaaaaaatacaaaaattagctgggcatggtggcatgctcccgtagtcccagctactcgggaggctgaggcaggagaatcacttgagcctgggaggcagaagttgcagtgagccgagatcgcaccactgcactccagcctgggcaacagagtgagactctgtctaaaaagaaaaaaaaaaaagggcagagggaaatggtgggaatgcctggagcatcctggcactctatactctactgagtgcctctcttcagcccctcaccctgcttccacacacacacacacaaaagcaaaggcactgaccagcttggctgcagggcaagc

SEQ ID NO: 79989 - DNA, 1851 bp, Homo sapiens
accctgactggggatctagatccataaggtggggatggggcaggcctgtacccaggaattaatctattccttctttcaaacccatcttatcgctgtctcctcctgccataacagtatcccacagtatccaaaattatctatttttagctgagtaaattttctcccaaattaatacaaccagatatggagagggacagaagtaaaagggcaagattactgtatcagtttttatgtagcagttgtgtttactcacagccgcaaggatagtgagttgttgctggataatctcacattctgcaatgtggtctctaacctggaaattggctgctttgggaaaatctgactttttgattcagctggctcttccctctgtagagtagcaacctcaaaaaagggggagctccttcagggagaggtggatgttttgttgttgttgttttgagagttgttttgtttttgtttattgtctttttctttattcctatgtgagagtttagtaggccaaggactgactcagctaattgatatattggagcctgtcttttccactcctggaaaaggttcctggaatgtatttttaggaataacatggagtttatggaaggagaagccctcaagaatccatgtgtggtgaggaacattcttgctacaagacatagccccttcccctgctctcttgcctgtgaccttccaggtactcctgaacttgttggtctgttgcagtctggaattttaactctcccacattgtccgcacgcataaagtcatgctctatatggaggtaacagcctgctagtttcatgactgccatgtttctatttgtcttcagtgactgggttgggcactggtttctgaaccctaactatctaagccagattgcctacaggggcttcctcagggacaggaatgtattaaagaaaacaactgggttttgtggaggtcagatttatagtcttaggggatcaaagaatacctttggctatttgttttgcaaacatgtgtctgtgtaatccgacattgtggtggtctattttttcctgtgaggtgtcagtcacatgatccttactgcagatacttgagggcctgctatatgcttatccaaccctgtgcttggaactctagtggggtggggggtggggttacaaaatttgccccaaagagcttgggtaccatctagctgaagagatcagacatacacatgaaaggataaggagttctgcaggacattgagattactgcccttgagaggctgaggggccaagaggtcaccatggacaggatggtcaaagaagtccttgtaaacactgtaggacttgagttaagtattagaagaaaggaagaatgtacacatatggcagagaaaaggaacatagcaagggaatagctgaagagagagggccaggacatagtaagaatgccatatggaaaaggtagtgggtcagaggcctggggtaagagcactagatggctttgagagtagggagatttggatcgattttgactccagcatgttgagaacttcttgtcatctaaacagtcaaagaatcaactgaaaggaaacctaagccatgaggtgtccaccacctgccttcattctcttctgagaggaacacatctgaaagtcaatcagtggacttggtctagagtctgacccagtttaatagatcctgttgctagtagtcaccacagacaccaaagagttgaagaacagattgtggggcctgctttcttgtaggtagaatcattaaaagcctttgccactgctgaagctttaactacaataactagcaaagataaatccagggctctaaatttgaaatattccaactcctttgaaccataactcacact

SEQ ID NO: 79990 - DNA, 1793 bp, Homo sapiens
tcaagggagccaagtgattttacctttagaagtcagccatgcagttatttttaacttaacaaagtaatgtgtgtgtttttgcaatatgaaagaatctgtgtttagaacaaattttcctcatggaaattcacagatattaactctaaaccttggttaagtcatttgttagtgtttccatctgtaaaaaaacctatttcataagatttttgtaaggattagatttacacacacaatgtagcagagtgtcagacacggagtaggcactcagtatgtaagttattatcatcattatatgattacatcattgatattagtgttctcgcatgatatgggcctgggaaccttccctaaattgatcccttaacccaggaaaacaaacattccagacactgcctgtttagcgaccctgtctggcgctggcaagagatttctgttgccatggtgcctgtcacacacttctgtctttctgtttcaggtggttagctcaaccaatggagagctgaatgttgatgatcccacgggagcccactccaatgcaccaatcacagctcatgccgaggtggaggtagtggaggaagctaagtacgtacatctttcaagggggctcttaagtcatgggttgaaaaatcttttctgtctcttcctctctgtgtgctgctcgtctcagactggatttctcatgcttgtaaccacagctttcttccttaactgttttaatttttgcatggtaccttaaggctgctactgcccttctttagctgtgatttcggggaagacagtcacatttttctagttcacatgaaaaagacatagtgaaccgaaagaatcatgttatcagggctacagtggatagtagccatgagcttcttggggctgtggagcttcttgctctatatgggatatagagaaaaatctgctgttaaaccatgggccatgctgaatagcattcgatttctgattgtgggctagcaactggatgtacaatcatggaacaaggagttcagggccattttgttcactctcaaatgattctggcttcagagagactaagtcaggcaagaaaaatattatagtctgcatctgtgaatgagagtgtgggaaaagaatggaagtcatactcatctcaggagggtaaggaggttgccccacacccttttctgcttctcttgcatgtgtatgtcttgccccacccataccaccagccccttggtgcgctgcatggtctgtgtttaaactcttaaaatctggggtggaaggtgagataactgccaattctgctgcaaaagcagcatttctaccacttttttccccatcccaaatttagatccagatttagacttcaagaagataccaggtagggagagatagagacaccatgagtcagtaactgctgctatccctgatatggaggacctttcttgtgagccctttgagaaccttcaggatatcccagggtcttgttttctgaagcagacaacgtatttatagtgatattgtacctaagtagtctcatgagcccccaggtagcttaatacaagccagaacactcttatacctctaaatgtaagttagtgagatgccactgagacctgcattcttccaccttccagatgtactttgtattgttgtctttcctgcctattcccctggtctcctgcccatcttttttatttatttattttttgagacagggtctctctctgttgccaaagctggagtgcagtggcacgatcatggctaactgcagcctctattccccaagctcaagtgatcctcctgcctcagtctcccaa

SEQ ID NO: 79991 - DNA, 1925 bp, Homo sapiens
gtgaaacgctgtgagcaggccccatgacccagagtcaccaggtaattctcagtggtgatgcttactaatgtttcattcgtgtgagtagaagccaagacattttatttaacgtcttgtctagttcctgaattgtccactagaaacttactatgtttcctgtaacctttgtgctcacagaatgagtttaccagtattatcactggtatgcagccagaatatgtccacaagaagcaaatgaagcactgaggaaattaacaggatagcattagagtgaggagctgtggttttccaatccatataccctccttcctcaactttttggttttgctggtttttcttcaactttttgtattgaaaatttcaactctacagagaaatcgggagggaaatgcaataaactcttgtatatctttaaccttgctgaacgaattattaagattttgccatatttgctttaaatctatgagtgaaagtgtgtgtgtgtgtttgcttgctaaaccatatgaaagtaagttgcagacatcattatatcttatcccaaagtacttcagcctgtatcttctaagaacgaagacattctaagaaagttaatttcataatatctaatatatagttcatgtcacattccacctaattccagttgtccccagaattaatattgtagtgtccaggatttaatcaaggttcatgcctcacattaaccaatgcaatatgcctcatcagtcttttacaatgtcttagtctcttttaatccgttttaatctttaagtctccctgtgtttaaacaaataaaagtcttctataaagattcagctggaggccgggcacagtggctcgtgcctgtaatcccagcacttcgggaagccaaggcaggtggacaacctgaggtcaggagttcgagactagcctggccaacatggtgaaaccccatctctactaaaaacaaaacaaaacaaacaaacagccaggtgtggtggcacatacctgtaatctcagctactcaggagactgaggcaggagaaccgcttgaacctgggaggtagaggttgcagtgagccgagatcatgccactgcactccagcctgggcaacagagcaagactctctctctcaaaaaaaaaaaaaaaaaaaaaaaaaacgggttactaatgagaacaataattatttcttgtttagaaataatagcggatatagcttgctagtaagtagtattcaccctatctgtcccaaaggctacgtgtactatatatttcctcccaccctcctctttatgactattcaggaaatttttgtggattaactgctggtgaggacccctgagctagaggcagataagaataaacagttacggagagagaataacagtaagatgaccacttattgagctgttaccatgtctcatgccactgggctaagcactttctgtgggttgtctgcacagtaaacaccattaggtaagcagcattgttctcccattttagagattaggaagcttaggcatagactgaggatcttgcccaaagacccacagcaaataactggtggagctggggttcaaacttagggctgattagggcaatttctacactatgctgcttcccttatttatgctaggtattatactagacagtctcatacattttcttgtataattctctcatcaacctataagaaacaatctcaaatagatggaagtacttatccaagggcatatgatatccaaattgtttatcctattttgtgttctctcccatgtttcagccaaggtctttaacaagcagagtgttttgtccagcagtgaggccccttttcccacttcccagcacccacataaacaggaataatgtgctggaaatgaaaccaggtggcagaagcagctacacatgcaagagaagcctgattgggtccacattaaccagatgacag

SEQ ID NO: 79992 - DNA, 1064 bp, Homo sapiens
tcattgactaagaaacatctatatgatttctgatactgatttctggttaacctagtcctaccaccttgatgcattcatgataaaccataaaaataacatcaaggtaggattgtgttagtgtcaagtctgtgaattgtaaagacctgaaacttacaagtattttttgaatagaggactaaaggactgcatatgttgctcattccatgatatgtgccttaacgcataagctgagaatgttaatttgtataagtcatctgtttctgagtgggtacccaggaagttgggctgtttccttttttctccctggaatcaatgtgatcttaagaaaattatttctgatttcatttgggctattctgaatctcttttttctgtttagtactagaacatctggtatctcttaacttgtcttacatgtgaatgtttttaataatcttagcctcaatattgttctcatactggtaagtgacaccatcagttgggacacacagtgaactcagagctgtcaaacataaattcttataaaggtgcagacaggtttgtacatgtagaaatgcatcttggtagccttgatcatctaggatatgctgttacaaggagtgattcatggaaagatcttaatcacagcttgaaagacagttttggccctatagaaaaccacataggatcatataggttaaaatgatggattgaggctgggcgtggtagctcctgtaatcacagcactttgggaggccaaagcaggtggatcacttgaagtcaggagttcaagactagcctggccaacatggtgaaaccccatctgtactataaatacaaaaaaaaaaaaattagccaggcccggtggcgcatacctgtaatcctagctactcaggaggctgaggtgggaggattgcctgaatctgggaggcagaagttgcagtgagccgagatcatgccactgcatactctagcctgggtgacagaatgaggctccatcccccccaaaaaaaaccatgatggattggacaagactgagcaacaaagggagagctcatctctacagaaagttaaaaaattagctag

SEQ ID NO: 79993 - DNA, 1049 bp, Homo sapiens
attacttctaatattacaagaataggtttattctcagatctccagcagtcagaataaatgagactaagtgctctgaggatatagacaatgtcagtaagtttataaaatatggccggcacggtggctcacgcctgtaattccagcactttgggaggccgaggcgggtggatcacctgaggtcgggagttcaagaccagcctgaccaacctggagaaaccctgtctctaccaaaaatacaaaattagccaggcatggtggcacatgcctgtaatcccagctacttgggaggctgaggcaggagaatcgcttgaacctgagaggcggaggttgtggtgagcggagatcgcgccattgcactttagcctgggcaacaagagtgaaactctatctcaaccaaaaaaataaaaataagtttatgattatgttgtacaccagtcttattttggaaaatgaaacatttgaacctcttttggcagaaataattgtagtaggggaatattttgggtagctttgattctctctaacataactagcagcataaaatcaaacccctcatttataaggtaatagagcaagtccatacagctgccttctcatagaatatgtttattctctgaggaagagcagagaaaatatgaacaggatcctttataatactcttgtccatatgacttcgtattccattaataaaaaggagtaaattggccaggcgtggtggctcacgcctgtaatcccagcactttgggaggctgaggcaggcggatcacgaggtcaggagatcgagaccatcctggctaacacggtgaaaccctgtctctactgaaaatacaaaaaaaattagccgggcatggtgctgcgcgcctgtagtcccaactactcaggaggctgaggcagaagagtggcgtgaacctgggaggcggagcttgcagtgagccgagaatgcgccactgcactccagcctgggcgacagagcgagactccgtctcaaaaaaaaaaaaaaaaaaaaagtaaattgtagctggtgtacaaagctctgatttttacgagaa

SEQ ID NO: 79994 - DNA, 2023 bp, Homo sapiens
ttcaacatattaatatggaaagaaacttaatcagtagtttggggtactcctacaccccctcttccagaaaggcaggatggttcattttgctgtaggctttctagactattgtcctaaaacgtaagacttccacccattccctttgagattttatttcttcactcttaaattcctctcctgtcatatacatcttctcattgatttttatagctttcaaatagagtttcatgtcaaacttggtcatcatacagccacacaatgcattagtgtattattaattgcttgaaactctctcgttgtccataaatcattttagtggtagttgtagatctaaaatttctcctatttacttcagaacactattgcttaagtctgagtgcagcaagctaggtaaagcctgacaagaattccctaggagcccactgttgatccagggttcagaagccctctggctatagctctgagcataccagacttgggctgcttttgagttactgacatacaccaaacctgttagccatggctgtaccatagacaacttttttccctctggaagcacattgttgaaagacatttttcagttattgttttttttctgttcaaagtctcaatatatgtgtagtagaattacttatctgtttcccccacctggattagcagtacttttagagctgatctaagagagaatgctgaatcatattgaattatggtggccatgggatattactaagcttctgcaattttgaaaatattggccacataatattgttattttcttatcctagccactcatccattatatttgatggtgtttatctgagacaactaaatattttcacaagtaaaattttccagaacacagcagatgtttgtatatatctaaatatataatttctactacatttcttatttgttagtgttagaaaaaaaatcaagaccaacaaatactgcgaatttgagtgaaacaaccattgtgtccaaaaacatattgaatctcccatgtttaggccctcttttaaagtaactttctctctttactctctacaggctgacacattaaaagagagatatcaaaaaattggtgacaccaaaaggaatactcccattgaagctctctgtgagaactttccaggtgggatgctaaaaagacattccagtgtgactgagctttgaaactaggtagagtccatgactgggtatctctagataggggtgctgtttaggtaattaacatttccttttgtgatacagaccaaagtaggttttatcacttttattttgtcagtaaagaaaacatcagtgtcaaattgtctgtataaataacccctttgtggcccaatgcttccccacaactgctatggaaagcattcagctaatgagcagggcctttcatctctttcctaacagaggagatggcaacctaccttcgatatgtcaggcgactggacttctttgaaaaacctgattatgagtatttacggaccctcttcacagacctctttgaaaagaaaggctacacctttgactatgcctatgattgggttgggagacctattgtaagtatccttttttttttttttttttaacctcattacctcctttctccaaccagcactgcctcatgcctttacttgccagtctttctgcttgaatctttggtaaaaatattcctttgatcgtagactgtatatttactagccttgtctgggtgttgccataggttgctcttactagttcagaagtaggaagtattttttcctagtaatataggaagataataacttgtgtgtcctaagataacagaatttaagcccagtttttaggagaagtttcatttgaatgattcagaagtttgtttgtttgtttgtttgttttcccaggctggagtgcaatggcgccaatctcggctcactgcaacctccgcctcctgagttcaagcgattctcctgcctcagcctcccaagtagctaggattgtaggcacacaccaccacgcccggctaatttttatatttttagcagag

SEQ ID NO: 79995 - DNA, 1012 bp, Homo sapiens
ataatgaattggacaagtgtggagtgttcaaagtcgtatgaaaataaagcatgctctggttttcactcttatttttttcctgaaaggccctaaaggcttaagttatcagattattttagaattttagagctggaaaatgacttttcaaattctccccagattgaacactttattttcagatgaggaaactgagacccaaagtaggtgacttgaccatgcttaatttcactggattaaattagtggaaaggataaaccaagatctagatacctaaatcgttgagctgatttaggtacccttattttgggtaccttatttaggtacccttcctgatttaggaacccttatttttcctattgtcccatattctatagttctttttcatagttctcaggatttgaaaagttactttattacttattccagtgagttttaaaaatatattaatctcataatttattttgctgtgaaatcttttttctgtaggcctgatcaatattgaaaatgtggagagttttcgccctctagtgctcaactgtttaaaattcaaacatttgtccagtgaatttttaataaccaaggggcttcttgttacaggaagtggatataaaaatggagaggcaatgagtaggtgtgatacagtatgagaaactgcagagtcgtttctctatctgccctgctttgtgggaggcctccactcaactctccttgttcttttctctttttcatttgtgcatccttaggttgtgtcaacaaactgtttttgtataactgctttttttttcaattatgaatattttattgcaaacttcagacaagccatgtagacaaaggattctgatggtcatgctgttttcattctttttaagattgtttcaattgttgtataccaactcagttttatgttatttatctctgtcagggtacctctccttcccattagtaaccatctttttacaacctccatcaaatcattatttaaaaagttgccttttctttcttcatctaccct

SEQ ID NO: 79996 - DNA, 1103 bp, Homo sapiens
gtggcatttgtctcaaaggtcaccaacagtttgatatcctacctgggaatacttcttttgtctcaaatgcttaattttctgacgtagcatataaacaactgatttcatttgtcatttgcaaattgtgacattatgaggtaaaattgagctatcattttagcagacctgtactatcccactttttttcctagtcttgatatttgttgtgtacgtatttatagcaaaatatttttttgtttacaagtcagtgaagtgactcagggcggtgaaaggagatgaattttactgttatttcaataattaaaaccttggtctggctaaagaaactgttttgatgtattttcctgatatacttctttacagtctttctatcatttgtttctctttcagctttctcgaatggaatacgtgcactcaaagaacctcatttaccgagatgtcaagccagagaacttcctgattggtcgacaaggcaataagaaagagcatgttatacacattatagactttggactggccaaggaatacattgaccccgaaaccaaaaaacacataccttatagggaacacaaaagtttaactggaactgcaagatatatgtctatcaacacgcatcttggcaaaggtgtgtttttttctgttccatgaaaggggcgagtcattagaacagtttattatttctgtaacattatatccccattgtgcattacaacttgtggtttttattgtttcacaaggttgagtgatttttatacatgagaagttgagatggtaagttaatgacttttcaaagaatcctatagactatgcataggttcttaattctttacactgtttccaaatgtttagtttctgagcagtgtgagtacttgaattattgtaaaaagaggatagcattttaatgagtttagtaatgaatttggtatttacttatgtatgaccctatatatgatagtcctgaagaggacatcaggctgggtcagcggtggggaagagtgcctcactaaaaatggagtagacttctgttcactgcacatagttctgcacagaagtcttcaaggaagagcttctgtcttattcagtgaaaatatacttggtttacc

SEQ ID NO: 79997 - DNA, 1061 bp, Homo sapiens
aaaagaaaagaaaagaaaaagaaaaaaagaaggggagaggcatccctgtaatcttagcacttgggaggtcaaagcaggaggatcagttgagcccagaaattcaagaccagcctggacaacatagtgggagctcatctctggaaaaaatttaagaaactagcccgatgtggtgtcatgtgcctgtgctcccagctgtttgggaggctgaggcaggaggattgcttggtcccaggaggtcgaggctgcagtgagccatggtcataccactgccctccagcctgggtgacacagtgagacactgtctcaaaagaaaaaaggagagggagaatggatattgggcatgcaaacaacaggcgctgccacaacctgctttgaagaatataatatttatattaggaaaataacattttagtggcattaaatccttatataggacataaatttaaaagatccccaaactgcatttaccatgtgtctgattaataaaagcagtaaatctctaggacagagtgttctgctttggatgtctcagcaggagtcattggaaacaactagttgggttttatatatttttaaaaagctgaaaaatgacttcttcaaaacaaccgggaaaaaaagactctttggggcctggtgtggtggctcacgcctgtaatcccagcacttcgggaggctgaggcgggcggatcacctgaggtcaggagtttgaggccagcctggccaacatgggggaacgctgtctctactaaaaatacaaaaattagctgggcgtggtggtgtgcacctgtaatcccagctactcaggaggctgaggcaggagaatggcttgaactcgggaggcggaggttgcagtgagtcgagatggcgccagtgcactccagcctgggctacagagtgaaactccatgtaaaaaaaaaaaaaaaaaaaaacacttcaaattaaatccttttctcttttggagatagggagaatcaagacaacaacaaaaacaattgaacagatatttattgaactagcaggagtaacatatgttagaggatacaagctaggaataaacatat

SEQ ID NO: 79998 - DNA, 1004 bp, Homo sapiens
cttaaaagtgttctctagtacacctgctttttttactttttctgttttattattctgataagttggaataatctttgattatttgggacttctaagagaacaaagcacttcctaaaacactttaaaaatttgctacattactacatatttgttaggctttctgttagggacagttctttcatcttgatttcttctgccaggttataccaatcaacctgtatagataagcttacataacatattgttgacatgattgatcgttacatttcatttcctttttaaaaacttttattctgctttgtatggccactatttaaagctaaaaatggaactcttacaatctagtatggtgtgactcagtaccgcatttctctttcaaataagtctcaaagccattttagaggataacagttttgtctacaggctttcattcttgcttttgggcttctgttctccaaaggaagatatgaaggcagtaattgagctctttggattgtaatggtcaatttgccttaagcactacactcctataaggtagctgtctgctgtttgtttaggattttaggcaggcatatgttttccagaatatggtaaatattctggcaaatgcacagccctctatggaaatgtaatcagcatctggcacagaaatgcaaggaagctctgctgctgctgtttctgttgtactttgtttggatcttcattgtggactcttttttcttagatttcttagatttctaaaaacctttaaaaaaatcgtacacaaagtaaacaaaatagtgtaatgagcccctcctttatccatcacccacatttctagggttctttttaacagaggttttctaacagttgggtttaaaaaaaaatctcctgtgctgctaatattgctgccttctgtagtctgtagactgagttttgcaatgccttctacttatagtgcttccagaaaagcaccttgaagcccaattggctgagcaggctatggccatgtgctaaggagttgg

SEQ ID NO: 79999 - DNA, 1017 bp, Homo sapiens
tatgccatccaaagttgacacgaaataccatgacaaaatatatagaattctatttgccagttagttcgaagaatgaaggtttgtgtttattgtgccaagagctaaaatctctttgaaattctggcatttcttcttgaattgccttgtggcttaatagttgggaaatattaatatgcatgcatgtgtgtgtgtgtgtgtgtgtgtgtgtgtgtgtgtgtgtgtaagagagatttgttttctcttttaggaaaattctcaggtatagcttaaatttctaaattttcaagctgttctagccttgctagatctcattatctctgtagcttttcgcttataaatcaagtttcatttatgtgaacagcattgggaatataacctttctcatgaccctgtaagctaatattttgctttgcttttcccagaataaatgtcactaaaacatatacattctgctttcctcttaggtaaaaatctctacaccaatgaatatgtagcaatcaaactggtgagtagaatctgtttgtggtaattaatgttttggtgctcccattgcttatatctttttataggaaatagttttaagcattcattcgcaaaactgctaatggtttggggttttttttgtgtatgatcccacatttttcttcatttatagtgttaacagtgatgaatcactgtatactatataacactatatagttaaatgatactaactttagtgttagcaatgatgactcaaaaattagttgattaaaaaaagctggaagaactagtaactctgtgaacttaatctttcacagaggtatcttaaaaagataaaatcattcaaaaattttactgtttttttctctaacttaactgatttattttttgtacttagaagaaaatcataactgatcatctaatcatggccttaaaaatctgtcaagcatggaaaacataccatatggtcatattagaagcaaagaagtcaattggtatattagtactaaccttgtgaataattaaactagtcat

SEQ ID NO: 80000 - DNA, 1732 bp, Homo sapiens
tcccagcactttgggaggccaaggcaggcagatgacttgagcttaggatttcaataccaacatgagcaacgtggcaaaacctcgtctctacaaaaaatacaaaaattagctgggtgtggtggtatgcacctgtagtcctagctacttgggaggctgagatgggaggatggcttgagcctgggagcctgatgctaccatgagccaagatcacatcactgcactccagcctgggcgacagagtgagaccgtgtctcaaacaaacaaaaaaccagattgtatggaaactacattggcagagaaggttaataaaggcttcaaagaggaggtatgatttgatgataggacaggatttctgctggtagacataaggaagaagagcttgtgcaggatacacaatcactagatactgtgcaagtgcccagcatatcacagcagcatttagttatacatgactgggtcataggatgtgaagtgaaagaaaagtaatagaatgaagcttttaggtaagttgggacgaaattgtgaagtgtttgcatatattaaagcatttggactttatcctgtaggcaatggggtcgaatcatcaggagttttacaacagagtgacataatctagtttatattccagaaagagaattcgggttgtattgtaagattagatcaaataggaaagaagttgacatcttgtagattttgctctaattgtaatacttatcatgttgtactttattcttccatttctctctcccaagataggtgtaagggtattactttgctttttagtcctcatattctaattcctttcactgtgtgtggtatgtaatgggtactcaagaaaggctgaattgtccaggtcagaagtagcagggcctttggtcttagctctgaaaatggaagtgagatggagagaggacagggtaaattagaaattttagacatagactttaggcaggatttagtcactaattatttgatgggaagaagtcaaagatgactaaatgtgccagcttgaagagaccttataaatgaggaagatgtaaacccatttatgccggaagctgcaaatttttttgtgaaaaatcagaccttggtgatgacctcgagcagtgtatataaataactcccaccagcctagcgttccaataatggaacactaggcataaatgagttaattgagatagtaaatataggactagggagagtggttgggaaggcaggtaagatagagtttgtgaatatttgaggactgggtgacacatatgcagaaatgcatatctgagacttagaaagttaggcttgagatagggattaagaaatcacaccaaactagagatggggtttcaccatgttagccaggatggtcttgatctcctgaccttgtgatctacccacctcggcctcccaaagtgctgggattataggcatgagccaccgcgcctggccaccccccgaccctctttttttttttttttttttttttgagacgaagtttcactcttgttgtccaggctggagtgcaatggcacgatcttggctcactgcaacctccgcctcctgagttcaagcgattctcctgcctcagtctcccaagtagctgggattacaggcacctgccacaacgcccagctaattttttgtattttttgtagagacggggtttcaccatgttggccaggctggtcttgaactcctgacctcaggtgatctgcctgccttggcctcccaaagtgct

SEQ ID NO: 80001 - DNA, 1231 bp, Homo sapiens
tttagcactgctctgtatttctgttagccagtgatgaaaaacaattgtctttctttttggtcatagatacattactagaagaaagcattctatattaaaggcttgtgtgtttctgtagcttctatggtttgcagcctactgagcttatgatactatgtgaataactaatccagatggttaaactattggaggatagaaaaccaaaacccatttcagaagctatgcattttgctcacctttggataggattcattctaattggtagtgactttctgaatttgtttcaaaatttaatttttaactacatgttttcttgatttttacctaggttacaagatgttcacctaagattgagacctagtgactacatttcctacgggaacaaataaatggtttttcatctcccggagatacattacaaacaaatatggtgctaaaagaactccttacctttctctgactacaatttatttggacatacttttgtattgaagagaggtatacatactgaagctacttgctgtactataggagactctgtcctgtaggatcatggaccatcctagtagggaaaaggatgaaagacaacggacaactaaacccatggcacaaaggagtgcacactgctctcgaccatctggctcctcatcgtcctctggggttcttatggtgggacccaacttcagggttggcaagaagataggatgtgggaacttcggagagctcagattaggtaagcacttggttatgtcagtgacttctactaacaacaatacctatgataagctttggtgtgtttcaagacaagccgtttatagttttacaagaaatttttcttaaggagaacctgttgttaagaaataatttgtgaaggggcactatagtcattatcaattatttgttatccaaggctcatctctctttatgtgtgtgcgatgggcttttaagttttctaccagttctgagattttctgatgaacatagagttgcatacagatatcagtaaaatgcagactctgatttaggatgtctgaggtggagccccaaattctgcatatttttacaaattccaggtgatgcagatgctgttggtcttttaagaaggacataaggccttggtttaattcagactctgcccctgaaaagaaaagagtaaatccttactcagtaatacccaggcttagtctgcaaggatatacagtacatcctgtttggagaaattttccaaaag

SEQ ID NO: 80002 - DNA, 1043 bp, Homo sapiens
agctatagagtgagaagataaggggataatggcgttttgaaggaaggaggggagtaaatataactttaaagattttaattggatgggtgaaattgtttatatgttttaagtatagtcagtaattggccaggcacagtggttcatacctgtaatcccagcactttgggaggccgaggcgggtggatcacctgaggtcaggagtttgagaccagcctgaccaacatggagaaaccccatgtctactaaaaatacaaaattagctgggcgtggtggcacatgcctgtaatcgcagctactagggaggctgaggcaggagaatcgcttgtacccaggaggcagaggttgcagtgagccgagattgcgccattgcactccagtctgggcaacaaaagtgaaactctgtctcaaagaaaaaaaaaaaagtatagtcagtaattaaataattttttgagactggacaaaagttaaataaaagtaagctagtaattatattcaatgtcatagcagattttaaaccacagcttttcaggttgccagtaaataccacacaaaagcaagaggaggctggttgtgctagcttacacttgtaatcctagcactttgcgaggccaaggcaggaggatcacttgaggccaggagttcaagaccagcctgggcaacatactaagactccattttttaaaaagaaaaaaggaaaaattagcccagcatagtggcgtgagcctgtagtcctaggtactcagggggctgagacatgaggattgcttgagcccaggaggttgaagctacagtgagatgattgtgccactgcactccagcctgggcaacagagcgaggaaaaaaaaaaacaacccaaaaacaaaacgaggaatgtaaaagtgcagtgcattttacaatgttatgattaaagtgaactctatcttaaattttataataactgactttattttacttacttatttagtttttgagataggatctcctctgtcacccaggctggaatgtagtgctcactccaggctctgcctcctggacttaagtga

SEQ ID NO: 80003 - DNA, 1019 bp, Homo sapiens
attgcagttagtgaagaaattatggatttataagaagtaaattttccaggaggtttaagtggacttaaattaagtatttcttataattgaaatgtgtatatttctttcaggtaccaggtgtcactggatttctatgagcaaatttgttatgtttcacgttccagatagaaatcagccaatttaaaaatagtggtgaagttattatagcctatatttaatgagcacacatttggctgcattaaaatgaatcttaatgtattttttgcacagcggagataatctgttaatatttaatgccataaagcaacaatggaattctgctttcatgtggtgtatttataaaactagagtagagtgttatgtaaaaactaaaagtacagattaatttaatatgcatctggtgaattcagggcttgaaggatgcacatctgttgagaaaacaaatcatagaactattcagagtttcagcatctttaaatatgtgcgctttgattctgttttaactgttttgaaacagtctttaatggatttagaaaaggccatttgctctaaggaagcaactgtgaagccacttacaatgctattattcattttattattttttaaagcatttttatacattactatttttctttccaatttatttattggggaaggaaggggctaaatgactcaccataacaaaatgagtttgttgcagaaccatgtttaaaaagaaaggaatgtaatttgctgaattcaatagattagaaatattttaaggctttgtcaaaataatacgccaaaaaatattttaaggctctgaattctaatttgaactcacaatcagtgaagaaataatcagtttctactgtgtattcatcaccatactagagctgtggtaatatagaaattgaagatatagtctatatcttcagcttctatattaccgcagctctagtatggtgatatagattatatcttcaatttcgagttgaaagaaacaagacttaaaatgaaaggtagagaataacacagat

SEQ ID NO: 80004 - DNA, 1343 bp, Homo sapiens
tgcctcatcctcccaaagtgctgggattatgagtgtaagtcactgtgtctggccaatttggggtttttcctaattagttaatgtaatcacatggttcaaaagagtatatatagtcaaaggacaacttgctatatgttttctctgctaaagtggattggttaatttttttactttttgttaccacaaagttcttgctgaaggattatattgtttatcaatccatttaataacatgttgaaataatatgctatataaatagattctttttttaataaaaattacaacgtagtctaaaggagaaacactgattctgcaaattaacaggcaaataaattgttaaaaattttgttgcattaatacttgaaatttgtaggtgtttgttaattaatgaagtttaattttctttcatttctagtcattagaccagatctactgcactgttaattaatgttcctgatttatataggtttgtaactatttttttcaaacagttgatacttggatggctattgatgttctctcttcttttcacagagcatgtcctttgcaacctgatcacacaaatgatgaaaaagaatagaactttctcattcatctttgaataacgtctccttgtttaccctggtattctagaatgtaaatttacataaatgtgtttgttccaattagctttgttgaacaggcatttaattaaaaaatttaggtttaaatttagatgttcaaaagtagttgtgaaatttgagaatttgtaagactaattatggtaacttagcttagtattcaatataatgcattgtttggtttcttttaccaaattaagtgtctagttcttgctaaaatcaagtcattgcattgtgttctaattacaagtatgttgtatttgagatttgcttagattgttgtactgctgccatttttattggtgtttgattattggaatggtgccatattgtcactccttctacttgctttaaaaagcagagttagatttttgcacattaaaaaattcagtattaattaaacattacttattctaccctcttttttggcaaggaggacaaatacgcaatgttggaaaaccttggatggatatcttctctttaaaaaaatgtaaagataatttggtcttgagggtttaaacggttgataatgcctctacaacaacaagaaaaaagataaaatactaggatagaatcatggtgggcacagtggcttctcaggaggctgaggagggaggtttgcttgagtccaggagttggagaccagcccaggcaacatagcgtaaaccctatctctaaaacaatttttagccgggtgcggtggctcacgcctgtaatcccagc

SEQ ID NO: 80005 - DNA, 1077 bp, Homo sapiens
cacgtgccgccacacccagctaatttttgtatttttagtagagacgggggtttcaccatgttgtccaggttggtctcgaactcctgaccttgtgatccaccctcctcagcctcccaaagtgctgggattacaggcgtgagccactggacccggcaagagtatttgaatagctctgcttgtggacaaaatataaaaatatttttcagttgtaaaaattctgttactactgttattgctaagataaccatcacactgagtttattggtggaatacagctttattgtgtcacattttctaattctttaagttgtatatcttaaataaagattatttaatacctttgagaatttgatgttaaagaaggaattaagttgtttaaggaatagagattgtattattagcacttatctagttccatctgtttatattttacagctgaaaataaatatgcaggagggaaccccgtttgcgtgcgcccaactcccaagtggcaaaaaggaattggagaattctttaggttgtcccctaaagattctgaaaaagagaatcagattcctgaagaggcaggaagcagtggcttaggaaaagcaaagagaaagtaagtttttatattctggaatataaagaaaatatttatctcacgcctgtaatcccagcactttgggaggccgaggcgggaggatcacttgaggccaggagttcaaaaccagcctgtccaacatggtggaaccctgtctctactaaaaatacaaaattagctcggcgtgctggtgcacacctgttgtcctagctatttgggaggctcaaacaaaagaattgcttggtgcagcaaaccaccatgcacacatatacctatataacaaacttgcatgtaatgcacatgtatctcattttcacgccactgccctccagtctgggggacagagtgagactctgtctcaaataaaaaattaattaattaattaataaagaaaatatcttgaaaataaaggacaaataggatattgagtcaagtttctcttcaagctcataagaaaatgcaaaaaaagtttttaaaaacttcttctaatttcttat

SEQ ID NO: 80006 - DNA, 1048 bp, Homo sapiens
cctgagtagctgggactacaggcgtgtgttaccacacctggctaatttttgtatttttttctagagatagggtctcactctgttgtccagggtgctctcaaactccttggttcaaacggtccacctgtctcggcctctcaaagtgctgggattatgcatgtgagccactaagcctgattttagaatatcagattttaatttaacttcttagtcccagccacttgtttgacttctttttcattgactgcactcttggaaatgatgatttaaatttaattctggtttgacaggaaaagataattaaaaatcttcctgatgatatcttgactctaaatattaagcatcaccttagtttattagctatattagttcaccaggaatcctcttatcaatctgtgtgtgtgtgtatttttttttttctatctttaaagaaattttagatgggcagaaatcaggcgaccatctaaagcggggtaggaagaaagggagaaacagacaggaagttcctgcatttactgaacctgacacgactgcagaggttaaaacaccttttgatttggccaaggtgagtgcttatagattgaagctttttctgactattggagaagaggaagtgactaatacatttcagagagcaaagtgtacaaattggtctagaatggcaatttttcaacaaatgcatgaattttaggtagaaaaagttacatatactcctttctatatggtagattttttgtttggcaacctgattagtattataaagacatctttgcttttttttttttttttccccaagacagagtcttgctctgtttccagtctggagtgcagtggtgcgatctctgctcattgcaacctccgcttcctgggttcaagtgattctcctgcatcagtctcccgaatagctgggactacaggcatgcgccaccatacccagctaattttcttttttttttttttgagacagagtctcgctctgtcgcccaggctggaatgcagtggtgtaatctcagctcaccacaacctctgcctcctgggttcaagcgat

SEQ ID NO: 80007 - DNA, 1046 bp, Homo sapiens
tgcttaaagatgtcatataaacagatttaactgctacatttaccctccactagctatagtaatgggctgaaagctactagcagaaaagacaaggtaattatcagctagtttttctagagtataacctttcctcagaaccttgattataactaatttgtatttcttcctttcactgccttctttcttggttcttggatagtatataagttgttactgaacagaacggagcattttctcccttgactttttacattgtcattaattatttgatgttattttgatgtctttgtacgataggcacaagagaacagcaactccgtaaagaagaagacaaagtttgtcaatttatacacaagagagggacaggacaggcttgcagtcctgctccctggtcgtcacccttgtgattgcctgggccagaagcacaagctcatcaataactgtctgatctgtgggcgcattgtctgtgaacaagaaggctcaggcccttgcttattctgtggcactctggtaaattatttcttttctattttattttactgtgctttgtgttaatacgcagagccagtcagatctcaagtaatttctctttttttgtttttttttggttgagacggagtctcactttgtcgcccaggctggagtgcagtggcacgatctcggctcgctgcaggctctgcctcccgggttcatgccattctcctgcctcagcctcccgagcagctggaactacaggtgcctgccaccacgcccagctaatttttttgtatttttattagagacgggattttacagtgttagccaggatggtctcgatctcctgaccttgtgatccgcccacctcggcctctcaaagttctgggattacaggcgtcagccaccgtgcctggctttctctttttcttagtaaatttcttccctaaaatatccagtgaactcgagtgtcagggatatgattagttagaaacccaaggttaggccaggcacagtggcacacgcctgtagtcccaacactttgggaagccaaggtgggttttgggaggctg

SEQ ID NO: 80008 - DNA, 1071 bp, Homo sapiens
gatgggattatttttcatttgttgttgttgttgttgttgttctgagacagagtctctcttgcccaggctggagtgcagtggcacaatcttggctcattgcaacctccacctcctgggttcaaatgattctcctgcctctgcctcatgagtagctgggattataggcacctgccaccacgcccagctaatttttgtagttttagtagagatggggtttcaccatgttagccagactggcctagaactcctgacctcaagtgatccacccgccttggcctctcaaagtgctgggattacaggcgtgagccacgatgcccggcctgggatatatttttctaagaaaaatgttcccaatatgatttcctcattattagcattcgcatcattttgtctacctaccccagattcttgccttataagatagaactgtatgtttgtttttctgtgtagtgggttgaccacacaggtgcagcctcacagaagaaggctttccgttcttcaggatttggactagagttcaactcatttcagcaccagttgcgaatccaggatcaagaatttcaggaaggctttgatggtggctggtgcctctctgtacatcagccctgggcttctctgcttgtcagagggattaaaaggtaagaataaaaatgaatctgggcagtggaagatcttagagtgacataaatttaatttagaaatatgaattggaattagttttcctcaatctagtgatgatttataatactcttcaataaatagaactttgaacaacatattcatgttactgacttggtagcagtatattttaaaattaatttcaaaacatttaaattgacaaatatagtagtagtttttgtactgaatagcttaaacaaactgagcataaaaaggctaagaaagtcataacaaagatagaagactaattttttcatctttggaaggaaatctattgaaaaatcttctcttggctttgctttggaatatactactaagcaaccttaataatttgatcctatttgaaacatagttttgatgcctatttacttattaagataccagcataactga

SEQ ID NO: 80009 - DNA, 1156 bp, Homo sapiens
gtagagacagggtttcaccatgttggccaggctggtcttgaactcctgacctcaagtgatctgcctgccttggcctccaaaagtgctggggttataggtgtgagctactgagcccggcctaaaagcacacttctattcctattgatatggactggcttgttttaaagacattcattcttatggttttaaccacattttgatgttttttttttcttgtcacctgtaactgccttactttgcttccaaaactcatcactgccaaactccaatctgatccaatggcgtatagtagaatcgatttgtattaggatgaatttgtggggtccttgaactttgatggtatgagggcaaaggaaaaattttctagcttaacatgtggatagtggactaagccagccactcactagatttttttgctaaaatgcaaacagttgtgccaagtaaatttcactgttttccttatgtctacaaatagataatggaaaaagttattaatgtttgttcagaattgaaaacagattcctgagttccaagatcacaaagaaggaaatttattcaatatttttgttattcctgattcagatgtggaatttcctaatgactatccgtcaggttgtcttctgggctgtgtggacctaattgactgcttgtcccagaagcaatttaaggagcaggtgagtaaagaatactttttttttttagagacagggtttcgccatgttggccaggctggtcttgaaagcactttaagaggctgggcctcttaaaagtgctgggattataggcatgagccaccacacccagcctggtgcatataaatatctgtataaaaagctgtttccaggccgggcgctggtggctcaggcctgtaatcccaacactttgggaggccgaggcaggtggatcacaaggtcaggagatcaagaccatcctggctaacacagtgaaaccccatctctactaaaaatacaaaaaattagccgggtgtggtggcacgtgcctgtagtcccagctgctccaaaggctgaggcaggagaatagcttgaacccgggagatggaggttgcattgagctgaggtcctgccactgcactccagcctgggcaaccgagtgagattccttctgggggaaaaaaaaaagctattgccacaatgca

SEQ ID NO: 80010 - DNA, 1749 bp, Homo sapiens
ttcaggccttactggaggtgttgtctgtctttagactatttccaactctgtgtcctaggaatatttgagtgaagcctcagctaaactgagtccaaagctttttgctcttgggctcttggcatttatttctgaatgctgtcaggtgacagtgaaggcagaagcctcagattaaatttgtcctgattagatttagtggcttcagagttgggcccttgccacaaggaatctcatgtgagtcttctgattgtgaccatcattcaaagagtgctttggattcccccccaactacccgtcccagcttcttggtagaaaaaaatttccttgtgatagaagtctagaaagttggacagattagtgcttattttgtgaggatatggaggcataattttggctcctggtagcaattatgttgcaattagcatatagcaactaaatgactggaacacgataatttgttgaggggtttactgattgctctgtcaagtggaagtgccactccttatttattttatttatttgactcagaacactattgcctgagcttagccatggaggctaagtatagcaatgatatgtgttctccagaagttcccactctgcttcctctttgtagttacttcttttccaggtaccttagtacttgtactgcccttttctcctactctgaaggtagctaagcaattgttatttccctcatggaaaactggtcatggatgggaatactgccaggcagatgggattagcctgagatgaggcagccttatattgtgtgggaagttttcttttcagtctcttaattctctcttctacttgatttttcaaaatcagtttcctttaaagaaaacaaacaaaaaccccacaaaatgcaaaatatcgtaatgtattaaatatgccttcatgatacctctgttataaaagttgtctgtgacagacaaaatgaagataggtgatgttgattggcaggttctgggtccactaagtgtcagtgaaggactcttttcgctagggaacaggtaattcaccaaagcacctgcctagctgggcatgtggaattggcagcagctgtgtagctgaagagggattactgagcaggtggttgaagaatcacatgccacagtgacaagaaaatacttggtcttccgtgggttagattcagtttgtatgtgtgaaattgcactttgtttcacatttcttaatgcttgttgatttgttagtaagatggtaatagaatagagaaagagattcttctgtaactgtggttttttagatcactcagtagcatgccctagacatggccctacacggctctattgtatttatgggagttctggctttatgctttgtgcatgggagggaaatagtggtaattcagtgtttctagtacttgtttattaaagggaaatgggaaggagaaaatttcttgctttcagtatggtgaaaaagatttagcctactgggtggatacctaataggttttatgcaaatgatgtaattgactttttgtggaagtctacctgacatgccttactcaagtgattttgcatgtgtttttatattatgtttttatattatgaatatatttccccacatgaagtttgcatctcttcggttgtttatttgtttgtttgtttgtttttcttttttgagacggagtttcgctcctgtggcccaggctggagtgtaatggtgcgatctcggctcactgcaacctctgcctcccaggttcaagcaattgcttgcgtcagcctc

SEQ ID NO: 80011 - DNA, 1009 bp, Homo sapiens
gccaacctggacaacatagaccccatctctacaaaaaatttgaaaacctgccatggtggcacactcctgtagttccagctacatgggaagtggatcacttgagcttgggaggttgaggctgccgtgaactgtgatcatgccactttactccagcctgggcagcagtgagaccctgtctcaaaaataataaaaaaaataaagaccaagaatataccttgtaaatttcagctacaaattctgaaattcggtgtaaagctcagcatttatctgttttggaacagatgcttctagagcagagttctaaagaatggtatcaaaaatgaaactataagaaaagacatggaattgtaaagcttatgacatatatatctgaagggtaaggaagggaagaaatttgtttctacttggcatatgctttcagatgtacttcccgttcataatttgaaacccgcctatgcttttctccttgaagcattgctgttcttccagttgctttggcttaaaacttttgactcatatttggttcttttttttttttttttttttttttggagacagagtcttgctctgtcgcccaggctggagtccagtggtgtggtctcggctcactgcaacctctgcctcctgggttcaagcgattctcctgcctcagcctcccaagtagctgggattacagatgcccaccaccatgcttggctaatttttgtatttttagtagagacaggatttcaccatgttggccaggctggtctcgaactgctgacctcgtgatctgcctacctcggcctcccaaagtgctgggattacaggcatgagccaccgcgcctggcctcatatttggttctttttttcgtcctcaccacctcatctgaatcattcaccaaattacgtatctaagcattcactaattggatagcctgacatttagcctcactagttagcctttttctttttttttgagacagagtcttgctctgtcacccagactggagtgcagtggtgcgatatc

SEQ ID NO: 80012 - DNA, 1461 bp, Homo sapiens
tggattacaggcatgagccaccgcgcccagcccgcatgttgtctttaactgtaattatttgtgaatatattttcttcatccctcattttaagctcgtgagatacctgtgtctcctctgttccgtaaactcttagcccagtgcttctttgaatataactttatgcttaattaatgcttgatgaattgaattagaacttgattcttgaaaaaagaaattgtgatttttttagacttctttttatgcaaaagtaacgtaacttccattcaacacattttatcccaaattgaataaactagggaaaaggcagacggtgaatgccttgagaaattgttcagattcaaggacaagcatttgttgcctttactgcatatgactgtactgtggttccatacatccgagctgatagaaaacttgcagcaagggtctagtggtgatgcatggcaggtggaggtgagataaatttagtcacaggaaccaaattggttctgctagggcaatataggcattgttgggccatctgggtgtggttgacttctgggaggtctttttagtttttctttctcacttcattccataaatatttattggatgccctgttctagttgtttaagatcaatgaacaaaatagaccaaaaaaaaaaaatcaacctcatggatattatctttgaataggagatagaaataaacataataatatataaaattagaaaggtaatatatgatatggggaaaagtacagcaggataaggagaattgggagtggaaaagagggttaggtaggagaggtgggaggggttgcaaccctaaataagatggttaaagtagagatctttgagaaatgttgtgttactgggttgttaggcacttccctgagattagtggattctcttctgcccagcagagagaaaggcaatgtctacagttgttccagagtccagctgacactgaggagaaatagctactccttatgttcttttctcctgtctgctcctcttgctggcatcactggaagttaactggggtgaaaattgcagtcagtcttgtctggaagacagcaggggtggaactagagaccttctaacccagttccctgaggggtgggatttacccttctgctgactgagccttggttgcctggagtgatgggtgaggtaggcctctgacttttttccttcctcaaagggagaagcccagtatcataaccttctctcttcttagtgaggcctcagcaactttatttcaggtagctctttaaaaataagctttcaaagagtgtgtgctatgcgcctggcctaaagcgtgaattttcaggtttttggtgctttgacttcctctcaacacattagctgtgttttggaagtctcagtacctaatttcagcagcctaaagatgaagttttcttatgtctagatgctctcttgtttgaattgcacattgtaaatttatttgtttattccctt

SEQ ID NO: 80013 - DNA, 1757 bp, Homo sapiens
atcctcttgcctcaacctccagaatagccaggactgtaagcacacatcatcacacctggctatttcagcttctcacagatgaaataactgaggcccaaatagctgtagtgacttcccaatgttattacacatctagggagagtaaatagtagaattgagtttttctgcctgcttacttggttttgtgtttttttttcccccattgcactgtgctgcttccttgttaatcaaatattaacaagtttgatcagagggtgctgtttcagtttctttccttttttttttttttgtcctggtgacattgcctccaaagaccatcttgatgataaataagttctatgtggaagagtttagtgacattcatcttatttgacattttaataaatgtttcacataagtgaaatattgagattttcctatgacattaaactcttccaggtagttaggtccccaaattgttgagattatgcttcaggaatatcttgactgaggtgaaaagtaaatgagcttcagtgtggataagaattgcatttaaaaagagggagaaagtctaaactactttcttaggatgtgtaatttttagctaacaattgcagcccccagtagaaattaagaatcttggccgggcacagtggctcacgcctgtaatcccagcactttgggaggcagaggtgggcggatcacgaggtcaggagttccgggccagcctggccaacatggtgaaaccccgtctctactaaaaatacaaaaattagctgggcgtggtggcgcgtgcctgtaatcccagctgttcgggaggctgaggcaggagaatcgtttgaacctgggaggtggaggttgcagtgagccaagattgcgccattgcactccagcctgggcaacagggtgagactctgtctcaaaaaaaaaaaaaaaaaaagctggatgcggtggcttatgcctgtaatcccagcactttgggaggccgaggcgggcggatcatgaggtcatgagatcgagaccatcctggccaacatggtgaaaccccatctctactaaaaatacaaaaattagctgggcatggtggcgcttgcctgtagtcccagctattcaggaggctgaggcaggagaaccgcttgaacccgggaggcggaggttgcagtgagccgagattgcgccactgcactccagcttgggcgacagcgagactccgtctcaaaaaaaaagtgaaagaaactaggaatcttggtaagatattcctcgcaaaattaacttagtgtactgccacggaaatgctgggcatcattaggaagagaatcagtaccaaataaacaaagataaaaataaacttccatctgtgtaaaaccaaggtttgtttatatttgtgatactgtgtattctgttgaccccgaagaagtatttatcaaagctgatgaccaaagaaggtgaaggctttaatgaatacatgcaaagaaaaaaaaaattcagcttttaaagacaaagggaatataatgtcaagtgatgaaaagaacatatagacttgatcaccagttcttaggatcctgtattagatatggaacactcaggttagaagtgattttagcttaatgattgggctactcttataaatagtaaataaataaaatatgtttaacggcggtagaaatttaaaaatggaagataaagtgtttgcatgttttttaaattacactttttattttgagataattatagagtcttacgcagttgtaagaataatgcagtggggttgggtgcag

SEQ ID NO: 80014 - DNA, 1221 bp, Homo sapiens
agagtttttaaagcttttgctagatcatgttctgcgtctctgataatgtaagaaaaagcaaggagaaatgggggtataagtaaagttgtgctagagcttgcatctgtgatatgccaggacctgtattgattgaggaagggttgccagctgacagtggtagtagaaataggtctcttaggagtgggaaattaactctagaggactcctagttaagacttaccatggaatctctgggcaattggaaatactgtactttcccctagggagatggagtgggaattgatttttccttaggtccaatgtaacttggttagaaatacaattgaacctgtttgtcatgtctgttgtgatatgatagccccataggaagggtctgtttttgtgtgggagtttatttcaggcgtctcttgcctgtattgtttcttttaacagctttttaaattttctttttccagcaatgatgttgtccactgggcatgtactgaccaatgtggcaggtctgagaacatagctgaagctgaaaataggaaagctgggggcaaggaagagccttgaatcttgaggtgggacgttgactctaagatgtccttgagcagtggagcctccggagggaaaggagtggatgcaaacccggttgagacatacgacagtggggatgaatgggacattggagtagggaatctcatcattgacctggacgccgatctggaaaaggaccagcagaaactggaaatgtcaggctcaaaggaggtggggataccggctcccaatgctgtggccacactaccagacaacatcaagtttgtgaccccagtgccaggtcctcaagggaaggaaggcaaatcaaaatccaaaaggagtaagagtggcaaagacactagcaaacccactccagggacttccctgttcactccaagtgagggggcagctagcaagaaagaggtgcaggggcgctcaggagatggtgccaatgctggaggcctggttgctgctattgctcccaagggctcagagaaggcggctaaggcatcccgcagtgtagccggttccaaaaaggagaaggagaacagctcatctaagagcaagaaggagagaagcgaaggagtggggacttgttcagaaaaggatcctggggtcctccagccagttcccttgggaggacggggtggtcagtatgatggaagtgcaggggtggatacaggagctgtggagccacttggg

SEQ ID NO: 80015 - DNA, 1293 bp, Homo sapiens
gtctgtaggggaatcctctaatttggaagaaaaccacattatcattaccagctgctctgaccttgtaattggtcattacccacacactaatgagcctcccacagagtacacatagtatttggcagttagtccagggcagttctgactggcagtcagtgggcagccatatctggccacctcttaccttttcagacttgactttctttagcaggcgacactcattctccccttcctctggctccggtttagttcccaaaggattgagcgctgccccaggctcaatagctatactcccaagtggctccacagctcctgtatccacccctgcacttccatcatactgaccaccccgtcctcccaagggaactggctggaggaccccaggatccttttctgaacaagtccccactccttcgcttctctccttcttgctcttagatgagctgttctccttctcctttttggaaccggctacactgcgggatgccttagccgccttctctgagcccttgggagcaatagcagcaaccaggcctccagcattggcaccatctcctgagcgcccctgcacctctttcttgctagctgccccctcacttggagtgaacagggaagtccctggagtgggtttgctagtgtctttgccactcttactccttttggattttgatttgccttccttcccttgaggacctggcactggggtcacaaacttgatgttgtctggtagtgtggccacagcattgggagccggtatccccacctcctttgagcctgacatttccagtttctgctggtccttttccagatcggcgtccaggtcaatgatgagattccctactccaatgtcccattcatccccactgtcgtatgtctcaaccgggtttgcatccactcctttccctccggaggctccactgctcaaggacatcttagagtcaacgtcccacctcaagattcaaggctcttccttgcccccagctttcctattttcagcttcagctatgttctcagacctgccacattggtcagtacatgcccagtggacaacatcattgctggaaaaagaaaatttaaaaagctgttaaaagaaacaatacaggcaagagacgcctgaaataaactcccacacaaaaacagacccttcctatggggctatcatatcacaacagacatgacaaacaggttcaattgtatttctaaccaagttacattggacctaaggaaaaatcaattcccactccatctccctaggggaaagtacagtatttccaattgcccagagattccatg

SEQ ID NO: 80016 - DNA, 2274 bp, Homo sapiens
ctttatttgtttcccagcttgactggcatttcatcatcagactcataatagttgataaacaatacgcctttggtgataatgtagattgagtacggttcttgatgggataaatggtgctgttgggtctctggtagaacaaagggctaaatttcatggcatatctacgaagtgttctattgccggctaccaaagagcgaaggggcacattttgagggcaagaggtactcattgtactttgaggtacttagatcttatgagttattgttgtggttatgacagtttggcctaggaagagattggccattaaaggtgtagcttcatgccaggtatctcccacaactattaggaatcaaagtctcctcgtggtttaatagctgccaacagtgtaatgataccttgccttctgcttgacttggaaggacaggtgcctgcagccccaggaggggttagaactgagtccctcctctgggaagatgatcttagttcatgctttaggaaatggaacttgcagggctggaggagaatgggtgtgagtctagggtcagctcaggcagcattaaacttcagcagcttattcctgcaaaacagtggccttgtggtgagctgttcattggctcttgattttctgctctgtgctctgctcatcctgtgctttcagctgatcccagcagatgcagtataaattgatttctctgtaattagatcagctgcagcagggaatacctatttccatatgtaagtgttaataaataaaggctggatgtgtatgtttgggtggtggtgccctcttagtgcctgtattccagtggtagctcatgctttctttgctgtcggtattttggtctttgcctctggcacatctgtagctcttagcaacatctgggcttctccagtagcaggtctgtgagtttcttccactaataatacagtggctcattcccttttaccagtggcagctgccagagaggctgcctgtgtttaggtggcagatgctatagtccacttcagcagagtcaggttccagctggttactagcttggctcatcctgtgctggctgtgatttgctattttctctcgggtacagatggataatactgttttaaagaggcttaggagtactagcagttgttgcttctgttccaggcccattagactgttccctacatctggcttcaagaaactcttgccatatatccatattcataatcattattcttcctgtgctaaaaagtacttctgaggatgaccttcattctcctatctaaattttagagtacttatgttgcaaccttctaagcccagtgatagtctgtggatgaaaggattaatattgcttagctttatgttggatttaagtgtaaatgtccatgattgtctctaacagagaagcaaatggaacccattttctcacatagaggtgcagggactgattgggtggctgcccttcagattataattgggctgaaagatgcagtatgttcagctaagaatacatcctggtgccagggagttttgtcccttaataatgttgctttgccatataagctttgcctcccagggagactctgagaatggggcagcagaatgagaaagaaaagggaaagagactgtgcttcagtttttgaaagatagagaaaattgctggcaattacttttagaagcagaaaatttgctatacagtttcatgtaaccataagcaagaacctgctttctcaattccttcccctgttccctcaacccttttggacagtctggtcctgagggtgcctttccatattacctttggctattgaaataaataattatttaaataaatgtttggaagttgctaggagattaaaacatgctgtgcagggagagaacatttctggactgggaggagcagaagaggcaagttaaaggaaaggaagttaggaaccatgcagaggagcggtttttgagaaacaacaatctccggtttggggcataataggtgctcagtgagtatttgatgattagtactataatttataagcaaagtctttgaaaacttctttaaaattttctctctgagaaatgggcttgcctgtggtttgggacgtttctatgtagggataacaaacagaaccaaaatagcaaaacagatgttttgatataatctaagaattgcatcctctcaactgggaactgtcatgaagaggaagaactcataaaatttgggaagtttcttgactgaattctgtggtgcagagtagcagtgttgactactagccaatgaggaagatttgaatatt

SEQ ID NO: 80017 - DNA, 1055 bp, Homo sapiens
ttgggtatacactggtaaataaaacagagatggtctctgctttttgaggagcttacagtttaccgtctacagcagagttcctaaaagtgtgtcccataaaaccatgtacatcaccagagtatcaaaaatgcacattcttggaccctaccctagatatgccgaataagtttttggggtaagggcccagaaatctgtacttccagaagtctctccagataattgctatatacatcaaagtttgagaattttcctttcaaggtaagtattcggggccacttctcatttaaaacaccagccttctaaacttgaatttcacatcaactcttatgtataatttagtggctaaaagcgtaaactctagccaggcctcctggcttgagcctgggaggttgaggctgcagtagtgagctgtgatcgcactagtgcactccagcctgggcaacagagtgagactccgtctcaaaaaaataataataataaattttttaaaaagtgtgaactctggagccagactacctggctttgtttcctacctttgcacttatttactgagtgatcttgaccaagtttcttaattgttcttcctcagttttcttatctgcaaaatgagagaaatagcacctacataagtttgtatttatttatttatttatgagagggagtctcactctgccgcccaggctggagtgcagtggtgcagtctctgctcattgcaacctctgccttaacctccagagtagctgggattacaggcatgcaccaccatgcctggctaatttttgtatttttagtagagacagggtttcgttgtgttggccaggctggtgtcgagctcctgggctcaagtgatccacccgccttggcctcccaaagtgctgggattacaggcatgagccgtcacacccagcctttaagtttgtctttaggccgggcgcggtggctcacgcctataatcccagcactttgggaggccaaggcgggtggatcacctgaggtcgggagttcgagaccagcctgaccaacatggagaaaccctgtctctactaaaaatacaa

SEQ ID NO: 80018 - DNA, 1064 bp, Homo sapiens
aatcgagcttcttttctggccatatccctggcatggggttgggtatgttggatagatgttactgtggttttgccggaatatgcaatctcacggacactggagtagtgctaagtgtttttgtttctacacaagactgcatggaaaaaatctaagtcttagcccttaatcttcctcccccagtgtgaacttgtatttttgccatttgggtataagagcttttaccagcagagctcatccagggaggcagcagggcttgggatgtggcagtaacatacacagctgagatcctgccactgctggctgtctgagccctctctctgtggttttcactcttcaagccatgcttgagtaacccgcctccagagctgctgacagggctgtgttcagaggccttggaaattacactgttcatttccttatcatcccctgacctgcagtgcagagccttctggtgcaggaacaaggcagaaaaaatccagacggctcccagccagcatgtgtcaagagctacaaagaaggaaattggacttgctcacttaaaaaccatggggttaggctttgattttcagttcctgtggagagttatttgtgtgtatgagcatgttgtatctctgtgtatatgtatagaatgagtctgtgcgtggcaaagctgtggaggaggaccatttgaaatagagagcagagggaagatggcttttctcttcacttaatttcccagttgtgccattggggtgggcctggaaccattagcatcaggaaggtgccagaccatattaatattttaaaatatatttctctcggtacagtttagtcatggttcagagcacccacagaagaacctttcctggctgaccgaggagacatttttaacaaatcctattccctaaagtcattcatcctagatgacattgacatagtcaatatttaagctgcctaagaaagtgtagactttgggtcagtcctgggtaagagcaatagctcttttgagatgaaggatagtgtgataaaagagagacctttgtgatagctaaggtgaactaaggaggaatttggagcattttgag

SEQ ID NO: 80019 - DNA, 2077 bp, Homo sapiens
ttttcctttccttgttttattttttcctccctgtccttcccttagtgttaacatttcaaggtacaggaaatgattggatactgattgttttataactctcttaggacagcctattaatattctgctgccaagacgacagtcaggaggaatttaggtagaatcaaggctcataacctttatgaaaataccctaagcagggaaccttcaatttattttgaagtgtttgagttttactaaaagcccatcattgccagtgtggttttttaaaatggacagccatagtggctaaggagaccagtaagacctggagttggcagcagagtgagccttctgaggaaaaaaggaagaggaatattggtgtgggaaagaggtgcagctgtgccactggatccctgtcccttcattattctttactggccctggcagctgtcaaagtttgcttaatagagttgtgggctggagattgtttcttaatccctgtataggagtaccaagctccagctgtgttatctaggctctggggccctagcacttggccaactaatgctgaggcatctggtgactcgagacaaaagcctattatgtcagagagaagattgggcaaagcacaagcattgttatctctaatgcccccggggcaaactctgtacttggcaagtgagaatgccttgaccttgtgagtttacagcaacctgtccactcggttttctgtttctttgagattattttctactaacgaggtttcagcattctggcattgaaatctataagtgctttattgtaaagaatttggaaaattcagaaaagtaaaaggaagaacataaaaattgtacttcattctaccagattcttaagagaagaatttctttaatgttgtggaactggctgagattattggttcaggactggcttgggcatgatctatacctcatgaatctcaactctgtccctttaagcatctttaattttcccattagagatctgaactggtttggccctgcttggctagattttattacaattgatgtgatctcaccctggagtatgaaactcatcttctttgtttagctttttataacttatctcaaaccaattttttatcttcatttgtgattgtcttcagaagtctgggtgtttgttttttttaaactgatggtggtgagtatgtagggagagagtagttttgcaatttttaaagacttaatgttgacctgctttcttctctttggaaagaggtgtctgtgatgtcagttaacataatttgctttcgttgatgagcttgctcaagacataagcttatgagatttctagttgtataaaaagaaaagggctgtctttcatgttttcttttccttgctggagtagcattttagttaaggaagttgcacaaaaagaaacccatcttttttctgtgtaattttctatatggatttctatgttgaccagtctagaccttttgtctattcgatgtttacatagatgtttagatttaacttttaatacattgtggttaaaaaaaaaaaaaaaggaaattttggtgcaatagagaaaagtattttggatttatttattgttccttttaaatgttaaaatgaggcaggaatacagtacttgcagcctattgtctaagagtactctttgacatttataatatcaggtataagcatttccaaaagagatcttccttaacataccatacccttaatgatcttttgacaggacagaaatggggagagatgttagcagggtatattttaatttatattctccaaaagtatacatcctatactatgatgaattattatagattttattttcatgtaatatggactcccttgcataactggagagaaacagcttccaattaaagtaattatgctagcagctctgagactactctttggaactgttgtcagcactttggtttgaagaaatcagaccaggattgactgcctaatagtaggcttttaccaagagcctgacataagaatttcaggaaatctaggaaaatctttgaaaatctgctatattataggccgggcacagtggctcaaatctgtaatcccagcacttcggg

SEQ ID NO: 80020 - DNA, 1118 bp, Homo sapiens
tctcttacatcgaaggttctggctactagaattcttttatcacagagaagtacgtagcatggccaactccctcatctctctcaagtcttcactcaaatgtcaacctatttgaaatttgcaaccacctctgtaccctccttttatcctatcccattattttttctcgaagcactaatctttttaatttactatgtgtatactttattatgcttattgtttattatctatctgctagaatgtaaactctaccaaggcagagattttgttttcttttgttttgctttgtgaatctttgtttctcaagcacctataatagtacctggcccaataaatatttattaaacatatgaatgaaatgtgcagtatggtaaatactaatctcatttttagctgatgtgagcctcagttgactgatttatgaaatgctggttttgttctctgtcttttttgttagaggcattcctcagatatctggtagtacttggttgtctgctcacgttttaaacatctttaagatggagcgctgaaagttatatttgaagctgtgagtgcatttgcaggacatctttatggtgagcttcacagcgagatgactgttaagttgggaaaccccagatgtcaagatcgttaggtgtttccttataggcttaccagatttcttagaaaaataacaagccccttccaatcctcctggagagtaaagatttctttgagctaggtgaaaaagaggactggggcttcagccttcagcattcagtatgtttaaatccacatttaatctccttattttaggtacggtactcatgtcctccactattcctggagcaccctggtccagagatcctctatttgagctttctctatttgagaaactagcctctctagtttttttgggtcgggggtggtatgtgagtgagaaaaggaattaaataaataattgctgcttttttttttttgagacagagtctgctctgtcaccaaggctggagtgcagtggcgcaatcttggctgactgcaacctctacctcccacgtttaagcgatcttcctgcctcagcctcctgagtagctggggccacaagtgtttgccaccacgcctggctaatgtttgtattttta

SEQ ID NO: 80021 - DNA, 2046 bp, Homo sapiens
gtgcagtggcgtgatcccggctcactgcaagctctgcctcccaggttcacatcattctcctgcctcagcttcccgagtagctgggaccacaggcgcacgccaccacacctggctaaatttttgtatttttagtagagatggggtttcactgtgctagccaggatggtctggatctcctgacctcgtgatccacccacctcggcctcccaaagtgctgggattacaggcatgagccaccacgcctggcccagtttttcatgtttcttgatgcaaatggtaatttttaaaatttcatttttcatttgtttgctgctagtgtatagaaatgcagttgatttctgtgtatgaccttatatcaatgtcaattagcccttatttctagcagttgttttattttagatttcctaggctttttggagatagtcatggtgttaatattggacttactcaactttagacagtgagaataagatccacatgatctagatgtttggattttttggttttctggatatttgagagccttatctttgtaggtctctgcatgcatgttaggatgacataattgaagtaaaccatgaatataaagtggatgaatacagttgcaataataattctatgtagaattgacatggcagatgggaaacaaggctgctttgccctctgggcttttgaaaaattggaaagtaggccctgtgctctaaagaatgataaaatctggctctggctcataagaagtacttcctaaaaccaggttactcaggaggatgatggaattacctctagccatttgtaaagccacttaccacttttttttttttggacaggtattttgttagtgagtccccaccagtgtaccaggcactgttttagtgcttgggatacatcagtgaacaaaacagtaaaacaaataaacaaacaaaaaaactccctgtttaaattacattctagtggggggaatacataataaatattaagcatgaaaatactgattttttattagtggtgagaagggctctggagaaaaatgaggcaaagcaggaggacgggggtgtagagaaatatattgattttaatacccttgtagattactttttgattaacactggaaagtcatcataaaccaaatagcaggaaaaagtactaattcataattaattattcaatgatgaccctttgatgaggattatctcaagtttacatatgtattccccagtgattcttttctccaactgaattgtctaatttgcaaggaattttttagaagaaatggttccaagcaagctatgctgcgatccctcaaccacaaaagatctaattttcatagaaaaatatttgaattttttcaacagttacaaacacaaagtaggaaacaaaggtcctagccttaccaagttgcataatttctcattttaccatctcacttaggaatggtcaatattatgtttgagaacagtaaagcaaaggaaataaaaaaggtgccacttttgaataattttactcgtgtacactctaacaaaatgtgagatgccaaagaaacaacactacaccagatggctattaaatcaaatgcttttctttacaagtcgatgaatcaatagactctagtgaatgtgctcagttaatagaactgcttaggctgggctaggtggctcatgtctgtaatcctaacactttgggagcctctggtaggcagattgctggagcctaggaattcaagaccagcctggacaacatggcaaaacccatctctacaaaagacaaacaaaaacaaaaattacttgggcatagtagtatgtgcctatattcccagctacttgggaggctaaagtaggacttgagctcaggaggttgaggctgcagtgagctgtgatcttgtcactgcactttagcctgggcaacagaacaagatcctgtctttaaaaaaaagaaagaaagaataataaactgcttacagcccttgaagagaaattcttagagagttatttgttctgcatatatgtcaaaacaacctacttgagatgaaatattcaaaattataaatga

SEQ ID NO: 80022 - DNA, 1042 bp, Homo sapiens
ctcactgaaaactccacctcccaggttcaagtgattctcctgcctcagcctcccgagtagctgggactacaggtgcatgccaccacacctggctaatttttttgtatttttagtagagatggggtttcaccatgttggcctggatggtcttgatctcttgacctcgtgatctgcccgcctcggcctcccaaagtgctgggactacaggtgtgagccaccacacccagcgtctctctggttttttaatttgtttttttttttccccccgcagaagatcctttggttttctactagatgttattccatctagatagtgtttatttattgttcatagtcatctcttacccagggaattccttattttgtattcctgaaatcgaaatattctttcatactcattatttagatgctaagagaaaacttggggaccgctcttcccaacaagattgtctcaaattttgtgcccatctgtgtgcattcacgcacatgagcatgtgtgtggaggagaagaggaaaagaacagagatggaaaagattttgaagtgggatgcttggcaagaggagtaaatagatgataattatgaagaagaaattggcaggatttcttaactgactagattatgggaacaaggagtagagaaacaggtcaaagttggctgaagtccatagaatgtatattttaatttaagtgctaaatttcctccatacatttttcatgaactttgaaaaatttgttggctttatacgaacctgtgaacttcagtgagaaaaacagcatctttatatttttgagcatagtctcaatgtcattaattcttctgcttaaaaatcctcaaatgacttgccaaattaggataaaatctaaattctgttaccaaggccccaaatttctacgtatctgactgcaactgcctacttaaactgatcttaccattattcccattcatataccacccacataggctttatatctgctcttacttaagagtttttatacttcctggtccctcatcctggttgttcctccccagtactcagctta

SEQ ID NO: 80023 - DNA, 1050 bp, Homo sapiens
catgttccaacctgaaataagggtggtcttgagaagctaaaaaaggagaagaactcaactgatttttttaattgatggtttagtagccaacttctgacctgttcttagcctgaaaagacctactgatatcaggctaatcatagttctgagataaaggtcagtggatgaagccctttttggaggatccctagggcacatttaataacaacagaaacttcagcagcagcagcagcagcattttatcagactatgttccaggcagcaataccaaatgcttcttatatatttcctttaattattgcagtagctctatgcaatacacactagcataatttttattttactaacaagaaaattgtggcttaaagaagttaaataacttgcctaaagttgcacagccagtagtggaggctctatttaaagccaagatggctatcttcaaagtccatttgtcgtaatcattatctcctatttatcttcatcccctttacttctatttgaatagtatttctttccttatctcatctgttcttaaccaaggccctcctttacttcttcctaaagtagtccacatctgtggagcttctcaggaatatacttttttgtgagatttttctataagattaaaattataaattaaatggctaaaaatttttacatactgtaaacagacccagacagttaaagagattatagagatttggcaggaaaaactcgatgcttttggaaagctcttgatagtattcacagataagcgatagtgaaaattgagactaatggatactggtaaaaaattagatgtggtatggttgatcatacttgttgtgattaaagctaaaacattattcaagtttgctagaaagttgaagagctgaatttgggctggatggagaaggtaagaaaaaaacacactgcacatggtcctcatttatgaacttaaatctttcctggctgccaactacttgctgattagaaatctgaactcccaacctgtatactaggaaatctagccttttattgtcctggtttaagaaggatttaaattgtgct

SEQ ID NO: 80024 - DNA, 1278 bp, Homo sapiens
tgggattacaggcatgcaccaccatgcccggctaatttttttgtatttttagcagagatggggtttcaccatattgtccaggctagtctcaaactcctgaccttgtgatctggccaactcagcctcccaaagtgctgagattacaggcgtgagccaccgtgctctatgccaagctctttcttgccttaggagtttgcatatgctgttccctctgcctatagtgcttatcccttggctcttcacatggatggctccttctcatcttttgggcctcagtttaaatccagccttagagatgccatctctgattacccaaggtagctcccttctcattgttctcttatcacatgacctatttgtctcctaatagcagtttctaatttatatctaatttgtatttacttaccagtccctttcgtttaccacctatactcagtgtgtatagcataggagccatacataagaagtactcaataattatttgttaaatggttgggttctgttatcctaggcttgaaaaacattaaaaagcactatttgtaccctttcaccaaccctgccccaagtaccttaattgcccttacacctctactgactgaaaatacggcacaaatcctgaagagaaagggaaactaaaagctgtacttaactgctatgctgatagttgtcttaggcagttttgaattaatattttattatctctgttcttcagcttgttgtgccttgttttttctcttctctgtgacttctcacctacccacttgactctgaccagattcctgacacttaaagggtatatccaagaaatgagatggccctgagcacaggggaggaaggatggaatgacaagggccaccagaaacctctttcaggactctaatcactctaaggtcacagtttagagtctagaatgagagggactttgagtgcctctttttcttgctcagtgccctcagcttgagtgcttagctggcagacgggcacttttcctcctcagttactgtcaaagcaacatgaaggtcaggcagagagagacaaatgagagcagctcagggaaaggaggttaccacggtaacaagcaggagggactgctatttggaaacagacctaatctttctcctccttctccctccttctcagcacaggaagatgggtattgtttagctgacctgcatccttggggtgggaaccataatccctttctgacagttcccaatgacactggagtgatctgctttgcattttaatttgataagcagcagcggcagttttctctga

SEQ ID NO: 80025 - DNA, 1027 bp, Homo sapiens
tgggactgaggcccagactctctaaccacatatactctgacaaggatttggattcttcagaaaaagaatatgcaaaaatcaaattgccaccagatgttaccaaaagatctgaaataccccattaagtctctttacacttccttccattttttcaggttcataaattttcaaaacagaatagattccgttctcaggggcaagtggaacatgcaagaagtctggatgccttgggcaacagcaacctacagtgagccaactgcttagtggatgcctgaaaacaagaccatctaaacatttcctataaaatctgtaccaagtgacagatacatgaagcggtgtgggtggctgggcaatgaggcaatcagtgggaagagtgaactggctgtacctataggtgttaaaaaaggcaagagctgcatatgcaatgagccaacattaagtgaatttaagagtgactattctccatcctcttgactccctcagctgcccttttattaatttttctcttcaggcctgacctcaaatttaatttataatctaactctcccatataaaatatggagagtacagatacagtttgaattacctggccaatacctatcacatgactgcatatcataagtaccaggatcaacactgttgaatactatgaagggaagaatctctagaagctgggaaattttgctaagtctgctaaaatcctctgtgtgggtatctcccgcagactgtggacacttgagactctaataaccacttggtaatatttacaacaataagtccctggtggctcccctgcagaagcaggttgagaagggaggggaaagccacatatcacacttaccatcttctgtttcctgccacacgatgccttcaaggttgacgctagttccaggttcacaggggcccaagcactcaggctctgtggccagagccacatcacatgtgttgaccccaactgatcgggtacgaaccatgatctgctcacagggagatgagatgtcattgttgaccactggcaccaaaaggt

SEQ ID NO: 80026 - DNA, 1073 bp, Homo sapiens
gagttgagaagctgtaacagagaccatgtggcctgcaaggcccaaaatatttgttatctggtcttttgttgaaaaagtttagccaggcatggtggtgggcgcctgtaatcccagctactcgggagtctgaggcaggagaatcgcttgaacccgggaggtagaggttgcagtgagccgagatagtgccactgcgctccagcctgggcaacagagtgagactccatctcaggaaaaaaaaaattattaaaaaaaaaaatgtttaccaatctcatgcctcgtatagccaccgtgcctggccaagggtctgaatgtttaattttatttaatttaaatttaaatagccatatgttaactagtggcttatggtattgacagcacaggggctagatctttaaaatatatatacacagacatgcatatatatatgtgtgtgtgtgtgtctgtgtgtatatactctgagatggaaagaagagtaattgtgtgggagtatgaagagggtgggtaagtagctgacatctaaacagacccatggtgacttctgtgtactctggcccctgttacccaggagaacattcggccctacttcaaactctgtggttgagccctttgctttggtctgtgggctgcagttttctcattatcagagtaataggctatggttttgcttagcaggaagttagtctgcctgtggtagctccgctgagaacctgccccagctattcttcatcctcatctgattgcagatcccagctgtgggcttttatccttttcactaaagggaaggggctctccattaatcttctttcatggaaatggtaaccttggtagttactcttggtttttcctgtgtgattttgatgtagaaaagtatgtgtgtgaactgtgaaatatctaattttagatatttgcactagaaaagtaaggtggcattcagctattggtttttctttctcatatgctataattaatgccccttcaccttcagtcttgccccaggcagtactcacctagaggagagatggggcacagtaacaaccaagctttctccactgtttagccagttgcatactagc

SEQ ID NO: 80027 - DNA, 1034 bp, Homo sapiens
ccttgctggtgataatgtcttctgttttacattagagttttgtccccctcattctagattataaacttcctggaagcgccaggcgcagtggctcacgcctgtaatcctagcactttgggaggtcgaggtgggcggattgcctgagttcaggagtttgagaacagcctgggcaacacggtgaaaccccatctctactaaaaatacaaaaaattagctgggtgtggcggcgtgcgcctgtagtcccagctacttgggaggctgaggcaggagaaatgcttgaacctgggaggcagaggttgcagtgagctgagatcgtgccactgcactccaccctggacgacagagctagactccgtctccaaaaaaaataaataaataaaaaataaacttcctggaagcaatgacatgtttattcaaccccactcccccaacccctaaacaaacacacaagtagaatatagctttgaatagtagctccttgcagattgaatgagaaactactagagtttgcgttatctgttattttaatttcttagtagtgtccaagatatcacactctcctagactgggagccaaagagctataaaaaattggtagcaaagtcaccaacttgctaggaatcataaattaccccttactctgaaaggttgaaggaaatttgagttataaaagacaatatggttactccagcaccatctagaggaaagtctagaaaggtttaaaatggtattttacaagttcactatatcagtttatttatctatttatttagagacagagtctcactctgccgcccaggctggagtgcagtggtgtgatctgggctcactgcaacctctgcctcctgggttcaagcgattctcctgcttcagcctcctgagtagctgggattacagtgcgtcaccatgcccggctaatttttgtatttttagtggagatggtgtttctccatgttgaccaggctagtctcaaactcctgacttcaggtgattcacccgcctcagcttcccaaagtgctgggattacaggcacga

SEQ ID NO: 80028 - DNA, 1639 bp, Homo sapiens
gttccttgtcccctgcccgctcagctacccccaaagttcgacttgtagagccccatagcccttctccttcaagcaaattcagcacaaaaggcctctgtaagaaaaagttgagtggggaaggggacacagaccttggggccttatccaatgatggctctgatgatggaccctcagtgatggatgaaacaagcaatgatgcctttgattctttagaaaggaagtgtatggaaaaagaaaaatgtaaaaaaccctctagtttaaaacctgaaaagattccttccaagagcctaaagtcagcccgtcccattgcccctgccatccccccacagcaaatctacaccttccagacagccaccttcacagcagcgagcccaggctcttcctcaggcttgaccgccacagtggcacaagccatgcccaacagtccccaactcaagcccattcagcccaagcccactgttatgggagaacctttcacagtcaaccctgccttgactccagccaaggacaagaaaaagaaagacaaaaaaaagaaggaatcttcaaaggaacttgaaagtcctctgacccctgggaaggtgtgtcgagcagaggaaggcaaaagcccattcagggaatcttcaggagatgggatgaaaatggaggggctcctaaatggctcatcagacccccaccaaagccgactggctagcatcaaggctgaagccgacaagatctacagtttcacggacaatgcccccagcccttccattggaggcagtagccgccttgaaaacactacccctactcagcccctgactcccttacatgtggtgacccagaatggagctgaagccagctcagtcaaaaccaacagccctgcatactctgacatctctgatgctggggaggatggggagggcaaggtagacagtgtcaaatcaaaggacgccgaacagttggttaaagaaggggctaagaaaactctttttccccctcagcctcagagcaaagactcaccatattaccaaggctttgagagttactattctccaagttatgcacagtccagccctggggctctgaaccccagcagccaggcaggagtggagagccaggccctgaagacaaaaagggatgaggaacctgagagcatagaagggaaagtgaagaacgatatctgtgaagaaaagaagcccgagctgagcagttccagtcagcagccctcggtcatccagcagcgtcccaatatgtacatgcagtccctgtactacaaccagtatgcctatgtacccccctatggctacagcgaccagagttaccacacccaccttctgagcactaacacggcttaccggcagcagtacgaagaacagcagaaacgccagagcttagagcagcagcagcggggagtggacaagaaggcagagatgggcctgaaggagcgggaggcagcactcaaggaagagtggaagcaaaagccgtcaattccaccaactctcaccaaggcccccagcctgacagacctggtgaaatcaggacctggcaaggccaaggagccaggggctgacccagccaaatcagtcatcattcccaagttagatgactcttcaaaactcccgggccaggcccctgaaggccttaaagtgaagctgagtga

SEQ ID NO: 80029 - DNA, 1100 bp, Homo sapiens
cccagaatgcttgttcttacctagaaaacatccactgatgcatggatggattttccttttctccccctgccccatcttgttccctgtgggtgggtgcagaggtgggggcgggggctttttaaccaaaagggagcagagttggattataaacaagatcagtagaggccaaaatcctactctgccccaggtgtctagtactaattatctgctctggtggttctactgggaccttgggcttgaagtatatctgtcttatctgtacaacacccagtcgttgttctgtgattgttgtaggaggcagagccccggatgtggacatatgtttatcctgccaagtactcagacatcaagtcagaggatgagcggtggaaggaggagcgggaccgcaaattgaaggaggaaaggagtcggagtaaggactctgtccccaaggaagatgggaaggaaagcacaagtagtgactgcaagctgcccacgtcagaggagtctcgccttgggagcaaggagccccggccaagtgtccatgtgcctgtgtcctccccacttacccagcaccagtcctacatcccctacatgcacggctattcctacagtcagtcctacgaccccaaccaccccagctaccggagcatgcctgctgtgatgatgcagaactacccaggtacagcaccaagtgccagcactattccattcactggaagggggaatgaagcacagatttcacatccagagttttcttgctcagccccaaggcatattgaggctcgcttagatgacggaccttttttcactgagtcattctgtgaggtggccaccataacccatagttccttgaatgacccataatgatagtctgtgtgactacctctctctcccttgctccagctcaaggattgtctctgtagtcagttttcattgctaactaaaggtaaaactccttctctgtcactgctgtctcccctcagctggaatttgtaaaccatatactccacgttttgcagtgtgctaggcactgtgggaggtacaaaagaagtagagccattgagttccttccactcccggagcttacagcttaatcatagtggagagacacaaagaac

SEQ ID NO: 80030 - DNA, 1647 bp, Homo sapiens
gttagaagaaaatgctcttatttaactctactcgttttgttgcccaaagaaccatgtggggtgcttctggggtggaagggcactgctttagcctcactccttagagcctccagcttcctacagcagcctaaatagtctcaacattctggtgacattattataaagcacactctaaatagaaataagcttttcaaacagaaataggaaatttcttacccttgaggtgttcctttatccctgtcactcacacccatcaatataaaaatcatagttgcatttgttgagtgctcgccctgagccaggcgctgtcctctgagatttatagacattatcttttttaatcctccctatcaccttaagtaataagtattgatatcttcatttttgatgatgaagaaactgaagctcaaaacagttatttatttgctcaaggttaccaagctagtaagtctcagagtaaggttttgagcccaaggctctgactccagataagtgtgatctttccactttatcatatcacttctccaagatgaatctgagaccagttcaaagaacagtatcagatctatggaagttggaagcaggaaacagggccatgttcctaatatcccttagctaatttttcctgtagagctcagtaaagaaaggtcaagccaacagtctcagccaaagacactatgttagaaaatacctcagcctgtgcctaggaaagctgatgcccacccaatcaagctcactaaagcagagtttcctctacctctcccatctctttgactgtttgatttctccttccacaggttcctacctgccttccagctactctttttccccatatggcagcaaggtctcaggtggtgaagatgctgacaaggcacgagccagccccagtgtgacttgtaaatccagctcagagtccaaagccctggacatcttgcagcagcatgccagtcactacaagagcaagtctcccacggtaagaaaagtacagtgatgctggctgttacccaaagactagtaaggccagatccagggtctgggagaaggtgggcaagttcaggtcctgaccacagtgcagcttggctgacttgacactggcagcccccagggcatcttctttattcttaggtatcttgcacttttaggggtcataaggtggcaccctgggcatctcacttgtgtgtgtgtgtgtgtgtgtgtgtgtggttgtatgcatatgtgtctcactatagtgcttttgtgtctctggtttcctttccagataagtgataaaacttctcaggagagagatcgaggaggctgtggggtggttgggggtggtggcagctgtagcagcgtcgggggagcaagtgggggtgaacggagtgttgaccggccccgcacctctccttcccagcgcctgatgtccacacaccaccaccaccaccacttggggtactcattgctcccagcacagtacaacttaccctatgcagcaggtaagcctgttttccctaccacctgttgttttgtcttgttttgttttgtttatcttcatcccagtagtaatgtccacagctaggaccctcctacctgcctcataagaatccttttttaattttttttttttgagcttctaatctgtgcacagtcctaacctcctgcagtcat

SEQ ID NO: 80031 - DNA, 2470 bp, Homo sapiens
taagtcacttttattaatttggggcaacacataaagccgggatagttgctacctggatcacagaatccctaggtgagaaatagctatgaggggtcagcagtctggaatccatggaaccctggccaagcctcttgtacaagagtctcccgtgaagccatgtgcatctgagaggacctgtggaacacagtgtcccctagggaccagtactggccactcctacaattcattttcttggagtgccaccttgtggtttttttaccaacaggctgagtgcctggttatctgtccatgtttcccttgcagacaccaagtgcccggataaagtcagcttcacgggcccggactggcttacccaaggaggtgctgaaggtgccgtttagacatcagttaaatggtgttgatcatcctgtttgccgtttccaccatgactgaaggcagacccttggctatctcacctccaccagacctccggactacctgaccctacctcttcctcaggagctggagagctggtacttagcaaaaatatttattctctcagccacagttatgactattgtggcctctgtggagatgaaggcacgggaagcaaccaggggaacatggcctcagcccagagaagccactgctctgttccccaagcccttggtctgctgctggagcagtaccagcccccccgcccaccagggagggacccccacccccaagcactgggtaaggtctgaagacagcacagcagccatacccctcaccatcattaccaccatcaccagattctgcatctccctagtgctttgcaccctgggaattggcagcatgtggaggaactagaatctcaggaaagaaattgggggttgttttctacataattgtgaaaacaaggtcttcaaatgtggagacttctccccatttacatgagcacatataaacgctcacaacctagcctggaaaggaagaccaaggcatctgccccaacatggccttgagctgcctgtgaggcagggggcaggggttccaacaccagcacagggctccccagggacactgggagcaagctggtgctggagcatgaatgacgtctgtgaagtagaacctgcgtccccactaagtcctgctgcttcttattccccaactccttgcccttttcccttccctcctaaccccttggtgcctttcccagggggatccccacactggtcttgcctcttcttttccactgcttggctcttaagcctcaggcagataaactagtattccccccagcttggggaaccttggagtctgccaggtcaccttagggcaaggcccagaaggcagcccctgggagcacccagcagttcttggagatgtcctgtcatctagccatctgatatcttcctcatttgaggccacagatatatacagcccaattcctctgtctacaagtacatgattttatatagctcagtctataacctccatgtgggccaatataagctgtgtttcttggtaacacatattttgtttgaggggccactggccatgggaggttatttgttccttagaccctggaataacacatccaagccattacttattagagtctcagaatgtactcagtggagctgtgctttgaggcagccaacatttctctgctctccttagaaatgcagtctcccaatggaagctttatactctttgtactgggaaagtgaggatgatttggtagctttattggggtcatgtcttccccaaggtgtggggagcttagcttacttggcttttgaggtatcatccctctgttctcccctcctatctttccatgaccctctggattgagagagagagataaagactgacagacaccagtgtaggctggaaaagggagtgtgtgaccagagtgccaaaagtgactaggagcaggaacttggctccgactcagtttggaaaatgggaaataggggacagtaagcacaatgcccagtagtagttgatttccaaggaccctggaaccctacacttgagaggcttagggtcaccatctgctcaagaggatcccctctgatctacaggccttttccctaggtttctgcctcctcgtttttgttcaagttgggttctgagtcctccccaaaaaccattgttttagacctcttggcagggccccaaaacagcctccctcatacccatcattccctctgccttctgctgccctcatgggcagtgctctgagcagtgacctccctttcctccgtggaagtagctagtgcagacaccgtcatcccaccccacctgagtcaccccaaccaagagggtgactgaatttcagcctgattatgccctcctggggctcctgtgaggtggagccaaggttccctctctgttcctgtttgtttttaaatattgttgtgtgttttgtatctgtggcactggcctgcagcatactctgtatatattgtaaagaaaccgttaggagtaattttcttttgca

SEQ ID NO: 80032 - DNA, 1366 bp, Homo sapiens
tcccaccccacaaacaaaggctggaaaaatttgctaccaagggccaagaccaccagaccaagcctgtttatgagccacccctgcccaggccctcacagacattgctcacggggcttcccatagaggagaagctaaagagggagggggcctcatccccagatagatcaggcaaggcttggagagctgctctttaggatccacatcaactacttcctcattttaaggtatggcagttcccttcatccccttttcctgccttgtacatgtacatgtatgaaatttccttctcttaccgaactctctccacacatcacaaggtcaaagaaccacacgcttagaagggtaagagggcaccctatgaaatgaaatggtgatttcttgagtctcttttttccacgtttaaggggccatggcaggacttagagttgcgagttaagactgcagagggctagagaattatttcatacaggctttgaggccacccatgtcacttatcccgtataccctctcaccatccccttgtctactctgatgcccccaagatgcaactgggcagctagttggccccataattctgggcctttgttgtttgttttaattacttgggcatcccaggaagctttccagtgatctcctaccatgggcccccctcctgggatcaagcccctcccaggccctgtccccagcccctcctgccccagcccacccgcttgccttggtgctcagccctcccattgggagcaggttggggcgagctggaggcccgggctggaggggcagtgttgctgttcatagattttgttccattggcgttgctctgttgaatttaatttcagtcttcctgattcttcccttctgtaaagtgtacattaccaagttccttgtttttttatatatatatataaatatatatatatacaaactgtactctttttgcctttgtacattcaggcaagaagagaaaataaatctttttaagagacaatcacaaatctgtgagggctgctggttatttctcctggagtttgctgctgagctgcctcttccttcctcccaattttcctgttctccctcagctctcctgatcttcctggccctgctccatatgcatcctcagcttcactttccctggctgatggcaagctgttgaatccagtgtccagactacctgccttgtaacccttttctgcccagcattgttttctggcttggccactggcttagcccaggagctttactctgtgccctggcctcccctctcttcacctttagatttccattcaccgaagtggctttggacccctgggtactctgggacctgtttcctggaggccctggcttgggacactcacctgtgaaactatgc

SEQ ID NO: 80033 - DNA, 1034 bp, Homo sapiens
aatggaaatctaaaggtgaagagaggggaggccagggcacagagtaaagctcctgggctaagccagtggccaagccagaaaacaatgctgggcagaaaagggttacaaggcaggtagtctggacactggattcaacagcttgccatcagccagggaaagtgaagctgaggatgcatatggagcagggccaggaagatcaggagagctgagggagaacaggaaaattgggaggaaggaagaggcagctcagcagcaaactccaggagaaataaccagcagccctcacagatttgtgattgtctcttaaaaagatttattttctcttcttgcctgaatgtacaaaggcaaaaagagtacagtttgtatatatatatatttatatatatatataaaaaaacaaggaacttggtaatgtacactttacagaagggaagaatcaggaagactgaaattaaattcaacagagcaacgccaatggaacaaaatctatgaacagcaacactgcccctccagcccgggcctccagctcgccccaacctgctcccaatgggagggctgagcaccaaggcaagcgggtgggctggggcaggaggggctggggacagggcctgggaggggcttgatcccaggaggggggcccatggtaggagatcactggaaagcttcctgggatgcccaagtaattaaaacaaacaacaaaggcccagaattatggggccaactagctgcccagttgcatcttgggggcatcagagtagacaaggggatggtgagagggtatacgggataagtgacatgggtggcctcaaagcctgtatgaaataattctctagccctctgcagtcttaactcgcaactctaagtcctgccatggccccttaaacgtggaaaaaagagactcaagaaatcaccatttcatttcatagggtgccctcttacccttctaagcgtgtggttctttgaccttgtgatgtgtggagagagttcggtaagagaaggaaatttcatacatgtacatgtacaaggcaggaaaa

SEQ ID NO: 80034 - DNA, 1020 bp, Homo sapiens
gcctcccgagtagctgggactacaggcgcccaccaccacgcccggctagttttttgtatttttagtagagatggggtttcaccgtgttagccaggatggtcttgatctcctgacctcgtgatccacctgcctcggcctcccaaagtgctgggattacaggtgtgagccactgtgcccagcccagagcttctgtatttatattgctggttgtaggcctcagaaaagcctttgggttggtaggggtgggggtggggtgtgaatgggagggaggtctaggaaggtggtgatgggcctaagtacttctctttgcttcctgcagattgttagcactgctagagtttgctgaagagaagatgaaagtgaactatgtcttcatctgcttcaggaagggccgagaagacagaggtgaggagtcagagtggcctgagccttacagcccagacagtggggcctgggggagagaagggagcacctccaggatgaggtgggactcttgaatttgcctttcaaaccctgggaaatcatggcaggagggcaagtgcctgaagggctcgtaaaagcctagtgcttatttgttccatctttgtttggggttttgatttcagcctaccattgtgtttctcatcagacttttttacactctgtcttctgcagctccactcctgaagaccttcagcttcttgggctttgagattgtacgtccaggccatccctgtgtcccctctcggccagatgtgatgttcatggtttatcccctggaccagaacttgtccgatgaggactaatagtcatagaggatgctttacccaagagccacagtgggggaagaggggaagttaggcagccctgggacagacgagagggctcctcgctgtctagggaaggacactgaggggctcagggtgagggttgcctattgtgttctcggagttgactcgttgaaattgttttccataaagaacagtataaacatattattcacatgtaatcaccaatagtaaatgaagatgtttatgaact

SEQ ID NO: 80035 - DNA, 1018 bp, Homo sapiens
ctggaagtaatttttttttttttttttttgaggcagagtctcgctcttttgccaggctggagtgcagtggtgcagtcttggctcactgcaacctctgcctcccgtgttcaagcgattctgctgcctcagcctcccaagtagctgggactacgggcgtgtaccaccacgcccagctaatttttgtatttttagtagagacggggtttcatcatgttggccaggatggtcttgatctcctgactttgtgatctgcctgcctctgccttccaaagtgctgggattacaggcgtgagccactgcgcccggctggaagtgattctttaacagaagatcctttacttttatcaagagacttaaggttaattctaaatagtaagtaccctagagatttagaaatagcatttgaattataaaaattttatttaccatcatcattgcccagctgtacatctgctgcatacgctgcctgtctgtagtcagtgtgtgaaattgtaacctgctaagggcatttcagacaacagtttcacagacactttaaattagaggcagcaggatgtgatatgttagtagcactcatatgtattctgaggagtgtttccaagggcatgtcctatcactgagaaaataaaaggcactaacagattggctctaatcttccatctctcttccgaattgccttgtatgctggatacctgacaccttagtttctggcatgggatatatgtatttttttctcttccaaagcaggaccagcccagctggatgtttgggttcggtctgatacatttgattttccttaatcagcctgatcttttcagcctctgaaaaggactgagattctttttttttttttttgagacagtctcgctctgtcacccaggctggagtgcagtggcacgatctcagctcactgcaacctccgcctccctggttcaagcaattctcctacctcagcctcccaaagtgctgggattacagggatgagccaccatgcccagcctgtttcttaaatcatcct

SEQ ID NO: 80036 - DNA, 1744 bp, Homo sapiens
tatgagaggcaggtggagagaggagccaactggcctgccagggcctgggtaggagctaggccttggatcaggctcctccacttggcctgggggtggggtgttgtgtgcagggtgtctggtttctttgagtgatggcaatcccatttccatagcgtgtttcctagattccttgggcctgcccctaactttctaaaaggaatcctggtagagtcctaactagggattctgataagagccggatgttcttcccagtcagtgttctcgagtgtttcatatccatagagtggggagctggctgggaatttagctcccattgggtgggggatgggattttcagcttccctggctccagtgaaaaactcaggaggtggaggcttggtttcctggaagaaatagttgcagaggagctggcactatgttttgaaaacaaggctcttcctttccagtgttattctgattggtacttccaaaatgtcagaattcctgatggtgggggagggaagaagatacaagtacgagcacctttattatcctttttgaacatgaggtttaaatccaaggaaatcaagcttcctggtctttttctccctggatttgtgggggcagggagacagtatctgtccagggcttgctttgtacctgtgacagtacagtatgtagagaagcactagccctggcttgatagtgatattattatcaatctgtgctgatgggctttgaggagaaacatttggttctgcaggtggttttttgggggaagggggcagggcataagaacatatcagaactatcagcatcttcactgagtggtttcctgggtaatggaatttctgtctcttcctaaagggtctggtttcagttattccttatttattgacaatatggcttgttgggcatggggtggtagggagagccagttttccaatgatgtgccttcaaggtcactctatggtaggagggttgggggagaggagagaggggagagagagaggagagagtcaaagaggagagagagagagacagacacagactctcctagtatagtcaggaatcccccaaaatcagagctatgcttcagaaagcagtgtgggctaataatagcaattcctcactctgccaagaaatccaaatttagcctcagagctgctcaaaaatataaaaaaggggactgaggagtgggatagagggatgttacaaatgtgcatttctagaaaaacaaaatgagtaattcatccctttttgaaagagtatgcagtgttgattcaagttggtgccatgatttagaaggttatgaagccaaagttacagaccaggccaggcatggtggctcacacctgtaatcccagcactttgggaggctgagacgattgcttgagcccaggagttcaagaccagcctgggcaacatagtgagatgccccatctcttaaaaaaaaaaaaaaaagttatagacaagaaagggacaagtaggcaggcaagaattttgtcacttaaagtgaacaaaacaggtagtgtccggttagcagcagtagtgtaaaatgctttgtataagataaaccttaagaaaatttcttagtcctttgatactatataaacaatgatgtaattctgtcctgggaagaggctggcactgtgtgatgaccttactctgcaaactagattgaggtacttaatatgtaaaagtaaagtcttatattaaagcttgattacctagctatccactcacctctggtagcatatgtgat

SEQ ID NO: 80037 - DNA, 1032 bp, Homo sapiens
catccgggccttctcctcccctaaagcccccaaaagccggaacccaaccttccaagcaagtccccttttttctttcagccccaccgaattgtgccccattccccaaactgggctttccccggcatccagattccccaaattgtttcctgtcttcctcaaatctttcttactccccttataagtcacttcacccttccctttgaattccctccctgatgaaaactgcaccccccacccagactcttctcatatcactgccccccgcaaagtcaacctccatccttcagttctcagtttacccccactcatcaccctccccccattctcttcaggcctagcagtccttacacagatgtccagcctcttcctcctggtcccatacttcagcttcatctttcccccaccttcccctctccacacccctctcccagttaggccccattttcccagtctcccagcgccattccttttatttatcaaacaccaggtttgattcttgtgctccatcctgttgccccaatggtatacccccaacactcttggaaacattcttaccctctaaacatcttttctcagctggaactcatccttctccttcccctcttaactgaatcccgtctttggatcattagatcacaggacccagccatctcgcttccagtgaaccttccccctgtacctccagtgccttcaaaccaagctctatattctggacactagatctttgcaatttcctccctcaaaacccgaccctagtcttcccccattaattagagaaaggctgcacatctttctcagaccgagcaccctggttttccaaacttgcatggtatatccttccccctgcagatagttcctcaattttcctttctctacatgcctctctttctccaagacaacccttctcacctatctctccctcaaattttaatatatcccatatttctgcctctgttctctgaaactgttccacaatttcctaattccccggaatttttaatcctagttgctccttatacatcagaatggctt

SEQ ID NO: 80038 - DNA, 2769 bp, Homo sapiens
ggtgcgctggtacccttcctctgacaccacccagcaaggatggaagtaccgtcagttctgttagtttttcagtaagtgttggccccagaggcccaggacaagtgtcctagactccggctccctgaagggccgtagttcctccctctgccccgggtctcaagagcttagccgagcccagagcaggcctggctttagctctagtcccacgcctctgctcacggccgcctctctccctccctccaggtctggtcaccggggaggtggttctggtaatctgtggtggtgccgggacaggcgccccgagttcccactgcccccgggcggcctgcacagagctgctgccctccagagactgtgaatcccaagcctgactcagtggactgcttcctgttcccctccctcctcttcctcaccttgttctgcaccctcaagcctttctccaatgcctcccaggaggatttggggactttctccctggggcgcccagatccagctcggaggcctcactgggacctggcaaggcctgacctcccgcccaaacttgcttctgtagctccccctcgaggaagtgaggtgtttaattttgcatgttttctggcatgaattaagacacttatacttgtatatatgagtgtacagtttgttctcacactgtcaccatagcgacaggtcctggctcccagtggttcatcctgcctgcccctctctcctcgccccgcccctgcacccaccccgcttcagggaggcccaagttccgtggccccacacgcttccaggctcagctcccacctccacccaacagatagatggggtttgctttttcatttcacatggggctcctccgctcctgccttctcggatgggccaacagtcgtaagaaagccctctctgcccgttctgttcacctctccacagcgcaccccgcccgccgctgctcctcattctttccaaacctcgaaaccaaccaaaacgtgagaagtatttttgtaccctgtgtaacaaaatatttatgcatcataaaggatttttcatgtgcgtaccattaattattaaagcgacctcgttcgccctgtcagataagtttaatgtttagtttgaggcatgaagaagaaaagggtttccattcttcagcagtacgcctttgtgtctggcatttgtttaagaaaatgaaatgaaggaaacactgtgcaatgttttttgttttgagcatatcagtgctttactgtcagccgcagctgtgaccgtctggccatttcagacttgggagatgaggcggctgttgtcattgctgatcctgtgagaatgtgaaactggataatatatgaaatgcaaaataaaacaaaaccaaaatgactgctctcggcctttgcttcccccttccgtggacgcagactgccattgggaaggcagagccagagagatgtggagtcgggggaaggaagtgaagtgggcctggcccgctggcagctggcttgtgactgtaaaggtggtgggggaggaccttggagctcacttagcctctcctgcctccctggtttgtaagctggggaaacaaagtccagggtaagtgacttgcctaagggcctggcagttgtggctttacttcctcagtttccaggctgtcagggtagggagagactccctacaccaagagcaggcccccaggtgggaccttcctgggggaaggcggtgatatactcggcttaaccatttacggcctgtggtctttttgagtctcgctctggtaaaagaggactgaggtttgggctgttgggctctgccaggtggtgtctgtccttggcgtgcctcttgtgaggctgtgctggagggaaggctaggacctggaatcttgcccagaaggggttaacctcatccaccctgtagtctatgggctgcaactctgattcctggagcgggagcaaatgggtgtgaggctcagggaagctgtgcagtgccaagagcccaggctggcctgggccaggtgtcaggatgcccgtcatgaccctcagtcttaccttttgtgacttggggtctcgggttccttgtctgtgaagaggttgcttgaaatcctttcagactcttactggagggctggtgtgctgaactcagggtttaactgtttgttttttcatccactcctgggagagctgctctgcaccgcaccgcacctcagacccaaagccgtgcctggaaagggaggacagcagaggccccggaacccccctcccaataggtgttgctccagccttgctctaagcaaaactaaagtggctgtggctggctctggtcacttcctcacttgcacctcaggtcaccgctccccgccttaccccgtctcctgaatcccagtcctgcacaggtcggcttgggtctaagatgtcagtgctggtgaatgcgtcagctggcgacccaggtgctctgagggaggaggaggaggagcctggccaggaccaggccctgcaggtaaccctgggtgtctgtgggcgagttacctggacctcagagggtggctgtgttcgtgcccagaggagtccggggttactcgtctcccgcgctgtgccccttgcctcgctgcagtatcggaccagctggcaaggccgcccagccttcagcccctgcctgtgctggtgggaaagctgctctgtgtcctatggcccccacccagggccaagccgagggctgacctacttcatctgtgtcaagaaccagtgggtcttcctgaggtcgtgaattatttagcgaaggtgcctgggcctttctgagaggggc

SEQ ID NO: 80039 - DNA, 1098 bp, Homo sapiens
tacccaggaagcaggagttcccagcagccaagtgggtaactgggtctgcctgctccaacctcaagggagctgtctgcaggcccagcttctactcctttcctgccacacgctcatgtgctgccccttcccttcctgaggggactccagctcccctccctggatgctcatcccccaaccgcaactcaaggtcctgtgttgtcccgctccccccgccacacccctttccctgtcctgggtcaggctgggacagacatgcttcaccgtgcataactggggcaggcggccttccctgcggtcttggcagtcagcatacttgccttccagatgactggcccacagggaggagggaacgtgccattttcttgaccagtctctgggaacccagctttggggctactgctctgtggggccttctggcaagtgccagggtttaggcaacttccaggcactggtgaggatgatctcagatagctgccgcccacctgacgttatagacctctggacttagaggcttgtgatggagggcatggcacagcaggggtgggaaggtcaaaacgggagcctcagctgggtctcatccatggcttctcagaagaatcaggactgatgttggagagtcctaccccttggggtctacacggactttgggttttgttttgttttttgtttttgtttttgttggagacggagttttgttcttgttgcccaggcgggagtgcaatggcgcgatctcaactcactgcaacctccgcctcccgggttcgagcgattctccttgcctcagcctcccgagtagctgggattacaggcatgcaccactacgcccggctaatttgtatttttagtagagatggggtttctccatattggtcaggctggtctcgaactctgaacctcaggtggtccgcccacctcggcctccgaaagtgctgggattacaggcgtgagccgctgcgcccggccttgtttggttttaatagagacattatctccctatgttgcccaggctggtcttgaactcctgagcccatgtgatcctcccacctcagcttcccaaagtgttgggattacaggtgtgtgccactgcacccggcctta

SEQ ID NO: 80040 - DNA, 2680 bp, Homo sapiens
cagccatctcccatgctgcgttcacctacccaactgccactgccgctgccgccgccctccacgctcaggtaagccctttaaggttggggagggcgaagaacaagggctcttagctggccagactttgcatgtgcctggccacttggccgctgctgtcccagagctgcagcagaactcttgtcttccttgatggtttgaaagcccagaccccagggacctatttgtcctccccttgggtttaggatttgacagggagggagaagataacccacgagttcccatggaggatgccaggcagcccagctgtggttccccagccccaagcacccctgcccaggcaccgactatgttctcccatggtgatgggactatgattccagtcctaacctgggtatggtctctggagtcagaccatctgcctctgccccttcctgtccctttcatcaagctcttacagattgctgtgcctcgattttttttttttagtcatctgaaaaatgggaatgatcagataatctgccttagggttgttgtgaaagttagatgtcaagacgaagtgactactgagtgctaggatgtaacctagagcgccctgagtgttggctctcgcttccatgaaggctggacgctgtccactgtgaacctgtgccgggcaggaaacagggagtgaatgcttctggggagagtcggggctgttagagcagggccaggaaggctctgtgtggggtgctgggctgggtgcccaatgggcaggcagggagtcaggctttcccctggccatgcaggcgcttcctctggtctgacttggccacaagtgcaggtcactggagcactctgcaggggaggtctcatcccactgtgcgtgtgtcggggagcagtggggtgcctcacagtggcagtgacaagttgcagccaggcagccacaggaaggggctggggggcacttttgagcccacctcaacctttgaccagccaggtgatgagcactaatccccaggaagagctgcccggccagggtgtgctgtgctgctgcgaaggagagaattgaggttgctgggacctggctggggagcaggaggggatgaggaaggaaagcaggagaagccagaaaggagggttcacaggagccagagctgaggcgggaggagtcgggtgctctgcccgagagctgtgtgtacgtccattttcaggttcttccagggactcagtgacacctgggtttgtccagttccaaagcggaaagttcagattcaggggctgctaccctagcaaactgttttccccagcaggggaatgctccctggctccgcaacgttcagttgtactgagggcagaattgtggttaaccctggcgctcttccccagctgagcaccacaaatagcttgaaaattgatcagaggataaggaaggtggtaaagaccttcccctggagggaattgttgggtatttactgcaaactgggttctgtggctggaatagagcggggagcagggaagctcatcctgtctaccctgacctgggcagtgacttgatgcttcaggtcaagcggatgtttaactgcaaggccctgggaggcactggaaggaatcacaggctcccacctcactgggcttctcacctctgatcccagctttggcaccaattggctacatgatcctcacctctgtgtccccatctgtaaaatgagagggatagaccagataaggtggagaggttctgccctatcctctgaattgctaggctgtgacagaggttgggagccagggacaatgagtttgtcaaatgaatcagagagggcacctctgcccagccaggtgggggtggcactgctctctggccctgagctccacgccacagggcttccttcctcctgttggcttccttcccagttttctcccaccccatccacactctgcagctgtccaactctggcccaaatcctggttctcaacagctgtgggacattgggcacgttacccaccatctctgtgtttctgtaaaatggtgatgataatgcctacttgataggtgtgttgttcgcatgatggcatggagtcgcgtgatggcatggagggagtgctgtgaaagtgcagatggttgtgatgttatttaatatcattattgtctgggttcccttgggtcctctctgaggctggaggcctctttgtgcctgagttcctgccttctggccttccttggacggggactgggatagaggccacccaccccaaaggatagtggcgtttttggggaggcaggctaatgggaagagattagaccagggagtcattagttctgtccttgctactcaaactctctgggcagccctttcctcaatagtaaaacaggttgttttactgtttcccgactaagaacattttatttttttccttccaacagccccactgcttgccccctgacagtgctgccccagagatagggtataaaagtgtctaaatgaagtatggacactgttgatcttaagtgaattgttttgaacccaaaagaccaatagaaggactgagtttttctgtgcctgggggcaaggaggtgacttcaggagaaggtagcagctgaaggacaaggtgatgagaacaagtacctctgttctctaccccagctgcatgccctttgccagtagcccagcctgagcccaggcctccacagctacgtggctgc

SEQ ID NO: 80041 - DNA, 1033 bp, Homo sapiens
aagggtgttctctctttttcctactagcctgttggttttgtgatctttgacagccgtgcaggagcagaagcggccaagaatgcgctgaacgtgagtaggtggagaacaggtcttctctgactcacagccctcttaggcagtgggtgtgcagatgtatcttatttcccggccatccctgggcagagtccttggcgacactgtctgtgccaaaggccattactcaaggcctgagctgcctttcctctgcctcagccaccgtgtgggcaggtcttcgaggcgagcttgtttatggcgcccttctctactctctgccattaacactctgggtcccccggagtaagcctttctcttcttttctctacccatgtagggtattcgctttgatcccgaaaatccacagactctgaggctagagtttgccaaagccaacaccaagatggccaagagcaagctaatggcaactccaaatcccagcaacgtgcaccccgccctaggagcacacttcatcgcacgggacccctgtgagtggcactctgagctggcaggccctcatggagttgcattcagggcagacttgcaggctcttgcagagggaagccccttttccaggaggctttttgtgtccacggccacccatttttgaaacacctggttttcctccctcccctgcagcctgcctagaatttctgagctgccagggcttccagcttccctgcaaccttctttaatttctcatttgagacgagctgaggcctgtcttaaagcaggcaggatgcacaccatgacaggccgatttaacgtggcttccttgcctggtctcggggtcctctgtggttgggggtggtctggcctcagtgtggggcatatggctcaaccatagtgctgggtccccttctccgtttggaaggggaggcgagtgttctgatgatggaggccattgtctcctgttgtagatgacctgatgggggctgctctgatccctgcatccccagaggcctgggccccctaccctttgtacaccacagagctgacc

SEQ ID NO: 80042 - DNA, 2357 bp, Homo sapiens
tcccagctactcaggaggctgaggcaggagaatctcttgaacccaggaggtggaggttgcagtgagctgagatcacgccactgcagtttagcctgggcaacagagtaagactctgtctcaaaaaaaaaaaagaaaaaaaaaaaggcatgctgggctgggtttgtacccttatcaaacagggctttctttttgcctctgttcaccagcagactcagtctgtgtgcagaggcatccggcagacgcagcacgatgcctctgggatgtacccagagaaaggaaagggctttgagaaattgagtgctgtgaaacaatgttaatttgccttgggtatccaaggaggcccaggaaaggctgaattcctctaagctctagaaggattccagttgcctgcctgaaggaagcgctgttgtcatccctgtccgtcttgggcagcctggccctgatcactggtctctgtctccaggtccggacactgtttgtcagcggcctccctgtggacattaaacccagagaactctacttgctcttccggccgttcaaggtgagtcaggacccagccgccccctgggtagagcctgggaccctggagaagcagcgggagtgaatctcgggtcgggcagggcagcaggatgatgcgggaaggcgtggcagaagctgtgggggcaggtccagcccgtgtcctggttctgcgaattcacatgctgccttctgagcctctgtttcctcgccagttaaatggagacagtaagaatctttttttttttttcctcgagacgagtcttgctctgccgcccaggctagagtgcagtggcttgatctcggctcactgcaaccgctgcctcctgggttcaagcaattctcctgcctcagcctcccaagtagctaggattacaggcatgcgccattatgcccggctaatatttgtgttttcagtagagatggggtttcaccatgttggtcaggctggtcttgaactcctgacctcgtgatccgcccgccccggcctcccaaagtgctgggattacaggtgtgagccacggcgcttgtcctttttgtttgttttgttttgagacagagtctcactcagttgcccaggctggagtgcagtggcgtgcggctcactgcaacctccgcctcctgggttcaggcgattctcctgcctctgcctcccgagtagctgggactacaggcaccctccaccatgcctggctagtttttgtatttttagtagagatggggtttcaccatattggccatgatggtctggatctcttgaccttgtgatctgcccgcctcggcctcccaaagtgctgggattacagacgtgagccatgatgcccagctaacagtaagaatctttaaatatatgtggttatataaagaatctttgagattcagtgtagccttttcagtttgcagatgagaaaacttaaaaggtaaggtctgtgctctcgggttactagttagtggagcaaatgggaatttctgcctgaagtgatgagtgctgccgcgtgatgcccaccctatgtgctagaccgcgtgattcagaacgcagggcggtggacgtttggcagtggcggaggtcagggtgggttgatgttgacagggagaagggtgtgagaatgactcaggggaacgcgggggctgatgaggtggcagcgctgggctagcacaacatacgcttctgaccttccacggtaacagccacctctctccgcaggggtatgaagggtccctgatcaagctcactgcaagacaggtaatttctctcctagggttttcttcctcccagcccagaccggctgctgagcttcaaacaagggcccgttaacccttccctaatctagaggcatctggcggtacagacttgcgctccctgttgtcctgtttctgacagagcagcctctgtaggtcccactgtctcttcactggccatctgagcccagccagctcctggtcctccctgtctgtttcttaggaatctgggagccccgctggctgaggacagtaaagcagttagctgagctctagctttttttttttttgagatggagttttgctcttgttgcccaggctggagtgcaatggcacgattgagctctagcttttaatacaaggaggccagggcccgctagcctttgggggctatttggggtctagactgatccttgggaaaatgaagttggagcagttttcaacctattgctccttgatagaaccggagtcttcccatgcccttgatacattggtgtcccctttcttgctggggaaaacactgggacttacttttagttatctgcatgcattaaaaacaatacttttactaaaagggcgacgtttaattcagtggaattaag

SEQ ID NO: 80043 - DNA, 1001 bp, Homo sapiens
catcatgttggccaggctggtctcaagctcctgaccgcaagtgatccaccctccttggcctcccaaagtgctgggattacaggtgtgagccaccatgcccggccctctctgccatttatggtatcgttctgccatgctggatcgtatctggtctctggctgtgagtttcttctctgcagggactgaggtgtgtagagatgggggaggtctccagtgcttagacctgactctagggacattgggagatggaaatgttttgaggcttggttcctgtctctagggctttctgtagtcaaggtgaggggtacctcagactgctgggaactataaggcgaggggtcctaacggccactgtggggcttcagaggaaggaaagggtagttgaggactccggaaagacctgaaggctggatacctttagttaaggagtgaggaaggggtgagccgagggggcagtgcaggcagccttgtggacgcttgtcagggccctggagtgggtgggctgggcgggcttgatggaagcaggtgttgggcggctttggaacctcttgttcctccctacatgtggctggtcagcctgcggagcccacgcttcccctgctcctggtttgccagtttcccctttttctgccctcctcactctggtgtggctgtcatcctaaacaagtgtcatactgagtggatggatggcagcacttacccacccatgacgctgatgaggctgccctgtgccgctccccctgccctcacaaacagcagagtcagggtgcctggtctcaggagccctgctcctccgtgaactcagctgtgtgccgttgacaaatcaccaaggctttctgggtctcagtctccctgtctgtacaaggggctgggctttaagatgtcatctgctggggtggctggaatctagtaggaaccaaggcgggtgtttgggaatcacacttgctgtgatttagcctcccggactgctccccacagagcatctgtgctcaggcagacgg

SEQ ID NO: 80044 - DNA, 1021 bp, Homo sapiens
gatggaggcaagaggatcgcttgagtccaggaggctgcagtgagccatgtttgcgccactgcactccagcctgagcaacagagcaagaccctgtctcaaaaaagccgaaggccagttgttcctgggtaccttgggctggccccactgggtctgagtgggttggtgtgagatcaaggtctgcaaaagagcattgactcgtgagctgggcacttgggaacaggctgtttctgacatgctcggtaactgcgagcaactcgctcgacccctaggccctggtttcctcctctaaaaataaggtttcttccagctcagatgttctgtatttgggttgctactgagggctgggagttggggaaggatgtgggaggggcttataagaggctcgtttttccctttttggatttctctcctcttctcacccccttcccaaagtagtgttttccatcgggatgacaccgggagagctcgctcgaagcagtgggtaggggactgctgaagcacgtgcattcgttacttgaacattgtgagtggacagttgaaacaattcttcctttccagattgaattctaacttttagagatgctaaagggttgctgcaaaagtctttttttttttttttttaaggatatttctattgcctgcagtgagattttcctggggtgtcttttctccaagtcccaatcctgtgagacaggaatttacagaaggccagagttggcctctaggggtgactgttcctggtgggttggtgggttgtctgtgggcagggaagagtggggagtggttccagtggtttcttgcctcagtatccttggtggagaagggtctgtttgctttcttttttttttttcgagatggagtttcactctttttgcccaagctggagtgcaatgacgtgatctcggctcagtgcaacctctgtctcctgggttcaagcgatttctccagcctcagcctcccgagtagctgggattacaggcgtgcgctaccatgcctggctgatttttgtatttttagtgga

SEQ ID NO: 80045 - DNA, 1416 bp, Homo sapiens
tcagatatcgagggacaactaaacggtacgaggtgatactaagttatagtaatttttaaaaaccacttttttgaggtatgattggcatatataaaggtgtatatttagtgtatacaacttgaagagtttggagattgttaaagtaatttttaactggggggcacccctggaagggggagagtggtatttatactattgggttgagggaggatataagtttcttaagagttaaaaaagtttttgccagcttaatggtaagctatagaaaggcaggggttaatggcagctaagggggctacagtttgacctgaggggctttgcccttccctgcccttccacctcatcccagtgtggctgggacagggctgctgcttgcaggcctggtatcctagagcccatcatgtgtcctcagaggggtgtcaggaagcagccagagccctgggaccactgggtggcttgaggtcagccctccctgagatgtgggtgaacaggtgcttagacttgtgtggatggaacggggaggggggtgtgggaggtgggggataaggcactctagatgagtgcgaggtaattcctggatccagtgtgctatttgggcacctcccttttctttaacatcaatagcatttgaaagcatctgggacatcttggtctgcaggctttttttgaatatgagggaatggaggcttctctgtttctgggcactcacctagaagccctgccaggcatatagcagtaggaggtcaggttcccctcctcactgggagttattgtggatgtgtcccctctgcctaagtaatctaagggagaggctgtactaataataatgaacctgtatgttgtatttatgccaggcattgttatatgttctgcaccattttaactcttaatctttgtaagagcattatgaagtacttacattattatcaccatttcataaatgaggaaagtgaggcacagagaggttaaataactttcatgtagctattaagtggggaggttgggatttgaacccagagtttgctcttaaccacacagtatactgctattgtgttttatattagggtttttggtgagactggaaggcagggggagaaaggtatctgcaattttcttttttttttcttttttttgagacggagtctcgccatgtcacccaggctggaatgcagtggtatgatcttggctcactgcaacctctgcctcccaggttcaagcgattatcctgcctcagcctcccaagtagctgggattacaggcgcgcaccactacggccagctaatttttatatttttagcagagacggggtttcactgtgttggtcaggctggtctcgaactcttgacctcctgatcctcctgcctcggcctcccaaagtgctgggattacaggcgtgagccaccgcgcccagccggg

SEQ ID NO: 80046 - DNA, 2251 bp, Homo sapiens
gaagggaagaatatacaactgtgacatctgtccactaatgacttaagtgtggtggatttgtttgggctccagaggccttgccctccttgtaccttgatgccaaaaggcccttggctttggggatcttgcccccatcctgactctacctggctgttagaatctcccttgacagttggggagggtgacagggttgctagcgtacttggagtctctgcttggccccctgctgtgggctgaaactgggggagagcatgtctcctataaagctgaatggggacccagaaccccacttctgctaaagggtctacttcagtggggacttcacactgcccaagaggctggtactgggcaaaccctcagacccactgctgttgggtgagaagggtgacccatgtggccattctaagtcttgaaaaaagcatttgaggttttagccactcctttctaagtaccttttctgggaaagagggcaggattctcaaaaagtggaatccctactattcctccttgggagttgagatggcctgcggccctatggtggttccaaatccgcgcacttggaaaagggcatggtgggctcgcgtttagcagaggtccagaacaaagggttctgagggtctcctggagcccagtgtctgtctggtctggtaagggaaagggttattccccaagccctggcctagtcttctgaatagtgggccatgagcccctgtgctggtggctccatcttggattggtggtgtaggctggaactggaatcctccctgtagtttagatgctccctaagcagtcagttctgcagcccctaagagcaaccatctggagaatcagcgttagcagtggtttactcccatggctgacacaggtggcttcttcccagtcaactcttggagactagcgagagcaagcccaggaaaccaaggaatgctgctgcacgccgtaagacctcaattcctaaaggcgctgggtcactggcgaagggagtgtatttttcatggttctgggagttatcagtgaggttgcttgtcctgaactgctttggatagccttgactctgcctgcttgactaccttacctataggctttatccatgtcatacgcattaagttttctttctggacccaggggttaaggatacaagtgaaaattctcagcctaggaggtcggaaggacttgccaggaagtggtggtaggtgaaatgcaatgatagataaaataaaggcatatgagcacatggtaccatggtgctcctgagagattagaggtcagccttccctgagatgtgggtgagtaggaggagcaaggttagacctgtgggggtggaaaaggcattccaagaggagggagtcgcatgtataagtgaggaggtaggtttgtgtaaccacatggcttgtttgggtaactacctggagtttgctatattgcagcaatatcaggcagtgcagccataatgagagtttggaattagggcagtaatgactgtggtattacgggaaaattggcatttttctgccacttgggaagatgtgttcgaagctttgataccctttgaaagctaaggagggcagtaaggaattaaggggaggagctgaatgtccctcccaatctagaggttgtgctgtcctgcaggtaagtcttgactggagctggggacgacatgaggtaatacagtacatgaacctgtccggggcaggctgtatcagtgctgccaaacttcagacctaaatgtcctgtcttagtgattctcaagggataactgggtaattaccatgtctctgaagaggggtaaatgtgatttctattttgaaagtggagaccttgctttcataatacagttgctgttggccttccatttctatgggttccctatccatgaatccagttgtagataaaaaatacaataataaaaaataatacaaataaatataacaactatttacatagcattcacattgtattaggtattgtgaataatctagagatgagttaaagtatccagaaaatgtgcataggttatttttttatttgtttgaaggggagtttcactcttgtcacccaggctggagtgcagtggcacaatctcagctcactgcaacctctgcctcccaggttcaagcaattctcctgcctcagcctcctgagtagctgggattacaggtgcccgccaccatacctggctaatttttgttttttagtagagacaggatttcaccatgttggccaggctggtcttgaactcctgtcctcaggt

SEQ ID NO: 80047 - DNA, 1821 bp, Homo sapiens
gggaaaggcccggccggaggccggcgccccgcggccggggccggggcgagcccacggtgggcggtggggattggctgcgcgttcccccggagaccgcgcggcgggcgggggagggggctggccgggccccagctgaggccggttccggccccgccccccgccgccggcgcccgccccctcccccggcgcccgccccccgccgccgctgccgccgccgccgccgccgcggcgcactcgccggtcgcagtgaaaaggcggaggcggcggcccctccggctcccactgcctcccccgccgcaccccctccccaccttccgcacccgccaaacttgatgtgaccctggcccgacgcggaggctgcccctctcactgccccgtgggtcccccgccacccgctccgcacccgcgagcgcaccgctccccgcgccccttcccacttcccgcggggccggcgccgcgctcgccctcgcgttccttcccgccgccccctcccccgcaccatgagcaacctgaagccggacggcgagcacggcggcagcaccggcaccggctccggcgcgggctccggcggcgccctggaggaggaggtgggtctgtggccccgggacttgccgggtgaagcgcacgccaggcgggcgcgggagagggcgagcggggcctgccgcgcctcgcggggccggggtggccatcgctcccggcgccttcccgccgctgccctctcgcccgggtaggagcggcccgtgtccgcgggcgggagcgtgcggcctggactgccccgccggacaggcattgtctccccgccctctcgggctcgaggcgggccgcgcgcgccggccgccgtccgggcgtcccgcggtgggcgagatgcgccgcgtccgttccatgcctgccgcccgcgcgccccttgctccccaccccgtagccgctcgccgccctcctccgaggcgcacctcctgcgtggccaggaccccgcctcggcggcacggagcggagcgggattagcacggcccgagggcggcaccctcactccactgccttttccgccctgaccccctccccgtgaccttggaggcctgggccggccggctcctcggttcctgcgagctgttgtcatgggggtgggcgggctttcttcacagccccagaacctgggctttggcagaggtgagcccacaatttaattagtttggaagatgactaaagacactcagttcgtccttctcctctctctgggtttgtcctggcaaccaagccaggaccccaaagctggcctgggtgggatcctgccaggaggggcgaaatcatctcgtccaccggccatgtgcgaaagggagggagtgtaaggcggctccgtggaaccaccagcagctgggtggttaatggatggtagggaggatgtgtgtgcggggtggggtgctggataaaagcctcaaagatatcagtgaatagggacgaggagctaggctggcggagacaagaactggagtagaaggggacaggcttcgcagggcctctggcctctgctgcgtcattctaggggtgagagagccttcctgcccctgccctggcatgttctcgcccaggaaaccaagggctggttatccaccttgggcgcccttccccttggcctgggggagaaaccgcagagcccctggtgtggactggtgttgcctcctccccttgtgctgggggttggtgcagaatggcgccggtggccctcggctgggctgggctcagcgccgccagctcccactcggctattcagagaccttcagccagccccagtcgatgacaatctaggtttggatctccactttttgg

SEQ ID NO: 80048 - DNA, 1095 bp, Homo sapiens
tcgcgcagacctcagctccgggggaccgagttctgggggtgatggccggggggagggggttgggagacacctgagctttggcccgggctgggcgctgttttgctgagtgaccttgaggaaatcacttcccctctctggcctcaggctcccagcccagagggtgggacttaggatctcaaactcccttcccactcccagtcactatctgaataggacttaggtggggattcgagtgttgggaccccaatggtcattagcgagggctgcctcgaatgaccaagaaggttctgttgcccaccttgccctcaacacgcctggctttcgggtcttctcgctcctcccccgacctcagtgcccctcacacctttccctgcctcctattctgagcccgaaggctggggacggatgtaatagcctagaggctgggggaggtgggggaggtcgtcgtgactccccccgcacccccgcgcaggtcagtagggcgcggcctctgggtcggttttctcttctatttgaaaacccagccgatgggggcccgccctgctgccacagtagaaacccgcacccacctcggggagcgctggaagcgctgcagcctgaatccggcagagccgcgggagaactgggtccctcctcagtgccccttctcctggacggggcggaggttgcggtgacccgagatcttgccattgcactccagccagggcaacaagagcgaaactccgtctcaaaaaaagaaaagaaaaaagaaaagctggatttgcagtcacggactggttaggatcccagaccgtggacaagtgcctgagcccccagaacctctgtgtgtcgacctcctgaattaggtaggactagcaccacaggatcactgtgctgtggcttagtcttcccagtaaattataatctccatcctgacctgccatctcacagataaattgaggcctagagatgggcaatgtctttccaatgatatactcattcctttagtaaataattattgagcacctactgtgggctggggaccattttctgctggtggcaaggccaagagcaccctggtttcccatcagccctgttgccaacacttggctcagg

SEQ ID NO: 80049 - DNA, 1153 bp, Homo sapiens
caggctagagtgcaatggtgcgatctcggctcactgcaacctctgcctcccaggttcaagtgattctcccgcctcagccttcccagtagctgggactacaggcacccatcatcatgcctggttaatttttgtatttttgtagagacagggtttcaccatgttggccaggctggtctcaaactcctgaccgcaggtgatccgcccaccatggcctcccaaagtactgggatgacaggcatgagccaccaagcccaggcaactggttaatttcagccccaaatccctgagctctccctttctctccttgccttcctctgggccacattgtgaacctggatcccaggttccaatctaagacaaacagtatttccaaagtagctgtgccagaagacctggatctgcgtccaggtcaccacggcaacccgtgtgaccataggcagatagtttaatctctctaaggctttgttttctcaaggtaaaactagagaactagcgacacctttcaggcaggctttcatgagtgttccctaggcttctgtaagaattaaatgagatcctgatgctgaaacttctttgacgtcctcaaagccccaagacaaccggaggggcgattgtaaagtcagcaaaggaacaacacaagaacttcacttcagatccagccttcctgagaggtggtgtctcctccctgcacaccatctcccaaagatgttatttctcctgtccccaccacatagctgaaaattagcaggggaccatctgaggacagggatagcgtctcttcacctttgaatcaaatcttggaagctcagttcaggtcctggcagaggggtttcagtaatgaatattgaatgattgaaaggctagggttaccaaggaaatatctctgacagcgtttttttttgttttgctttgttttgttttgttttgttttgttttgagatggagtcttgctttgttgcccaggctggagtgcagtggtgcgagctcggcccactgcaacctccttctcctgggttcaagcaattctcttgtctcagcctccagagtagctggtattacaggcactcgccaccatgcccggctaatttttgtatttttagtagagacggggtttcaccatgctggtcaggttggtctcaaactcctgaccttg

SEQ ID NO: 80050 - DNA, 1042 bp, Homo sapiens
aggctggagtgcagtgatctcggctcactgcaagctccgcctcccaggttcacaccattctcctgcctcagcctcccgagtagctgggctacaggcggccgccaccacgcctggctaattttttgtatttttagtagagatggggttttgccatgttggccaggctggtctcgaactcaggtcatctgcccgcctcggcctcccaaagtgccgagattataggcgtgagccaccacacccagcccagaataaacttttctttagtgaatttccaagtccacctcctctccctttcctggatacattcacttcccctctgccatctcctgccccaccattttctaagccaccactagatacgtaaaattgtataaattgtatacaaccactgtatcaagtataaagtatagatataatgaataatcctattttgcacagaaagaaaccagggctcatgtgtcccatgtcacacagttagtgagtggcagcctggattcagctccacgcctgtctgacccagagcctgagtgctttcctttcactccatccctcaactcttacctggatctgtctcccggtccccctcctactcagacagccacctgctgtcatgctctccctctgtctagagactctctggactggacgaggagatccaggggcagtagcagggctggtaaagggtcaggcctttcggggcaagggacttaaggctgagctgactccatctctgtccctgcatcccccagggcatgaccctggattgtgtggagatttctctgggccgtgtgtttgccagtggccaggcctatgtggccctttctcgggcccgcagcctgcagggcctacgtgtgctggactttgaccccatggcggttcgctgtgacccccgtgtgctgcacttctatgccaccctgcggcggggcaggagcctcagtctggtaagagggagtcatccagtggtgggctgtggccacgggcagggtgggagctaggacagagggagcgccggcccagtgggacctggggtgggggcagaaaa

SEQ ID NO: 80051 - DNA, 1035 bp, Homo sapiens
actggacaatggtactgtgagtgtaaacaggggtgtgagagtccaaaggcagatcttccccaaggctaagcccagcctctgtgtgcgggctagaggggagagggagtgtgctggaaggatggttctgaaaataaatcttcggagtcgcgtagggttttcagacccgacaccacgcgccgccgggtggctgccgcagcggcggcctcctcccaccacgcccagccgtccactggatttggtatgctcagccaccaccataaacctccttcctctagcaggcaattggtacagcccaagctcctggagtagagacgcaaagaaagacacgcccattgttacgcccctacctctgagtggctggagaatttaaagatccagtcggtgattgggtgattttctgcctctagcatttgaaaaatttctagtttcggagcttagccacaggccggctacgatctgcttgttcatctgagtgtcggcacaagtgagtgtctgcccgaacccagaggtggggagcaaagagcctgatttatctaggggtttccggcgggagggtgcaaacaaatgggtcagcctgagggagcacggcttctagggtcccagggtcccccgcgatttccctagccgaatattttccacctcgtccccaccttggtggtgggaagcgcgagggcatgggaatcacactgactttgactactagccgctgtggcttatgaagggcaagtgagtttccctctcttagcctgtttccacgtctgtacacggggaagagtgagacctgcccgctgcatataagccagtgaatgtacctacaaggcagaagtcgcttattacacggcagccctctttgcatctccccacgggcgattctcctgcttcctggggagagtactctgaggattcatgtgctcgccctgggtctcggggaaggaggattctttctgcgcagggacccctgttctagtgaggtccttgcaggacacctgaggctccctaatcctcggtgcccatccgccgctctggaaattgttg

SEQ ID NO: 80052 - DNA, 1003 bp, Homo sapiens
accgccccctccccggccccgccccggcccccggaagcctcaccccgcccccggccccgcccccccgaagtttcttgggcccccggcagccggcgggacagaacgcggagagtcgccgcctggccgggcgtagacgcggtggcagagcccgcgcggcgctggaagcgagtggcggagcggcgggacctcggcggactcgccatggaggaggaggtgagggcggggcccggcggggcgttgggctggggtcctcgagcccctcacggggattgcggtcctgggctcaggccctcgttcctgcccgccccactcccgccagtctcacctcaggaagagcctgggcaaatggggcaggggcgaggggctggatccatatcggggacttcgcagaccgcgtcctccttcattctcgctgactttctcaccagttgtggggcgtcgtggttgttaccgttcccattggattgaccaggagactgagactccagcgagattgatgacttgctgaaagtggcctgggtgactgggctcgaaccccgattaccgtggtcggatcctgactctctctctctctctgtgtgtgtgtgtgtgtgtgtgtgtgtgtgtgtcggatcctgactgtgtgtgtgtgtgtatgtgtgtgttggggggttcctgtctcaaggatcggatcctgactctgtgtgtgtgtgtatgtgtgtgttggggggttcctgtctcaaggatgtgaccatgctttggtggcaggaggattggagaagttgcttttttctcccttgtataagtctctgtatcttttcccccactctctccccgctccacatccatctgagcagctagctgtagggaaggaatcgggagtccggcccacctagggtctgatcttagtccctgccttccccacccgagggctggaccaactgtgtccctggagcctccttctaaccactcaaaacactcttggcctgggattgggtcttgcccctgcccctgccctttactt

SEQ ID NO: 80053 - DNA, 1041 bp, Homo sapiens
tggcactttgggaggccgaggcagatggatcacttgaggccaggagttcaaaaccagcctggccaacatggtgaaaccctgtctctactaaaaatacaaaaattagctgggcatggtggcgggcacctgtaatcccagctactcgggaggctgaggcaggagaattgggtgaacccgggaggcggaggttggagtgaaccaagatagtgccactgcactccagcctgggcaacaagagtgacactccagctcaaaaaataaataaaataatgattctgcatttcaacagatacatttgctgcaattccatggaaccaaatacgcggccattgacccatcaatggtcagtgccgaggagcttgaggtgcagaaaggcagccttggcatcagccaggaggagcagtagtgtgtctctcgctgtcaatgatgagttgacccggtgtgttcttgtatagtcagtggcatcagcacccgtcagccggccttttccttcaggttcgtcaggctcaccggttctcactgtgtctgggaagtaggactgatggtcatcttcatgacaggcggcatctccactaagcctgtgtaactgttccctctttggttttcttagcttttgaatttgaagaagtacttttgaagactcccattttaagaaccgtgcagattttgctaccaaaagtcttcaccactgtgttcttaagtgaatgttaatttctgaggtttgggactttgtggtggtttttttcttcttttcttttccattcttctttctttctttttatgttgtttgctgtaaatgctgcacatccagattgcatatcaggacattggttattttatgctttcttggatataaccatgatcagagtgccatggccactaccccactgtttgctctcctgcaaatcaactgcttttaatttacacttaaacaaattgttttgagtgttagctactgcctttctagatattagtcatttggaataaaaattcaatttcactgagtcgcttttgtgattattgttgctgcccaactgggct

SEQ ID NO: 80054 - DNA, 1001 bp, Homo sapiens
tatcgttattatttcagttgcagtatccagtttattgggaccatctcgagttctgtgatggattcagaaaacttttagaccatttacaattggataaagtgagtaccctgaaactaattacatacatacaattttttttttattttttgagatgaagtctcactctgtcacccaggctggagtgcagtggcgcgatctcggctcaccgcaacctccacctcccggattcaagtgattctcctgcctcagtctccaaaatagctgggattacaggcgtgtgccaccatgcccggctagtttttgtatttttagtaaagatggggtttcgccaggttggccaggctgctctcaaactcctgacctcaagtgatccgcccgcctcagcctccctaagtgctgggattacaggcgtgagccaccgtgccgagccctcttttattttttaataatagctttattgcaacataattcatataccatataatttacccttttaagtatacagttccatgtttttcagtatactcccaggtatgtgcaaccatcactgcagtcaatgttttataatttttttaatgccaaaaacctcatattcattagcagtcggtcctcatcttcccccctactagccctgcaacctaatttatttttatctctatggatttgcctattctagatattttacataagtggaatcgtatcatatgtggtctttttgactggctttttttatttagcattgtgagtttaaggttcattcatgttgaagccggaatcaatacttcgtttctctttacagttaaatcatatttttataaatatgccatatcttgtttaacgattcatcagctgatgcacatttgggttgtttttaccctttggatatcatgaataatgctgccatgaacattcatgtacaagtttttgtgttgacatatgttttcagttctcttaggtatgtgtttaggggtggaattactgaatcacagttttcttagaca

SEQ ID NO: 80055 - DNA, 1035 bp, Homo sapiens
cacatctggtcctagcattgccatgtgatcttgggtaagtcatttaaattttctagaccagattccttttctggaagaactaagggtgttggaataatttctgtaagagctcttctggtggccgggcatggtggctcacgcctgtaatcccaacactttaggaggctgaggtgggtggatcacctgaggtcaggagttcgagaccagcctggccaacatggtgaacccccatccctactaaaaatacaaaaattagttgggcgtggtggcgggcacctgtaatcccagatactcgggaggctgaggcaggagaatcacttgaactgcaggaggtagaggatgcagtgagctgagatcacgccactgcactccagcctgggcaacaagactgagactgtctcaaaaaaaaaaaaaaaagagtgcttctgattctgtgattgtagtatttcaccaaattgttttctgtagttggactatatactgacaaaatagccagtttccttggctttcttctttaaaatattgttggtatagctagatgagactctacatttagttctgatgtaaacatgaattcttgacgtgaaatatcacatgcttttatttcaggattaacctccatttcagctaatcatgggagagattaaagtctctcctgattataactggtttagaggtacagttccccttaaaaaggtatgtatggttttactatacctcttatttgcaaaatcttgtattgtttttgtgtgtgatttagatgtcatgtcttagtagtgtttgagagtaaaggttactgccgagtatcatgactgtgggttgcagaggattaagttcactccttccctgtcatgtacagtcaacttttgagactcattttagagtgaaagcaagtgtaactgtactcatttttatttatttatttatttatatttatttttgagatggagtctcgctctgccgtccaggctggagtgcagtgcactgcatgatctcggctcactgcaacctctgcttcccaggttcaagagattc

SEQ ID NO: 80056 - DNA, 1048 bp, Homo sapiens
acggagagcgtctacggttgtgccaaaggaaaaaaaatgttcctaagaaaagagtatacaaagttgtgttcatcaaagtctggaacccaaaggtgtccctccaaagctgtacacgacagagaaaacgcgaactgaaagaagaagcaggtcccaaggggccaggcgcctcctccacctcctcctcctcctaggtacgtagggcagaactaaggctgacccagacgtaactcagccctctcctcacgccagccgcagccaagcatcccacggagcctccccccgcgcccgtcgccgtggcgaccgccggggccacgcagcaccgccccttcctcgcgacgtggccccgccctctgagaacccggaagcgggagtctcgcgccagctgagcggcggtcgggcggggggagcgcggcggcccaagctcgctcggccacgcgccccgccccctcagaggccggcctcccgcacgcaccgcgcagcctgctgtgcccgtgggtcccgagtgctccgccgcccgccccgacccgggcccagccgcctccacggcccgcgctcgtactggagcgaagagcggcctcctgaaggaggggaagggacgtgggggcggccacggcaggtgagggtgggcgaagccctgggaagcggctgggtgtgcggtatgcggggttgtaggtgtgtgtgtgtggcgcgtggctgccttggttggtgtgactttgtgagtgtgttctgagtgggccggtccatgtgaccacgcacgtgatcacgtgcccttgtgagtgtgtgtctggggccgaatctgggctgtggggtggtcggtgtgcttgtgaccctgcctttgtgtggctgtcaccggtgggactggcggggagctgtgtgtgagtctccagcgggaggtgggggcggcacagggcttaaccggggcatcctcctgtaaacccatcctggggctacacgactgcagcccaggaacatttctttctttctttctttctttttttttttctcagcaaacttttaagaactgtgagcagaggccagtaattttgga

SEQ ID NO: 80057 - DNA, 1064 bp, Homo sapiens
ccacaagtccattctgaggcccatcagcatcctgccaatacggtggacagaaggaatgtgagccacagaggaagctggtttaatttagaggtagttggagttccccaggaacctaggaattaggatttgtttgggcagggatgaaagggccagcctaaatcctaaacatcctatgtatttccccctgttggctagttatttcaccaaagcgctaacacaaaacttgtagattcagcattttaggtggtcactgggtaaaggaattatagctttgtatgtgcatgggaagctttcctttgggtttctgatgtacagagagcactgtggtttccttgtaagttttggtttacaaagtcaacatcagcaaatgtgttctctccggtatcagtactgcctcccaagatgttttttgatttttaagaagtactatgaagttgcataattgcttttttctcttgtatatcttttcttttttccattcttcagatccaaaattaacgggacaggctcttattccaggatcagtaatataccacaaacagtcacaaatactattggtttattgcaaggtatgtttttcattagtttcaagttatcatagttgttttactatgttatagtctgtatcatttattatttttagttggaacttcacttaactgcctgtccatagattgggtcaggagatcatttaattttcttaagaaatagtgaagtctctagcataattttttgaaagtgatgaagttttgccaaggcattattattactcaaagaaagaagattcagtaacttgagtgctttcttaaaagaacacgtgtattttcagtagcccaatttaattaacagctcttgtgcttggtaacataaaagatagtcatatcaaaatatctgactgaactactacaggacacacatatcctacttgcttttactgcttaacagtagtaaagaggagatttctgaactttttaaaataactttggaatcattattgttttataagatcatggtgtgttctgagaagtgttctacattccttccatttcctaggtattttgcat

SEQ ID NO: 80058 - DNA, 1050 bp, Homo sapiens
ctaaataacttttccacaatgagacagctggtaggtggtagaactaggacttgaacccagagctgggtgactccatagtacattgtcctgtgaggtttcactgccttggcccccatggggtgagagtgtgtatagccaagcccgggctatcctgatgccaaagcttccacagcattctctagaagtgaatcaatgacctgtactctacagaaagcagaatctctactgaggtttccccaagtagacacctatcctcacagcttaagccaatgtactaccttaccctgccacatagatcttttaaagttataggttcagccttgaagagccaatagtaaagattttttttttaatttgaaaaaagaaaaagaaaaaaagttataggttatttcatggtgctgaattgtaatgtgtttctgcttttgttcttcccttcattttgaatatatcacactcttttttttttttttgtagctcatttcagttttgaaaaatttgcctgaaagtctgagcaatggaaggcagcagccaatggagggggcgacttacggtgagtgaaggctgcagagactctcatctttctaaaggttctgcttgtcacgatagcatctgaacattctgacttcttagctgtacttttcccttaattttgattgagtgcccacttttgtgtgcttttccaaagaatggtagaaagcattctttctccctcttagcatatagcctcatgaaggattgagcatttttttccaacttcttgattttgaaaatattaaatagaaagactggtataataaacaccagtttaccccagagtcaacaattattaatgtttgtccatattttctttctctttatgtatttattacgtgtattttaaattctgcttattcatttggaagtatgaatcatgatctttcatctctaagtagtttagtatgcctttcctaagaaaaatgaacaatttcctgatagcatccaatgttcagttcatatttaagtgttcctaattgtctaaaaatttattttatagttttatttttcaaacta

SEQ ID NO: 80059 - DNA, 1747 bp, Homo sapiens
agaagtagggaccagttaggaggcttctgtagtaatgtaggcgagagtggcagcagcggaagtgatgagatacagacagattctacacagattttgaaggcagagccaataggatttactgatggattggatatgggacgtaagaaatcaagcatgactccaggattttggtgcaagcagctagaatgatggagtagccatttattgagataaagattttaggagatgctttgggtatcttgaatgtaaagtggctatcagacatccaggaagagctgtggaggcagtaggtattaggggactagagtttggggaccgagctgagctagagggaccaatttgggcgttgtcagcatatatatggaatttaaatgaaggtggatgaaagcctatagagggtgataaggagttaaatacattttgacaactcatgccacaaataaaatgttctttagtacttgaaaagaaaatatcaggccgagtcatgtgtcagccaaatatggctgtgcccaggcgagttgagcaaaggcttcagtgagcccgggcatggctgaagacgacctggggaggcaccaaccagctgctgggagaagagcataaggctcaagatggaaaatcataaatctaatactatcaaggaaaacttaacaatctttgatatcataaccagaaaaattaaccagcttccacaagcagaaaggaatctacctgaagagggatcagcatatgttggatttaatgctctctgtggcctcatagcaaatggtctttttcaatgcgtcttgaacatgacacaggctcttacagctgctggcttaccaatggcagtgatcccttttcttacaacaaacacagcttacaaaagttttgtaaattttccttcgaatacaggtgatttgaattgtgaaacgtgtaccataacacagagtggattggtcttgcttttggtggtctataccctcttttcttgtctatacctgtgactggaggcctagcagcctggtatgaatcaactctgttaccagagaaagggaacatcttaagttactggattcaaatttataagcctgtctttagaaagatgttatttcctattgtgttccagactgtgtttgcagcattccttgggtttaaacaatataaactacttctaaaggcccttcagttacctgaacctggcagagaaattcattgactttaagcaaacatgtacagaaaaataaaatggtaaaaataaaaaaagaaaatattacagaaagcatagagttcaaattatcacattttatatacaaggtccatttataaagaccaaggtttctatactgtatttccttacaaataaaacttactagggaaatttaagaataagagcctcattcaaaagtcggccaaacgaagccactactccaacatcatattctccagatcccacatccggccactcatatacgggaagctgagactgcacagcatattgcttcactggcagtccttttggtgatggggaaggcattgtgaccacctccagtttgtcgattaactcttcttctttgttttccctaaattagataggaagaaaaatgtgacagtgttaaggcaatgactcaaagctaaaactacttcacatatcgctaagtatgtttatgattaatctcatgaagcatttagggctaaatgattaaaactagtgtgagagactgagttttcattttttctttttctttttttttttttgagctggagtctc

SEQ ID NO: 80060 - DNA, 1077 bp, Homo sapiens
tccatcgaccacagtgttagctaaaacccagggtagagtgggctgtgatggaagcccggggctcagaatctgacgctgtccaggcttagagagtctctggctgaacagggtcccccaggccaggggttagtgttgtgcccccggggtcctggtttgccctgggctttacgtcgccttctttccgcagcacgacttcagcctggagaggacggcactcttctgggtggaggccgccggccagggacccagcccgtaccagtgcggtgacccggggacagcgtcagcccctccagcctggctcttgctagtcagccccgaacatgggctggcgcctgcgcccaccacaatcagagacccggaggccggacaccaggagaggccggaggaggagggtgaggacgaggcagaagcctcctctggcagcgaggaagagccggcccccagcagcctccaaccgggctccccggcgagccccggccccggccgtcgcctgtgctcgctggacgtgctacgcggcgtgcggttggagctggcaggggcgcggcggcggctctccgaggggaagctggtctcccggccccgcgccctcctgcatggcctccgcggccaccgcgcgctgagcctgtgcccgagccctgcgcagtcccccaggtctgcatcacccccggggcccgcgccccagcaccccgccgcccccgcgtcgcccccgcggccctccacggcaggcgccatccccccgctgcggagccacaagcctacggtcgcggtaaggattctgcccgcccctccaaggccgccaatcagcagcccaggccccataatctgggtgtccagcccagcccgcagcctcggtcccctactccacgcgctcctgcatcctcccttgacctgctcccacctgggcctgtaccgtgttgtcctcctgcggccctttgactagagtagagtagtccctgctcagaagcccccattccccgcgtttcccactgtgcctgccttgcttttttttagggagcaggtcacagtggttttaattatccaggacctgtctcttctaaacgaggttgagctctttta

SEQ ID NO: 80061 - DNA, 1050 bp, Homo sapiens
ggcctcaactgatcctcctgcctgggcctctcaaagtgctgggattataggcatgagccaacgtgcctggcccgttagcccttttgtaacttaagaaatgttttgactattacaaggccatgaatatagtctttcatttttatctttgagttttattattttaccttttacatttaaatctacagtccacctggaattgatttttaggtatgacatgaggtagaggtcaatattgtttttgtttttttttttccccagatggatatcaaattaatccagaacaatttatttaaaagactttccctttccagctactctacagagccaattttgtcataagtcaaagattcatgtgtggatatgtttctggactttcttttttgtcctgttggtctctttgtaagtctttaagtcactctcttcattctcataacttgaaggtcttgctatctgatagtgaaagtcttccactgtgttgcttctccaagagtctcttggcttttcctggtcctttgcatttcatttaattttagaattagcttgccaatttctaccaaaaaaaaaagtgatggaattttgatacatgggatgaataaattaattggaggagaactgctatctttacaagattcagttttacaatccttgaacgtggtatgttcctccatttaaccaaatgttttatagttttccgtgtagcggtctcatacatcttgtgttagatttagtcctagagaactatactaatataaatggtaactttttaaattttcctttttttttttttttttttttgagacagcgtttccttcttgttgcccaggctggagtgcaattgtgtgatcttggctcactgcaacctctgcctcccagattcaagcgattctcctgcctcagtctcccaagtagctgggatttcaggcacccaccaccatgcccagctaatttttgtatttttagtagagacggggtttcaccatgttggccagactggtctccaactcctgacctcaagataatcctcccacctcgacttccccaagtgctggg

SEQ ID NO: 80062 - DNA, 1050 bp, Homo sapiens
gtggctcatgcctgtaatcccagcacttagggaggccaaggcagggggattgcttgaccaggagtttaagaccagcttgagaaacacagggataccctgtctctacaaaaataaaaaaaaaattggctagatgtggtggcacgtgcctgtggtcccagctacttgggaggctgaggtgggaggatctcgggcccaggaggtcgaggctgcagtgagtcgtggtcatgctgccgcactccagcctgcacaacagagtgagaccctatctgaaaataaaaaataaaaaataaaaaaaagccaggcatggtggtgcacacttgtacttgtagctacttgggaagccaaggtgggaggatgggttgagcccaggagtttgaagttgcagtgagctatgatcacaccactgtactccagcctgggtgttagagcgaggccttgtctcaaaaaaaaaaataaataaaatgccattttgtcctgtctgcccaggggtctgtcctccagcctcagcagatgagacttttacgcatcatcttcagcgactgagaaaactcattaaaaagcgctctgaactgtatgaagctgaagagagagccctcagagttatgctagaaggagaacaagaggaagagaggaaaagagaattagaaaagaaacaaagaaaagaaaaagagaaaattttacttcagaaacgtgaaattgagtccaagttgtttggggatccaggtatgttgctctataaccagtggagaaaatgaaaatactagattgacgctcttctcatcacgggtgatctcaagctaagaggtggtaggcaacaaatgacaccttccagatgcaattctgtgtcatagaactcatggatacagatagaacacattttctcattctgtcgtaatcataggctcagtcaccttgccttgagaaatacactgtggatatcaagcatgataacgtggtattgtgcttttctctttcagatgagttcccacttgctcacctcttggagcctttccgacagtattatctccaagccgagcactccctgccagc

SEQ ID NO: 80063 - DNA, 1245 bp, Homo sapiens
taggaatagctagggacacatgccattatgcccagcttccatggtgaggatattggtgacagagtcttatgaggagtggcttgaggaactggggttatttagtctatatgtgaactaagtcaagagtaggacagcaatctttggtatttgaaaggctgtcatgtggaagagatccttgggactttagagcagtggaacacaaacataggttgtcactaagagacctttgtagaggtctcagcctttccagccacattccttatccttcctgggaatctgaatcttcaggtctagggaatctgcatttttaacaagtctcagcttaacaaggtaagttggacacctgatctctgcactacactttgagaaacactgaggaagaaacaaaaccagtgctatgtggaagatacagagaggagaggttctcctttaagatgaaggttgtaccatcagtggagggggataacctcttagctagaggggagttgtgcaaggcctaagaaattgggatggagattcaatagagtctctcttaacctggagactgtctgatcctttaaaatctaaccactgggcagctattctctgctgtaagtttgttcctaatacgaggtctcatgggctttgtttctcttccaggagcaggaactcaaagcagccgctgatggcgtactatctgaagtgaggaaaaaacaagcagataccaaaagaatggtggacattctacgggctttggagaaattgaggaaactgaggaaagaggctgcagcgaggaaaggtaactgtggctttgcatttctttccttgttcccttccccttctttactctagctcctcccaccccaaatattattgagggaaaaatacttgaaacttcatgattttcaccttgtcgggtaactgggcttgtcagcaagtaggtcagaacttctgaagcaggaagcctcagaagatgtttagcctgtggtagcccagattgaaaagagaggcaagtgtgggaacccactgcactgtcttccccttgacttatcattcctaccctgggcatttctggccacactcttctgagtgggcttgtcatggctagtcacctttgccttgtgccagagtgaaagcttttcacccttacttgttgctccagaaagtgttgaaaacttggcatgcttcttcagatacatttcaaacctgaattatttctatttgaagaggtatgaatggttggacagggcagggattgcagactgt

SEQ ID NO: 80064 - DNA, 1967 bp, Homo sapiens
tttgcaactcttggttgtatagtctgtttcccatattactaagcaatcttttttttttttttttttttttgagactcagtcttgctctgtcgcccagactggagtgcagtggtatgatttcggcttactgcaacctccacttcctgggttcaagcgattcccttgcctcagcctcctgagtagctgggactacaggtgtgtgccaccacacccggctaatttttgtatttttagtagagatggggtttcaacatgttggccaggcaggtctcgaactcctgacctcaagtgatcagccctcctcggccttccaaaatgctgggattacagatgtgagccactgtgtccggcctaagccgtcttaatattaaaagtgctcctaatattttctattatcgtggctttcttagctaggagaggttactttgctgttttgattttaaagatcatgtttacctccattttttattttaaaaaaacaaacatggcttttcattgtagggctccaacaaaagaatcctctgaagaggagtatgactctggagttgaagaagaaggatggccccgccaagcagatgctgcaaacagctaaactgtcatattgctgtcttgtatatacagcttttccttcttttgtttaggatcataattgtctctacagtctgatattaaaggcattggatctatcttggatatcatacatggtcagagaagcctttaggagaagaatcagatcatgtatataattgtaacatcacattgattttacggaagatgttatatggactttaatgacacaatgtttagagataaaatgtacattattttggttcagttttttaaaaaaaatatgctttaacaaaattcttaggaattcttttaagcaatgcaggtattgcgataactgtagattttacaataatgttactctacaaatgggaaaataaattctttaaaattgaatattgagataccattctttagtgttaccttttttacccacatgtgtttctgaaaatattggaattttattcatcttaaaaattggaccaggtaggccgggcgtggtggctcacgcctgtaatcccagcactttgggaggccaaggcgggtggatcacgaggtcaggagttcaagaccagcctggccaagatggtgaaaccccatctctactaaaaatatgaaaaattagctgggtgccgtggcaggtgcctgtaatcccagctactcgggaggctgaggcaggagaatcgcttgaactcggagggcagagtttacagtgagctgaggttgtgccactgcactccagcctgggcgacaaagtgagactccgtctcagggcgaaaacaaaaaattggaccaggtagttttcaagtagttaaacatttcattgaaaaataccctgaagaactatattttgataattggtttagctgtattcctagtcttatctgctaatgcatgacactaacttcccaattggttctgtaaaaaaggccattttcttaccaagttgtctgatttatttaccatcttttttttttttttttttttaattgagcggagtctcacgctgtcccaagctgaagtgcagtggtgcgatcttggctcactgcaacctccgcctcccaggttcaagcaattttcctgcctcagccttccaagtagctgggattataggcacgcaccaccacacctggctaatttttgtatttttagtagagacagggtttcaccctgttggccaggctagtctgtaactcctgaccttgtgatctgctggcctcagcctcccaaagtgctgggattgcaggcgtaagccaccacacccggccttatttaccatctttaatccattttagtactatgggtgagtacatggaattgaagtctggcttaaatcttcagaaagttatatatctattttattttatttttttgagacagagtctcgctgtgtcacccag

SEQ ID NO: 80065 - DNA, 1037 bp, Homo sapiens
agaccagcctgggcaacatacaccctcatctctcaaaacaaacaaacaaacaaacaaacaaaaaaaaagaggctgggcatggtggctcatgcccataatcctagcactttgggaggctgaggcaggcggattgcctgagctcaggagttcaagaccagcctggacaacatggcgaaaccccatctctactaaaaatacaaaaaattggccagatttggtggcttacgcctgtaatcacagctataatcccaaatatatatatatatatgtttatatatataatcccatatatatgtttatatatatatatatatttgttttgtttgtttctttttccttgagtgaatggattccaatttgtgatttatagaataaaagcacttgtatgtaatctgttttcaatgtgattcattactttttatttctttaggaaaagctgttactagaaccaatgtttgaagtccctaattctgatatcgtatgtgtggaggttgacaaagaagtagtagaaggaaaaaaggaaccaggatacatccggtaaagtgtattttcaagccagaacagatacaaaatttaagatgagctcctcattgctatgtttattggtttgtcattttaaaattacataaaaattattatatttctaagggaagcaataatctcaagttttctgtagaaaaatctaatttgggtattataaaataatagtattttgtgagtctttgaaagttgatcatcaggccgggtgtggtggctcacacctgtaatcccagcacttcaggaggccgaggtgggcggatcacgaggtcaagagatagagaccatcctggccaacatggtgaaactctgtctctactaaaaatacaaaaattagctgggcgtggtggtgtgcgtctgtagtcccagctactcgggaggctgaggcaggagaatcacttgaacctaggaggcggaggttgcaatgagccaagatcgcaccactgcactccagcctgggcgacaaagtgagactcagtctcaaaaaatatataaaaaaa

SEQ ID NO: 80066 - DNA, 1045 bp, Homo sapiens
ttatttccaaaggacacatacagaaagaaacacctttatttatttagaatctttcagaggcccagacctgctggcctgtttttgaaaggactttgcctccgttggtgtcattttttttctctcagtttatactactgtgaaaatgatagctttttttcaacctcctttatgctcaaggaatttttgtttccaggggatttattgaggcatgtctatatttgatgtagatttccttttattttcaggtatttctggtggtcgcattcatatgtcagttttaggaaggcttgggacatttgaaactcagattctgcaaagagctcctcttagatcctttacagaaacaccagcatactttgcctcaaaagatgggataagtaaagatggttctggagatggaaataaggtaattattttatcttattggcatctgtacacattgtgagttccctcctttaaaaaaatataacagtactgtctcttactggcttatatgttttctgtaggaaatatgagatagctaaaatgatctgaataattttatgtaattagatgtttcattttgaaccttaaaatacttttataagcattgcacatagtaagcagtaattaaaatttcttacaccccaaagtagtaaagaagtgtcattaaatgacagtcagtaggattgaattaggaatagccatcatttcctgctttcatataactcttataacccatggcagtataaacctcactttatcctctacctaaaaatttcagatttgtggtataacttaatgttgggctactctggtagcctaaaaatttcatatttctggtataactttatgttgtagctagtataacttatgttggtagttgtattgagtcagtgacttaacagtttttttcattacgtgaatttgactaacacttgagttaattttatatgttagacaaaatgtgagacacttacatatccatacttaacagtgactctgatgtgagtaaaattattcccattttagagatgagaaaagttagatctaagaatagtcagag

SEQ ID NO: 80067 - DNA, 1045 bp, Homo sapiens
tgcgaaaagataatctttctgggcctggtgtgggggctacctcaactatgtgccttatggtaacttgttctgtacctcctatgcctcatgtccagccaggttgagcctaggggccagttgggggaccacaggacaattttcatatggcctaaatgtatccattgcctttgatgatgttcccagccatactccagtcaacggggactactagtccctcactcttaggttttaggggagtccttccatctgctccttcttaaactgtcctagggagttggcttttcagccagggccaaaggaaaaagccctgctgcatttaaaaacaaagtgtccaagctgtcagtggtgtgtttacaatctctcctggcagaggttggccctttctctaatgccttctggaaggcggaaaatgtgggaactataaatcactaggcggttgccttgttttgacttgagacacccaagaggaacagtcatgtttctcataaaaatcagtgggatcatttttgaattccatcagcctttgtatgtgagtgcaaaacattttaacagttttctcaaatcaacaaacagccttctcctatagctgtacttgcccccctccccaaaaaaccatggatgagaaagaaaggagtcaggggcctgataaaaaatacagacttaatgagcaactcaagatgagaaaactgctctttttccaaaaattaccaactgctgattacagctgaaatggaaccaaatgtttgttttctgatttttttttaatagctgtttaacaaattagtctttgctgagtaaaaggggaaatttctaaacctagtgcactgtttggccagtgtccacagcctcttttctggctgtgttttagagaaagggatttgagctataggctcgcctcctgttctcattctcacaaagctgccttgactgtggcctgcaaccacgagtgccatgctttcaggtcttctgtggcctactggccttcaagacagaggcctgccccagtgtgccacagatccatgtggatggagcctccttcagaggg

SEQ ID NO: 80068 - DNA, 1050 bp, Homo sapiens
caggttcaagtgattcttctgcctcagcctcctaagtagctgggactaaaggtgtgcactgccacacccggctaattttgtatttttagtagagatggggtttcaccatgttggtcaggctggtctcgaactcctgacctcaaatgatccacctgcctcggcctcccaaagttttgggattacaggtgtgagccaccacacccgaccgggaaaaatgttattaaagaaagcagtcttgtgctatacgctctgagtttgcttatgtctctatcctcatgaaacctgttgttctcatgagcagagtccatgggagttaagcctgagagtttagggggctatttttgcagcacatttaccagctccccaaataaaattttgatgctcttcatgttttcaagtttgaaaagatccaaaagctgactggggctcctcacacgcctgttcctgcaccggacttcctgtttgaaattgagtactttgacccagccaacgccaaattttatgagaccaaaggagaacgagacctaatctatgcatttcatggtagccgcctagaaaacttccattccattatccacaatggcctgcactgccatctgaacaaggtggggcctaagggacaccctgctgatgtggggaagcagggatggaggtgggagagtggggagggggagattcagaaccctaggagtttgcaggtggggtcgggtaggtttactaacgccttctcactcaaaatgtggtctgcacaccagcagtggcagcatcacctggagacctaagaaaatgcaaaatcttgggcacactctagaccttctgaatcagaacctgcattttaacaagatctctaggtgattcctgcactggttatagtttgaaaagcgtcgatttaaagatagttcccgaccttggctgcatatttagaatcactcggggagcttttaaaaatcccagatgccaggcctggcgcagtggctcacgcctgtaatcccaggactttgggaggctgagggagttccagaccagcctggccaacgtggtgaaacccca

SEQ ID NO: 80069 - DNA, 1068 bp, Homo sapiens
aaaacccaccaaaaaaaaaacctttcagattttagagcttgtaaagtttagtattatttggaaaggggattgtagacctgtgaatttcctctcaggagatcccttgagacgtgcaacaagtgaacgttgcctgccttcccactagagggcccctgattatcactgtgtccgggatccttgctaatggaagttcttccgtcgcttcagcttgcagatgccagcaagttacctaacctgaaagaacttctccagtcctccggagacaaccacaaacgggcctgggacctggtgagctggattttatcctcaaaggtcctgacaatccacagtgcagggaaggcagaggtgagactttggtccgtagcatcacagattttaggggcctaagggctctaggacagcactgaatccagtggctctgagacttccctgtgtaccagtgacctgggcagcttgagaatgcagagtcctggtcctcacctttagactttctagttctgtgtctggagtcaggcccaggagctttcccactggctgtacaaagctgaattctgtctcatctcagctgtgtgaccttgagtaggtaccaggtgcatttcagtccctccgcttcctcatctataaaatggggatgataatagtatacttccatcaggcactgactatgagaattgaatgaattttcacactttgaaaatgcctaagggcacatactaagggctcagtatgtgttgggattcactttatttaacaagcactgctggtaattctgattagggtgaccctgaccataccttaagaaactctgacctagttcagttatcaggagatggagaggcagaactcaaaggagtggaaaacctcatgctctgggttcaaatcccatttctatcgaaaagggcctccttttttccatttataaattgagatgctgatagttacctcaaagtggggcactgataaaatgtgtgtcacccccccagcacagtttctggcacaagtcagacattccataatttggtttaccttgcctggctggggtctcccagggacaggctggataacaag

SEQ ID NO: 80070 - DNA, 1049 bp, Homo sapiens
ggcaaaaggaccaacacccagagtgccagaggagaggggcaatggggccacaacctagtctgtaccccgggtactgggaccacacaccctgctccctgccaggcattggaccaggcatctgatgggttttggccagcaaaaagaagcatgatttattactatctccctctgtatttctttagaactttaaatttttcatagtgcctttgagtctgttaatcatgtcatacaaccctatgacccaagctccattgttcttctttgatctaaacagatgagaaatgggaatccaggacatgttgaatactttacctaaggtcacaccctgaaggtctgtgaggcttcagtgcttatccagggtgaccatcgaagtagcagcatctgtattggagtcagtcttgcttttgggtctcagttttgcaactactgactgtgagaccctgggcaagtcacttgacatctctgggcttcagttttcttacctgtgaaagaggaaatagtacaaataatatctatctctgagatggtctgatgattaagtaaagtaccgccttggatggcactttgtaatgcataaagttctatatataataggaattcctattaacattacagaaacatggggatggggtgcatagacccaaggaacttggaaccatgtgggtggagttcttcctggatgttcatttcatactaacacccctatttccttccatctccccttccccaatgcaggtcttggccactctgctgaactggcatttgctgtggagccaagtgatgatgttgccgtccccgggcagcctatagtgctggactgcagggtggaggggacccctccagtgcgaatcacctggaggaagaatggggtagagctgccagagagtacccactccaccttgctggccaatgggtccttgatgatccgtcacttcaggctggagccgggaggcagcccttcggatgaaggtgactatgagtgtgtggcccagaaccgctttgggctggtggtcagccggaaggctcgcatccaagctgcaagtaagtgg

SEQ ID NO: 80071 - DNA, 1041 bp, Homo sapiens
cacctcctccccctccttcagccagcctatgataacactaaagattattaatgttggttttgtatctcgttaaagacagaattgtcacttgtagtatttctgtagcattcagcgctgctgtggctaacaccactgtgtatgtttcatcattgctctgaaggtcaaaagcctcattttattttgctggtttgattttttttttttaaagaagaaaaaaaaactgccctgaattaaatggctgttttaacagtaggctcttagcattataccacatagtcatttttcatgttcttgtttaacaggcactgaggttctggtttaaattaaatagctgcaaatgagacaatttataacccattaggttgggtggaaaattgtttctcaaaagcaaataagtaataaatctggtatctgcctataactcacagttgataagaaagtggccatttctcactagcactatatatgatttgggctctgggtaatttggaagtgttaggtttgtgtctttgtagcagtatttttattagaaaagaatctattggccttttacagggtattaatccctttgtcacctaccattgatgccttaagttttctgagtctcaattaaaaatcttccttttcttgatgcatgacaagtgtaatcagtacttgctcatttatttgtctgtatttagtttatgctgtactatttaattatccttccagcgttttttttttctccttacaaatatgatactctttagtgttaagctaaggcattgattcatgtatctgtccttataatgaattaataaactattttccagaaatgtggaattctcttttggaaccattgaccatgactagaatttcctcagcctttgtgccctagggattttatttcttactgtgatgggaaatgatgttgttgttgtttttgagatgggatctctctgtcgcccaggctggagtgcagtggcacaatcacagctcactgcagactcaacttcctgggttcaagcagtcttgtcactgtagcctccctagtagctggga

SEQ ID NO: 80072 - DNA, 1670 bp, Homo sapiens
ttgtccactctgactttagtgcatctaacgggaaccctgacctccatctccaagacctggagcctgaggaccccctgcctccagaggctcctgatctcatctcgggtgttggggatccagggcagggggcagcctggctggacagggagttgggagggtgtgagctggcagcccccgggccagacagacttacctgcttgccagaggcagccagtgcttcctgctcctacccggacctccagccaggcgaggtgctagaggagacccctggagatagctgccagctcaaatccccctgccctctaggagccagcccaggcctgcccagatccccggtctcctcctctgcctagctcttcccagaggatgtggtttggggcaggcaggtatggatcacataggatgcgatacctgtggccgtgtatgtccacatgtgtgcctgtagatacatcatcaagccctttggagcttcctaagttgctttggctgaggggagaggaaaacatggattattcactccccccatactctttgtgatacacatgtgacatgtgaaagacatacgagacatagctacatgtgatgtgcacatgtgtgaagtgcatgtatgcgtactggttgttgagctgggaaaccgtggcccaggcagtggtcactacagcctgattggtcctccaggtcagaacggtgccccacagtggtcagtccccagccctgtgggcccccacctccatcgcccagccttttattacacactctgagagtgtctccaatgcctgtctgacaaagacagtcccagcccattctcctgtctggctgggttgggtgcaagcaggctctgaatgcctggcatttcagctgcatcacctcccagctccttattgcccaaatagagagggtggccctggctcccctccgagcaactctgcatttaattttgtaatctgggaagtgcctggttttgaaaatccgctttctctcactcttcccctccttccttgcccctggctgctctagtgttctgtctcccagtcacctcgctctcccagcaccagtgcccttctcctgctcccagatactctttcctttcctctctcctgttttccttcctctgctatctctcacacctctcccagactatgtcatcttgttctcctgcctgggttcaaactctgcatccttctctaacaacgtgactacctcatgtctgcttcaaggcccccgtgcccttcctgtatccgcggctgccgcgcactcgcctgccatcctcctgcctcctcttcactcagtgcttctgcttgccctgccccaggcagcccacccacgcccagtgcgggtgtggagaagatcttctggcttccctgcatcttgcctttgggattgggatccaagggttctccatggatggatccaagtcatagaggggaatgtttgagacagggaagggggctgtgatccagaggctcagaataaaaagatgccctcccttctatgcaggggggcaagtttactggatggagatgatttgggcctctcttccagaagaagctaaaggaagagaaggggagtgagagttcagggaggcccttcccaccctgtgaggcttgacttgatctggattggggatgacaggaatctcaccctctggggtgctggcaaggaggtctttg

SEQ ID NO: 80073 - DNA, 1038 bp, Homo sapiens
gctgggagccagccgcacctccaccccagcactggtgcacacactggatgatggtagggcctctgaactcgcagtgggcagcttggggtaaagagaattccctggggaggggagctcaccctctctttactaatgtaaaggcatttttacctgctcatatcatcttttgtgccccgtaagagagtgggcggggttcttctcctcagttcacagttggggaaactgaggcccagaaaatgagaatgatttgcccaggtcagtagttcagctgggacttaagcccaggtctgtgatgattccctgtgtcatgcagttctccctgacacctatgtgccatccagctggggtaggggccagtgacattaacccattagacgtggaagattgtgctccaagactttttccagcttcagggtgggaaagatgtcccctcatccttcagcttggggctcccctgagaagctccctttcctccctcagatcctggtcctggcctacttctgacttgctgtgtgacccaggcaagtctctgaccgctcccgagcctcaccttccacgtcggtggagcagagctcatgctgatgttcttctgtctcagtccccagtgcagcaccccagctctccctgtccagccccaacccttcggacatcagggtggcgtggctgcccctgccccccagcctgagcaatgggcaggtggtgaagtacaagatagaatacggtttgggaaaggaaggtgagtgggggtgggtgggctgcaggcatgtatgggaatgatcaacgtgaagagctgtcagggctgctggagacctgagcagggtacgggagtcggaggaaaggaagcagagtaggggttggggaagggtgaacctgaaaaacaggggtctgggcaggaatgaaaagggaagacagaggggcctagcttaaggcagagggaggcctgggctctcaccccaacccctctacagctgcagtgtgtacttctactgagtccctgcctcagtttccttatctgggaaatggggggctgaggtggga

SEQ ID NO: 80074 - DNA, 1062 bp, Homo sapiens
ggcatgagccactgcgcctggcccagagttggcaatattgtagaatgttagggtttgtatgtttaaaagccatgtgaaatgtatatatatctcaagtttgttttttgttgttgttctgttttgttttgttttgagacggagtctcgctcttcacccaggctggagtgcagtgacgcaatcttggctcactgcagcctccacctcctgggttcaagtgatttccagctaatttttgtacttttagtagagatggagtttcaccatgttggctaggctggtcttgaactcctgacctgaagtgatccctctgccttggcctcccaaagtgctgggattacaggcatgaaccactgcgcccagccttcaagttttatgtgtgtagatatatatatatgtatgtgtgtgtgtgtgtgtgtatatttttcttttaaacatgtataatgtttaaatctgtcaactggataaccagttactggctgtttatagatacatgccaaagagtgtaggagatggttatgattagtaaaacacatacaacatacctgatggatcgtaattacttaattgttggactgcaagctatgagggcagggacctgtttgccctgtacaccattgtatcttcagcagtcaagcacaatgctgggcatatagtaggccctcaataaatgtgttgaatgaattaattattaaatgtataaatgcttacaattctgtaaacaaactcttggaaaaatatactagaagaaattacataaggatgataacaattgttgagaataggaattatgagtagtgtttcttttttaatatttcaataacatgatgttactttacagtgaaaagtaattttttaaaattttattttattttatttttttgagacagagtcttgctgtcacccaggctggaatgcagtgtgcgatctcggctcactgcaacctccgcctctcaggttcaagcgattctcgtgcttcagcctcccaagtaactgggattaaaggcgcccaccactattcccagctaatttttgtatttttagtagagacgagatttcaccatg

SEQ ID NO: 80075 - DNA, 1052 bp, Homo sapiens
tgagagtgtatgtgttagagtttgggggtgggagagaagatgcaacttgatgtacaccctacttatacgtaactttggggaactgagatagagccacttgtacatagaaatatcctctctgttttgtatgtccacttgggtagaatttagcaccatttagctttcagcatcctgtacacagttgaggaataattgagatttgttctgtcctctgtgaagagggaatccaactggttagtgccttccttgtgacaagcctctttctctctacaggaagctttaaatgctaccttttagagatgccccatgtcctttctgctgctttgggaaatgatgagaatccgatgttccttttgcacagtaaggcagttactgtgtttgccagtgttattggacatgctgagtaagacatggggattttctcccacagccagttctttgaccttatgttgtattctcatgtaagtttttttgtttttatttttgtttttggctcagtgaagtgagattgcgtgcactggcaggcctagtaatatagacaaggtggtggtggtaggaattaggactttaaagaagtagtatgttcagttcctagaggtagtataatagggaaataagaagacagggcctcaagagcaattccttctgctttactgcactaaaaattaaaaaggagaagtaggccaggtgcagtggctcacgcgtgtaatcccagcactttgggaggccaaggcaggaggatcacttgagcccaggagttcaagaccaacctgggcaacataatgagaccccacctctacaaatgagttaaaaaattagctgggcatggtggcgcatgcctgtggtcccagctacttgggaggcttgaggtgggaggataacttgagcccgggaggttgagctacagtgatccctggtcacactactgcactccaacctggacagcagagtgagaccatgtctccaaaaaaatagataaaaaggaaaagtaaaattaattacttaaggggctaattttttgtctttgggtataggaaggcttgttacaagga

SEQ ID NO: 80076 - DNA, 1005 bp, Homo sapiens
atgcccagctaattttttgtttttggtagagacggggtttcgccatgttggccaggctggtctcgaactcctgacctcaggtgatccacccgcttcagcctcccaaagtgctgggattacaggtgtgaaccaccacgctcagcccaaaagtatgactttttataatggaagttctatgaagatttgctgggaaaggggatggcaagacctctcctgaggttacaaacattgagaaggaatgagccatgcaaaagatgtgagagaaaagcattccagacacagaaaacggtaaatgtcaagttcctggggctagaaccaacttgatagtgttgacaataaggttagagtacagtgcacttggagggaaatggtatgagatgaggtcagaggtagccaaagatctcaagggccatgtagacttattctgaagggtaatggtaggcagtggaggaagccaagcagcagtcatatctgatgtctgatggggaggaaagtttttcttatttgtccttgtaactgtcattcgaatagcacagttcttcagggtagaagtaatcaatttagtaactttttatatggggtgggttgattcacttatatgtaattaatatttaagttagaattttaaagcctatggttgttcagtaattgccctgaacttgagtgtgaagttaagcaagaagcaaataaacagacttgttaatttaaaaagaaatgacttaaaaaattacattttaaaggtaaaataatagtgaaattaagctttctatttcttgcaatgcccagccgctcttgggtttttatatgcttccatatgataaactgaagttgtgtttcttcctcaggtgcagttggtgaataatcggtttaaaggagtcaagtatttccgcttgaataccctagcctctctaggttatgtggttgtagtgatagacaacaggggatcctgtcaccgagggcttaaatttgaaggcgcctttaaatataaaatggtgtgtgagcata

SEQ ID NO: 80077 - DNA, 1053 bp, Homo sapiens
gaacttgaggagaatagtattctgaactagtaagactctttgagcaaggaagctgcaactttggagaataaccagctgatagctttcttaaacttttgaagcacttgtaatagctattttaataaaagaacacttgctctctctggaatgagagaaaaactgaattatttgtttaaaatatttgatttcttaaacataaataatggactgggctgggcgtggtggctcacacgtgtaatcccagcactttgggaggccgaggtaggtggatgacaaggtcaggagatcgagaccatcctggctaacacggtgaaaccctgtctctattaaaaaatacaaaaaattagccgggtgtggtggtacacgcctgtagtcccagctactcaggaggctgaggcaggagaatcgcttgaacccaggaggcggaggttgcagtgagccaagattgtgccactgctctccagcctgggcgacggagtcaaaaaaaaaaaaaaaagaatggactggttttatgtatcatctaattcactttaatctccaatctttttttctagtattttcactaactagctatttctgctaaggggttaagaaattaggccaggcgtagtggctcatgcctgtaatcccagcactttgggaggctgaggtggttggatcatttgagatcaggagttcaagagcagcctggccaacatggtgaaaccccacatctactaaaaatacaaaaactagccagacgtggtggtgggcacctgtactcccagctactcaggaggctgaggcaggagaatcacttgaacctgggagatggaggttgcagtaagccaagatcacaccactgcactccagcctgggcaacagagtgaaactctgtctcaaaaaaaaaaaaaaaaaagaaaaaacaaattagtacagaaccaaaaaatataagtgtgttttaatgtccacaagcagaatcagaacttgtaatatggtgatgatctctgcttagactgtaaattatctgctgtacacaaacacttaggagaggtctgtatagctttggtgaac

SEQ ID NO: 80078 - DNA, 1007 bp, Homo sapiens
ctctcaccttgacctcccaaagtgctgggattataggcatgagccatcatgccagcctaccgggataaaacactttcacaggccaactatggttttggaaatttcaagaaagccactttttataaattctgttcaagcttaaagtgtatttttaattaactatttgtaagtgataatttaatatacactaaagcagttctttcatggtgattacagatataattgataggtgccaaaggagataatagggaaatctttttctgatagcttgctttatttctggttcttctcttttatttatttaaatagtgcttggtccatcctactagatcgctcccagactcgcctacagatagtgttgatctcacctgaattatttatcccagtagaagatgatgttatggaaaggcagagactcattgagtcagtgcctgattctgtgacgccactaattatctatgaagaaacaacagacatctggataaatgtatgcattttttcctgtatttgtttaaatattttctcagaatgctaaagcaaatgaagttatatagcaaactatcaaaatgcatttttttttaagtttaaagggaccatgttatttctttagtatgagcatttccaattggagtgatggttccagaatggaatggtttgtattgatagaaagtagatgccattgaaatgacatctccttggcttcagatttgttcctggagataatagatattaaatatacagcctcatcagtgctcctgagaggacttcatgagtctggtctagaaaagactttctcttttatgttggtaaactgtaccaaaatataccaattctttttttttttttttttttttttttgagacggagtctcgctctgtcgcccaggccagactgtggactgcagtggtgcaatctcggctcactgcaagctccgcttcccgggttcacgccattctcctgcctcagcctcccgagtagctgggactacaggcgcccgccaccgcgcc

SEQ ID NO: 80079 - DNA, 1038 bp, Homo sapiens
gaatgcattttatggtatgcaagaacaaagtcctacaaaaatgtttttccctgttttaaaaatatgtatacatatcatctccagttgttttccctccaaaagaagtggcttaacaataactcaccttgctactgcaaagactagtgatattttcctacaaaaaaggcagcatattttatacataagttattcttcactataagaaatctgatactagaaggaacggttggttatgactactctctggaataattcttctaaattttcaatatttaaatttcttttaagctcccagtggtggtaaaattcttagaattctatatgaagaaaatgatgaatctgaggtggaaattattcatgttacatcccctatgttggaaacaaggagggcagattcattccgttatcctaaaacaggtactgtactccattggcatttatattcactcatttcctctttccaaataagattctttctgtagtcatccaaaggtgtagccaacaacattggtcatttccagccttatttacgacgggttgttcactaagtaccacaaaaatagattttgaattaaagggtgatctttttgattcttttcaaaggtagggatgtctacacaattggtttcctcaaggaatgaattagaaggtatctttgcgccgggcgtggtagctcacgtctgtaatctcagcactttgggaagctgaggtgggtggatcacttgaggtcaggagtttgagaccagcctgaccaacatggtgaaaccccatctttactaaaaatacaaaattagccaggcatggtggtgcatgcctgtaatcccagctacttgggaggctgacgcaggataattgcttgaacccaagaggcagaggttgtagtgagttgagatcatgccattgcactccagcctaggcaacaagagtgaaactctatctcagaaaaaaaaaaagaaggtgtctttgctagcaaatacagatttttaagtgatatttttcataataagtgatttttttccattttgcttcttacagcat

SEQ ID NO: 80080 - DNA, 1042 bp, Homo sapiens
atatacttctctgtgtaagagagttatatgtcccctatactgtgctccttttcttgtaatcttttttccatgatcctgctaattgggaaaataataacatttatttggagcatgtactgtggtccaggctttgttctaagtgctttatgtgaattaattaatttaatcttcatatcaacctcacaaggtagccttttctcatttacaaatgggatactgcagtggaatgagattggatgatttgcccaaagtcagacattatggaccccagatttgaactcagtccgttcagctccagagtttaccactgtattccagccacctttccaaataaactgaatcattttgctttgtacctatgaaaagatagctttctgtgataattttgccttttatatttgtctagagctagccaacatggaagaagatgccagatcagctggagtcgctacctttgttctccaagaagaatttgatagatattctggctattggtggtgtccaaaagctgaaacaagtaagggggttcaaaataatatattatgggtcaattaaagtattgttaagattcaactgtcatttaagtgcacagttctaaatcttggataatagatttgaaagcggataatagattccaaagtgatgatgattgattcatgcccatagttatttaaaatatgtagattaggctgggcacagtggctaacacctgtaatcccagcactttgggaggccgaggcaggcggatcacccgaggtcaggagttcgagaccagcctggctaacatgatgaaaccccgtttctaataaaaatacaaaaaattagccgggcatggtagcacgcgcctgtaatcccagctacgcgggaggctgaagcaggagaatcgcctgaacccaggagacagaggttacagtgagccaagatcacactattgcactccagcttgggcaatgagagcaaaactttgtctcaaaaatatgtacattatggccgggcgtggtggcttacgcctgtaatcccagcactttggaaggctgaggca

SEQ ID NO: 80081 - DNA, 1048 bp, Homo sapiens
cccagcactttgggaggccaaggtgggaagagctcttgagcccaggagttcaagaccagcctgggcaatgtagggagaccctgtctctacaaaaaaataaaaaataataaaaattacccagacatggtgtcatgcacccgtttctcagttactctgggagccgaggtaggaggatcacttgagcatggatagtcaggctctgttgcaccactgcactccagccttggagtgactgtatttgcaccactgcactccagacttggagtgagctataattgcaccactgcactcccgccttggtggcagatgaaagagagagaccctgtctctaaaaaaaaaaaaaaggatatagaaccggtttgaatttcaagtctaccatttattaactgtgtggccttgagcaggttatttaaccatctcttagtttccacatctgtaaaaacagatattaattaatagcacatcaacatagggttgttaggaggctttaatgagttaatatctatgaagtattcaggatagtgcctgaaacatagtaactgttgtgtaagtatgtgcttagatagaaagtaggtagggagttaatgtcatcagcttattccacttactcacaataggtttctaagtgaaagtccacttgagatggatttggtctatcagtatgtacatgtgtttattctttgcctggtgatagaggaatttaaaagtaataaaatcctagcttctgctctcaaatgacttactgagacaatgagatgatactatttattcatttaataaataataatggaagtctataataaacagtaggaagatacaaatgggggttacttatcttcatagtcttggctctgtaattaattccagaattcaaaacactttgaaaactgagcttagttttcattaggttgttactaaaattcatttggcagtaacacctgacctgaagtgacctgaggatattgataaacttaatatgcttatctgtgtagtgtgcctattcataagtttactgcaggaatattggtgtatatgattgcaaggtatt

SEQ ID NO: 80082 - DNA, 1050 bp, Homo sapiens
gttcaggtgattcccctgcctcagcctcccgagtagctgggattaccggctaatttttttgtatttttagtagagacggggtttcaccatgttggccagggtgttctcaatcttctgacctcgtgatacacccacctcggcctcccaaagtgctgggattacaggcacgagccaccgtgctcagcctgtttgtttgttttttgtaacaaagtctcgctctattgcccaggctggagtgcagtgggctatctcagctcactgtaacctctgcctcctgcgttcaagtgattctcatccctcagcctcctgagtagctgggattacaggtgcacaccaccacacctggttaatttttgtatttttagtagggacggggtttcaccatgttgaccaggctggtgttgaactcctgacctcaagtgatccgtccacctctgcctcccaaagtgctgagaacaggcgagagccacagcacctggccagacatagggttttataagagcaccaatgtgagacagtggtcagggaaggctttccagaaaagatgacacctaaactgatcctaagtaatgtctatatattatccagtacactcctgacaaggggactacgtgagaaaggtcttgatgcaaaagacatcatggtgtttgtgaggagttagaagcagtgtgaaggttctgaagcataagttctgagtcaagaagtagcaaaagattggcagataagggccaggacaagggtagaccatatcttctgtaaaagaacatggactttatcatgatatgagggtccatggaaaggtttttaacagttgagtggtgtgatcatcataatcatattgtcgataagttgttctggatactttgtggaggttaaatttgagaagcatgggtagagacaggaacaccaaagcttgactgttgcagttatccaagttatatggcctaaatctagagcataggatagagaaaaggggatggagtaaggaaaatcttaagttaaaagtatagattttggtgtttaatgggtctccctttgaagtcaggaaat

SEQ ID NO: 80083 - DNA, 1058 bp, Homo sapiens
cgcgccgccctgcccagtgcagagccggtggtgcccttcccccctcccccccacttgccggaagaggaagccgaggctctgagattccgagtcaaccaccgttcactgggcgccccttgagctctgggcgctggcctcctggcttccacgtccgttatcttaattgagtctcgctggggttgggaggccgggtattgtcagcgcttacagatgaggaaacggaagcccacagaggcgaagggattttccttaagtccgacttggcagatgggcttcggcctcagattttctggtttttcagctggtggtcttttttctctcctgcctcatgctaggtcgattccctccctgctcactgccctctcccattctgttccacccactcgcagcaggacactttcctttcctgccacacctgtcttctcacacacttttcttctaagacttggcattcctcccatctctcttctcaatattctctgctatgcctctcctcttgttcctcattcatagtttttcaaggtctttgccccctctgtgctattgaatctctcaactaggtgtggaccctaaagaatgagatagctaggcttcagtgaggctttaggtgtttaagtggacggctgtttggcccttgagttaaaaattaaggaatttcacttgagtggatccaaactcaagagtcctaaagctattttctgagtcaacatgctctatttctgagtgaggggcttagtgctatgaggtgtcttgacatcttagtccattgttgctgtgctggcataacctcgctgtttttcctgcacttgccacttagcttttcccaccccatcccttcatcacctacttgggctatgggagcccaaaattaaaacttatagagtaacagatgtaatagcagaccttcctttttttttttttcctaagccagaatttcaacaagtttaatgcttctttttccagaaaagttacctatttaaattattctcagagtaatgcagcaagaaaatggaatgcacttaagatgaatagaaaattgtttatctcgtgaaaagtct

SEQ ID NO: 80084 - DNA, 1045 bp, Homo sapiens
taaaatgaagaaactggggcctaggggaaagaagtgaatgacttgttataatcagagccagaggcaggtcccttgacctgcaatttctttcctggtctacactgtatattggctgagaaaaagggaactcaggaagatatccaggaaagtagcaggtgtacaacaaaactgtgcaaaagcggggcctcccctattttctattattacaaagaacaatgtgtcagagtcgtgtgtcattaggatttattataatagcactaataaaaaatccatttgggtactatgctccactccacagtatataattattcactctgaggttaaatgagccttccctcaggctttttaaagttgagctcccttaaaaaaaaaaaaaaaaaaaaaggcaaagtcattttccttgggtctcttctattaattttctccaaatgacctgagagcagattttaaaggctttaaatgcacacacaaacacacacacacacaaaatacagagaaatatcttgcacttcattaattcaacaagtgtttgctgaatctctgccttgtacctgtcactgttttaagcagcggggccacaatagtgaacaaagtagataaagcccctgttttcatgcagtttatagcctaataagaagagatagagccccctccccgcaaaagcaaacaattaaaaatatataatttcatgcatttaaaaaaagagccatggacagataaaatacttgcttatatcacatagctaattatatatttgactagattggaatctagatttcttttttttaatttttatttatttttttttgagatggagtctcaatgtgtcgcccaggctgaagtgcagtggcaccatctcgactcactgcaagctccgcctcccaggttcacgccatgctcctgcctcagcctcctcagtagctgggactacaggcactcaccaccacgcccggctaattttttgtattttttttagtagaaacggggttttaccacgttagccaggatggtcttgatctcctgacttcgtgatctgcccgcctcg

SEQ ID NO: 80085 - DNA, 1007 bp, Homo sapiens
caggcacacagtaggtactcagtaaacagaatgcgaaggaccgtccagagacaccagtcccaaacccttttccaggctgatcggtcccccataagtctccagccttttttattttaaagcttattttaaagcatgtccctgaagacgagtggggagagcagaccacccgctgattccaattccctaggcggccgcggcgagctgcggcgtctctgtgccccggcctgcccctatcccgcctgcgccccgcccccgcccggctcgcgccaaggcccgctgctggcgccgccgccatcccggcgcgtcactgcgcaggcgcggcccgcgagcgtggggtatctcgaggtgccgggttgcaggcgctcaggagcgctagggtttgaggcctgctttctgctcgcgccagcagagcactacctgaggcagcgaggcgcagcgagcctagcctccccgcgccctgggcagtgtggccatggagaatcaggtgttgacgccgcatgtctactgggctcagcgacaccgcgagctatatctgcgcgtggagctgagtgacgtacaggtaaaggccgggtcgggcggcgggaagcgcgcgggatcgcggctccgggtacccgccaggacccctgccccctttgtccgcgtgcgcgccggagagcctgcagtgcgccaacaaggtcggcgacgcggtgcgcttacggcgtgctggcgcttttcgaggctcatctgcagatctcgggccgggggcacaaccccccgagggctgcaggaaccttcgggtccccagagagctcggcctgggcctctcaggctaccccgggcctcttctttgttcgcagtcggcggccttcatggagcccaggcccggccctggctgcctggccgtcggggttcgagttggctggggcccttcgagatgtgggatgagcttgttgggtcaggggtgcggttgtgacagcggcttgctgggccgtagctgaatgcctgccgctggcctgagaggtccagcc

SEQ ID NO: 80086 - DNA, 1109 bp, Homo sapiens
agttttgaggcacccatatttcaactaccattagtttaaaagcatgatgttaccctcataaaagagtgtttacatgtgttagcaatcctctaacacatgtaaggtagtacagatttacaaaggtgagtcagacccagcttttcaagggcatgctatctagaaggaggcgtatcatatacaaacaaaaagttttgtgtaggagtatgtttattggtagaattggagttggatgttgaaccaggtatctggtgttaaaggaatttgttacctttctttcatttagttagtgatgacttccagaaatgagaattatttttgtcaaactaagactgggagaatgttccagaaagagaaaggcatagacttttagacacttgtaatctctgacttaagccgtgtcaatgcccaaaggccaccaataacacacccgtagttaaacaagttgggtttattactcattgcattgagagagcatactccatggggaaccctggggtgtttcattaggagggtgttagaactgattataggatttgggtgttggtgattaggggaggggagggttaaggaggttgggtttcacttcagataagatcctgtaagaaaatatgggagtttcgtggttgggtatctgaataaatcttacctgtagggcagggagactagtataagaacaaaactgtaattgctacaggagtagcagtcactcaatttggccaaagggtgtttggtatttcgtgagtggcatagccactatgtatttgtctgtgcttataacaaaattgtgaaatggcctttgtctcattttatgaggatttcagagtaaccttgtctgaggttggtattctgtgagattgtttatgtcccataggagaataacatggcctggctgtgagtgctatgcctgcttctggagtgtcacgggttgccttttttttttctttctcaactgattgctctatgcagggcctgttgaaaccagtggttttacatgtgcagatttgttatttaaaaaaaaaaaaaagaaagaaaagcagccgggtgtggtggctcatgcctgtaatcccagcactatgggaggccgagacgggcggatcatgaggtcagga

SEQ ID NO: 80087 - DNA, 1561 bp, Homo sapiens
agacttcagcagtggcatcgtctgtgcttgaggtgaacggtagcaaagaggccagctaaagcagggttactttcaagattgaatttactttcacgatgaacataatgaacgtgtttgtcccgagaaacatagttgttaaagcattggtttatttacaaggtgcttgtttgttttgggtgttgtgagcagagaacagagcgtagctgtgtttgagagctgtttgaaagatattgttcctgtccttacctaacagagtctggtggaaagagtgctaactgaacacatgagattgggtccttgttcttattacacttatgctctagtgaccatgattcacttaacctttatgaacctgacgctcttcatccagacagatatgaacagtagtgcctaactcataggaccattttgagatttgaattggaaaatggatttgaaagtgctttgcaaattctagtgtgcagttcaagtgagtgattatgatgattgcgatattaaaccttagatgagagggatggtcacagagcaatggaagaatagagcctattagcagacctattcatatatgaaaagttaaggtatgacaagaggcgctcttacaaattaatgaggagagaatgacccattcaggaaattgtactgggacaattggtaatccaaatggcaaaaagaaaataagatcctgccttatgccatacacaaaaatcagtttcaggtgcattaatgacctaaacgcataaagaaaaactactaaaaagaaatataggagactatctttataatattggaaagggggagaatgtgttaagcaagatgcacaaaacacaaaccctaaagacaaagattggcacatttaagacaaacttgaagaagacatttgcagtgcatatcattgagagatgactaatatcacgactatttaaagaacacctacagaccaataggcaaaagacgtattacctaatagaaaaaggggcagataatataaacatttcagagtaaaaggaaacaagaatgaccaataagtctgaaaagatgcttgactgcaattatgaccaggcacatgtacaggcataccttgttttattgtgctttgctttattgtgctttgcagataatgcggttttgacaaattgaaggttgtggcaacaaagtctgttggcgtcatttttccaacagcatgtgttcatttagtgtctctgtgttgtattttgttaattcttggaatagttcagattttttcattattattatatctgttctggtgatctgtgatcagtgatctttgatgttaactttttttttttttttgaggcagggtctcactctgttgcccaggttggagtgcagcagtgtgatcatagctcaccgtagccttgaactcctgggtttgagcagtcctcctggctcagcctaccaagtaggactacaggtacctgcctagctaattttcaattttttaatttttttagaggtggggtctcattatgttggccaggctggtcttgaactcctggacttaagcaatcctcttgccttggcctcccagatccctgaggtt

SEQ ID NO: 80088 - DNA, 1320 bp, Homo sapiens
gagaatcgcctgaacctgggaggcagaggttacagtgagccgagactgagccattgcactccagcctgggtgaatttttcaaaaaaaagaaagaaaatattaaacaagttcatatcagataaaatggataaattccaagaaataaagacagtttctataaaagagatagaaaacctggatagcccaataaccattaaatacatggattcagtagtcaaaaatcttcccacagggaaacttgcaggtctaaatggcttcacctggaagttctaccaagcatttaaataaataattgcagttaataattatttgttaatctgttgctacataacaaatcacccaatatgtagtggcttaaagcaacaatagtcgtttattgtctctcacagtttctgtgggttaggacttcaggaggggctctgttgggttgttctggcttggaatctcatgaggttgtggtcagatgacagctgtagttggggaacacagaaagctaagcccacagaagaaaaacaaacaccgtgacactgggaaggagctgcctcttgcttgttaaccttgagctggaagtaggagttgggttgtttctcatccactggaaaaagtgttaagtagtttcactttacattatgatgctaaattgaaggtatgtagcaacttctgggaatcaatgagcagtctggagaattttgacctctcccgagtcttgtttcctttgggggttaagagagtctggagcctctaagttagagacacaggcacagcgtgtttcattttcattcaccacctgcaatcctctgcccttccctctacctgttggaattaatttatcattcaggttgcagtacaggtctcacctttggtgaagcttttccccaccactctattcctgttgtgctctctctctctcctaactctgctaacacttactgccttttaccacccttttcgtcttgaccatatgtttcttaataactatttgatatcttctcacagaaagtgcctcatctgtcccactggatcctctgttctacagctcaggggttgagtcctggagatctctgtattcccgtgtcatatctcacatagcaccttgcatgactggccattttcagaatggactaattcagtacttgattgtttgcacagttagagcaggttagggtccttcttgcaggagtctgcagtcttagataggtacagacagacatagagaaagcctacagagatgtgaataaatgactaaatatatttctgggggaggcacagagtaggagtttgagtccttatgggagagggatgaggggaagaagccccttg

SEQ ID NO: 80089 - DNA, 1052 bp, Homo sapiens
ctggtctagatgttccctttgcatcaggacttgcaggaccagagaaagaaggagaataaatatatcctgcagcttctatgtacggcgcccctggcatggtgctgcttcagggaacagaagagggcattctcacattttcactttctctcctagcctgtttacaaactgacccagaggcaggtaaacattacagtacagaagaaagtgagtcagtggtgggagagactcacaaagcaggaaaagcgaccactgtttttggctcctgactttgatcgttggctggatgaatctgatgcggaaatggagctcagagctaaggttagtaaggatcctaggatctagccattgaggacaaatcatggggaacccacgttattcaggccacttcagatacctctcggtctgaaagaatagctacaaagttacaaattcatttaaagacctggtgatgtgattttcaagaagtattggctatgtattttatagactttccttcggttgaaatctgtctgatgtttctcttacaactagactaaggtgatagatgttgaggagaagaccactgaagtaaagtgcaattcttatcacatcatatcaagagtacatacggccgggcacggtggctcacgcctgtaatcccagcactttgggaggccaaggtgcgtggatcacgaggtcaggagatagagaccatcctggctagcacagtgaaaccctgtctctactaaaaatacaaaaaattagccgggcgtggtggtgcatgcctgtagtcggagctgctcaggaggctgaggcaggagaatggcgtgaactcgggaggcggggcttgccgtgagccgagatcacgccactgcactccagcctgggcaacagagcgagagtctcaaaaaaaaaaaaaaaaagtacatactgtcaacgtgacacatcactgttgatattaaccatgggttagctggcttgaggtgacgcttatcaggtttctctaccataaggttattttcctcttggctctccttggaaggaagtcactatgtgtagcctacatttaagga

SEQ ID NO: 80090 - DNA, 1040 bp, Homo sapiens
caatcatttatatcatgtgagtacatgggtatttattttatactttgagttataatctaatattatttattttgttgctcaaattcttccagctttggcactaactggcctttggttatgtcctcatcctgcccatctttcatttggcttttgtatctttttgagaaagcgccatcattatgggactgtttttttttttttttttgagcacttccttactttctggcagtataagctgctccaggcttatcttgcatgtatgtttcctgctccagccctggaacagccatttcttcaagcatctctgttcttattgtggaatagcattggaaaccaagatctgggtgccgggtatgctcattgctaccaggttgccattgcctttaagttctcttcactgacagaacaagaaaatatatgtttggatagtaacccatgcatacacatacacctgtaaatatttctgtatggatccatctgtatctctgttaagctaaacgtgagttcatagtgatgttggaaacatgatcttagcttctggaaaaattatactaaaattctagaagtcttgaaaaataaaatagcagtctacctcctgccttaaacttctgttttatttctctgactgcgacagatcttctggatgtcctttccagctttaagattccaaggtcacttgtcagtttggaagccagctcactgggttaattttgtgaacaatggatgggcacctgtgatgctaatgctgcttagtaagcaggagtcaggcgtttggccctatgacctagaatattctcccaatgatgcactgaccccaactggaggagttggctttgagggagtcagattactcagccagcatatggacttttgcaagcatctgggaattctaacttgtgttcttggaaaacttttgtctaaattctaggaagaagagcgcctaaataaactccgactggaaagcgaaggctctcctgaaagtaagttgtgctgctgccatggtagttaccagttaacttgtgctagtgttggaagtatgg

SEQ ID NO: 80091 - DNA, 2466 bp, Homo sapiens
gtatcccagtagttcttctcacagtaccttgcacattgtaggtattcagttaatgcttggttgagtgaatatataaccaaatatcagggttgtttttttcatttactgtatctgtctctttgagctagtttgacctcagtgaccttaaagaaattccagaaaagaagaaactatggattatattaagatgactggagggccaggcacggtggctcatgcctgtaatcccagcactttgggaggccaaggtgggcagatcacctgaggttaggagtttaagaccaccctggccaacatgatgaaaccctgtctctgctaaaatacaaaaattagccgggcgtggtggcggaagcctgtaatctcagctactcgggaggctgaggcaggagaattgcttgaacctgggaggtggagcgtgcagtgagccgagattgtgccactgcactccagcctgggtgacagagcaagactctgtctcaaaaaaaaaagaaaaaaaaaattgagccggagctgaggaaatctttatttcctttttgtaatgcctcttcagatggccactcatttttttgccaggtgttatggaaaaaatacaacactacaacactcaactgctttttcctattttcttactcaacaacaatcaacacagaagacttctgtgaccaagtgggtgggttttttcccccacataccaagcaagcaatgagttctgcagcagacaccagctgggtgccctctggttcaattctgacactgtttacctagagatagcatcaggttcccacagatggagggctcagtccccaagacacacccctgcccccagcctgtcccgagtctgaacctccagaacttgtgaccaataggctgtaaattacggttcccacaacccgctcctgtggtttgattgatttgctagcgtggctccacagaactcagggaaacacatttgttcatttattataagggatattatgaaggatacagatgaagagattaggaggaagtatggaggaagtggcgcggagcttccatgccctccccaggtgtgccaccctccaggaacctccgtgtgttcagctgtctggaagctgactaaaccctgtccccttgggccttttatggagacttcatcggataggcatgactgaagcgtgttgaactgtgttgaaatgtgattggacaaaaagggtctgacctaaacccagcaaggcctgtctgtccagattcttctcagcctctctgtgcagtgttccctcctccagagtatgaggcaagaccctctctggaatgagggtcttaggacccacaatcagattagagtcgtgccttgggcagctgaaaggaaggcagggaaggtcatagagggagattctgttgtctgaggcctaaagtgtcccaacattataacaaaaaactgtaacaagggctgtgggagttataagccagaaaccgttgccgaaaacctatatatacatatacacatatcataatatcacaccaggggtaatatttttttcttgggtttgttatgtctgtatacctattcttcaaggctgggaaaggaagtcctgctgaaaatacatgctggagagcaatgttccttgtatgtttctctgtgggagtaggagcccaggctggtgaggacctggaccaggtatttgtgtgggagcttaggagcattcaggaaggaaaaagggttgaagtcatccagatatgcctcatacacctgtctcctgctgggactattgcttttaatagcttactgctttgctttgctttacagctcttacaaacttaaggaaaggatacctgtttatgtataatcttgtgcaattcttgggattctcctggatctttgtcaacctgactgtgcgattctgtatcttgggaaaaggcaagtaagacatttttggattaattttccctttctcagtagtttggcccagtattcaccaaagggagcactctctgcctttgatgttaataataacccctgcatttgtgcagcaccctctacttttcgttgtgctttcatagctcttatttcccatggccttgtgaaataagctgactggtattctttccatataacaggtaataaaatataggcctagagatggtcaaaaatggttcacatccatagctagccagagccacatcttgggctagaatccttttgtaaaaatgttcactaacaactaaataaattgatgtgatacttccagtgccaaagttatgcaaggccaaaagggttctcacccttttggagcctaaatacgttctaaaatgaactattctaaaacagaataaaaagagcatcataaagatattagttcttcttaaattaatttatgtgtttagcaggattctggctttgaccagtggcattccattggtaaatgccaatgggaaatttttgagaatttgatctaaagtattctgaaactttatttgatgaataaa

SEQ ID NO: 80092 - DNA, 1052 bp, Homo sapiens
ttggctgctcagaggcctttattcccttcttccttccttgctgctggttgtcttatcacctctataaactctggatgaggaatatgctactgaaattagtaaaagtgggagcttcttagtctattttaaaaggctccttacttttttttttttaatttttatttatttatttattttttttttttttttgagacaaagtcccgctctgtcgcccagggtggagtgcaatgctgcaatctcaggtcactgcaacctctgcctcccgggttcaagcgattctcctgcctcagcctcctgagtagctgagattacaggcacccgccaccacacccaactaatttttgtatttttagtagagacagggtttcaccacgttgatcaggctggtctcgaactcctgaccttgtgatgtgcccacctcagcctcccaaagtgctgggattacaagcgtgagccaccatgcctgtccccttacattgttttaaacaagaaatatcttatggtatattcccaatcaccaagagcacttaaagaacataatttaactgctggagatttagaaaagaaatatttccttaccatagcatattcccctagtgggtctgtttttgcaaagtaatcattctctaattctgtcccaaaagaattctcatatggacttttacatttctgaatgatttaattctactgtctaagaagtgacaagaaaaagtctgtattaaagaatcaatacttacctaaaaatatcattataagataaatctgaagaaaaaaggaaaatctaactttgattttcactggatatggcaatgtgaaactgaatcgtccggtctcattgaatattggaatggactgaatcactgagacagctgaaaacagaaacaagaacttgttagaagcaaatgaaacagtcacatttaatgacaggaacttccagtcctagtactctaaagtttcagttctgggtgtgctggaaaggctttctcctccctttgtacagaaagctcatgcctctcctttttttcccctacttttctaagagatcagcctcc

SEQ ID NO: 80093 - DNA, 1247 bp, Homo sapiens
ggaggccaagctgggcagatcatttgaggtcaggagtttgagactagcctgaccaacatggtgaaaccccacctctactaaaaatacaaaaaattagccaggcatggtggtggacgcctgtaatcccagctactcaggaggctgaggcaggaggattgcttgaacccaggaggcggaggttgcagtgagctgagattgtgccactgcactccagcctgggtgacagaatgagaccctgtcgcaataaataaataaataaacccactggggaaaaattgctttgtgtctattgtattgttaatttgttctaaattgtactccttcctgagccgctgcaataagctttttgctgtggaatatgacgacagctagatactgtccctgccacaagagcttctggttataaatagacaaagactctaatttctaattgacctcttttctttttcaggtttatacataaattttcgtcacctttataaacagcgcagacggcgctatggacaaaaaaagaaaaagatccactaaaaagaaagatttagatggcttcttgccagtttgagcctaatctgattcttacagttttaccttcttgaaccaatgtaaaagtttttttaatgttaaatgattaaattctcagtgaggctatcttccttttccccagtaacattcctgaatttactgttatcttattgtagtacttgcatgacatggattcctgatatctgatgagaggttcattcttgtgtattcagttaatgacaccaaaaggctcagcccaccccaaccctatctcatgttcagtctgtctaatacatgccagagatttttttttcaaaaagtgctttatccctacaatgtactgacagttcttacagttgagatttgttcttttcagctattgcttgtgaaaaaaagcaagactatgtcactctatagaaggctgttaaagtgactcaggcaggaattaattattctgtacctaaggggttacttgtttaatgggatggcattgactttttgaaaatcaagtggactgagtcattgataaaacatttctaagagtggggctagagaacatactttacatctgacatcctttggcctaacaacatctattattatagtgctcagcagtgtgggcattgaagaggcgcagaatgctttgaaagaaactaatcagaatcttggaacatcatgatcatgccattcttaagtaaatcaactattttcaacactgaagaaaa

SEQ ID NO: 80094 - DNA, 1046 bp, Homo sapiens
ggtaaaaacctttccagtatgttcacctctagaatagccacccaaagaccttcctgaggctgcctcagaagcaccacttgctgttttgaatgactctactagtatgagaaggatgtgaaggtggttggctggttgggctttaacttcctgggattcataatttttaagcttggaagatagctgctgttcccatgatgggcacatttcctgagaagcttgaatgactgatgagcatagagcacccctgccttcctcaggaaacctgaccggcaggggctctctggcttcctgaaagcttcacctcttccctcgtttatatctcaactgtaagggcattttcaagcttctgttcatggaatgagcaactcagactgtctggagcttgctgagtacaaacacaccaccactaagtttcagaactttccttagaacttgggcaaaatgtggtggtaactcttaagtgcttttggtatctcttgagattctaacttttaaagagcaaccattaatgtgtaaaatgattcctattattcaaggtttttttttaatgaaaataaaatatttgattttctagaaaatggtttcactatgaaactaaaggtcgtttgcttttggtctgtcttatcactttaatataatttcaactttctaagtggcatagattcataaatcatgaggtttccttatttctgacactgattaggcctcattgcctaagcaaggttctggctaggtaatcctgacagatcaccgatccgattccaaagttaattatggttccaatttatcagctagctttatgactttgggcaacttctcaaggctttgtctgcatcatcagtgtttttcatttgcaccaccttccatgtaactctcaggcttcaaccagagcaactgtttttggtttaacatgctgaactgctacataatattttgcctgaacaaaggtctttatcactaacagagaaccattagactaaattatctttaagcacagtcattagaattttgattgtaaatgttttaatagaaatacacaatctttc

SEQ ID NO: 80095 - DNA, 1030 bp, Homo sapiens
gtagttagtagctaccacattagacagcacagatatagaacatttccatcatacagaaagttcagttggagagcactgggttagactatatagaattgcagtatatatatgtgtgtctatgtgtatgtatatatatatatattttttaaatatgtatttgttttatcctttgaccttaatttataaatcagataagtgaagcttgtttctttaaaaacattaagctgtttttcacttaaatgggcctcctacatcagtggctttctattgagaacaggttctccaacctgactgaagttaatggattttcttaattaacaaagtgataggatatcaaagattgagtgattcaaagagcttctagtctaaatggaaatgtaactgattgtgttttaccagatgtcatttcaagaatgtcttttcttttaagatgctaaagaaaacccttatggcgaggatgacaataagagtccattccccctgcagcccaaaaacaaacgcagttatgcccagaatgtgactgtctggatcaaacccagcggcctgcaggtaacattaccatttatgttgctttccactggggacaggagacatttgggtaggcaggcaggcattttatttgattttcttttcctttgatacttagtaattcatttacttctaatgtttgtcattatttccaaaagggatttgagatgccctacagtaaaacatgtatatagcaaaatcattttttacaaaatttagagcaataagaatcctagaggaaggaggaagaaggaagacaattgtgccaggaacccaaggcaaaataataactttatgtgagtgttttggctctgagcttcctgttaccaaggtcagttgttcttgtctaaagaaaggaaatttgtcagtttgtctagagagacatattttcctggcattgaattttagtgtgaaattttttatatggtgaggcattgactaacataatgggtattggctttaacaacagttttggaaaagatgtaaaagtcttcataactat

SEQ ID NO: 80096 - DNA, 1077 bp, Homo sapiens
ttttttcttggtgtactatagttcaagtaatttcctgtcattcctagataatgtaatctttcctccttcttgaaactttttttctgtagctttcctgacattgcttctggtaccgatttgactttttctttggcggacttttctttctctcttcgttttgtcttttcttctccttgcctcatggtttccaacatgttctttgccttcttctctttggttattcttctcccttggttattttatcagctgtaataacttcacatttcccaaatctataactctagtcttacctgatctctccctggaatttgcatatcatatttccagttcctagttggatctctacacctggatattctgtcacagtctcaagctcagctgtttgttacagacctattgtcccgcacccctttctcctcaaactattcctccttctgattttcctcctccttttgattaagtcatttgtgccactagctactcaggttccaactgtagtcatctttgactcatttgggcccatttcaatttcaggaacatctaccaagcaacctattctgtgccaggcctaagggataaagagttagctggagttgttcaaagtctagtggaaagtggaatgatcacagactggcacaaatcagagttagcctggaggagatgatgatgagctctgcctagaggactcaggagaatcttcacagaggagaaataccctagttgagttttgaagaaaaggaggaacttgctgagctaatgaagggaagaaagggcatcctgggcaaacagaacacctacagaaagaaaaggaagtgtggcacaaaatgtgagagtgggtgtgggaggggcagatggtagattggagattggtagtagctagagtggagcaggccttgtctgaaatgtgaagaaccaggaatttatcttgcagatactgggaaaccactgaagaggagtaatgtgatcagatccttctggctacagtgagaacagggggataccagttaggaaactatattttaggggctggtgccccctgcagttgtacagtatggccataatccaagtgagagataa

SEQ ID NO: 80097 - DNA, 1026 bp, Homo sapiens
tcactgatcattttctggccactacctggggttggctggtatagatcaagagttaggattaattaaaggaagcatggctccatttctgctacagttaaaattagctggtccaaaaagaggaatgcagatcttactagatattagtctgctatatttcttggcacccaagctacttgtactggtctgaatatgagaatcatctgggaccctttgagaaactggggacagagtctcttttacataacaggatgatggccttgagccctgtggtagaagggcttctcttggtgctgctgtgagtgactcagtgaggcaggtgacaggacctataggtcacagcctttacccctcctcatcacctctccagctacttgctgccctttgtgatttgttttttctctttcaagattgcttttgatttccatatccacataattttacctgaataataataaatgtctcagaagaatggaaatattaggggacagcagtatgcattttcaggtttagggtttggctttggtaaaagtagtgtgcctgatttcaaagctgaagcctgtgtctctcaagagaaaaatacaggctagacttatttaacttgacagtctcaggcttgatgttcttctgatcttccgtcttctctccatctagtcctgaatggcatggaatgctctactcccaagctgacagcaagaagaaatcaaacctcatgatgtctctctttgagcctggcccagaacctctcccatggctagggaaaatggcacagttgggtcctatttcaggtataatccagatcagattttacttatcctgactttgttttcattctgctgttctcaatgtctctgactgtgcagtcagagaactgattgatctcccttactggtatgccatggtctcggatgatgctggatgtgtacggtgaaaacttgaagagagtttgatgtttgaactcctaaattttacagctcaggagaaatcaacatttagattgctttaagtaaatgcaaattcttcagcggc

SEQ ID NO: 80098 - DNA, 1040 bp, Homo sapiens
cattttgacacatatttactgtgtgttggtttgtgaattgacagtggaggtcctctttagagatgagaatgcttagtccctcatccagggctctgcctttcctagtactaacatgctgagaaagcttaagtagttatcagatggttacttgataaatgtgcaagtcaaatacagctttatacacggaagaatcacatctgttctttgttctactggtgcccagcacatagtagataactcagtaaatattgttgaatgaatgggtgaatccaggcccttgtgggtcctccttactgcagcatatatctctaggaactataaagtcatctcctcaaattcagcatctctctggagaatgctagactctaactctttaaaattatctttttcaggggtggcactgtgctgtggtgggtatagagcaggagcttttgtccctgactggctacaggttcaaatcctagttctacccttaaaattatcttttcctctgttttaagctgaccatccactttatatttatcagctttctctaagaactgtatgtagtcagtcaggttttcacatactgagtaatgaccacatcccatttatgcccaggttatctcagttggagtattggatattctataaccaatcacatgttcacagacagaatcttgaatatatacccacagacagctttataatcactgtgttggtaattattattctcagagaacagccagatttcccttagttctaaggccctggggaattctgcatgccagtatacttaccaagaaagaaattaagcaaaataaaccatttatataggggaatagtgaaaagaaaaatacgggaaggtggccgggcgcggtagctcacacctgtaatcccagcactttgggaggccaaggcgggtggatcacaaggtcaggagattgagaccatcctgactaacatggtaaaaccccatctccactaaaaatacaaaaaaaaaaaaaaaaaaacctgggcgtagtggcaggcgcctgtagtcccagctactcgggaggctg

SEQ ID NO: 80099 - DNA, 1028 bp, Homo sapiens
tggacatcaaggctgtaatggtgactgaaacactgataatatccagccctaaaagatttaacatgcacctaagattcaaggagtccacccaccaataggaagcaagtctcctctccactgctccttgctatttttgactcttcactttgccagtctcagttaagcatagtattggcaacacgaaccaggtaaaagctgtggtacatcactttctttcagtcataatataagcagcagtgctagaagagtacactatatcagatccaagaactccaagaccatctggttgattctccctgcctagccaataagaactagaggaagacttcccagggtcacatatcaagagtcatactgcaaagtatagaagctagcccttcttatatgaccttaattatgatactaattaagttcagtatgtctattaagaatcatctcaaagatttcaatgctagtgaatacggctatgatttccaactctaataattcgtggttataattatctaggattggagatcaactgatgaccttaccataaaagaccaatattctgccaccccttaggtaatgaatcttccaatccaaagtgctgatgacaacagcaccctagtacaggttgagtatcccctatctgaaaatctgaaatccgaaatgctcaacaatccacaactattacacatgcacgaagctgacacgaagctcaaaggaaatgctcactggagcactttggattttcagattaaggatgctcaatcactaagtaaaatgcaaatatcccaaaccccaaaaaatctgaaatctaaagcacctctgttcccaagcattttgggtaaggaatactcaacctgtaccacaatatatatttcttttcaaccttcctagacagagaagagagtaaaagtcacaagtcagaagaaagtaaggataacagagaaactaagaaataagtttttttaaaaagttacctgtgttaatgactttagggataggatcaatttcttcatctacaacaaaaggttctggcctgg

SEQ ID NO: 80100 - DNA, 1098 bp, Homo sapiens
tactcctgaatgaaatagctctacctgtgttattttacgtaacattcctctttggtaaccttgagtcaaaattgttgttgttattttcttctcacattggctattaaaaaaatcatctgttatttattgcctatgttatcgtaatggctttgaccttggtgagctgagaataatctggcattttgtgccagccactttaagggtcatctgttttgctttatagctccagagcaccgattccttggaatgccttgaacgtctcatagatttaaacaatggtgaagggcagatttttactattgatggccccctgtgcttgaagaatgtacagtctatgtttgggtgagtatatgcttagagctcttttgccttctttacaatccagtattataatttgacatccaggaagactatctgttttactgttcctaattgtgtcatttcattttccccaagttgtacatttttcagataaagtgatgggtagtaatggttttttaaagtaaatctatactgtctgtagatactgacttccttataatgactcagcaaaatttcaaattaacttgctcttgggcttttcagaattgaaatttcctcaccaaaaatgtcagattttgttctgttttacagatggtcagatcttagttttggaaccaacttgaaaggaaaacaacccttgcgtcctgaaaaattaacttcatatgtatcgtattactcttcctataactattaattatcatattctagaaaactgatagatttggcatatacgcctttccatgctgttctcaagtgtggccacctaactgctgatgtacaagtcttccccaggccagaaccttttgttgtagatgaagaaattgatcctatccctaaagtcattaacacaggtaactttttaaaaaaacttatttcttagtttctctgttatccttactttcttctgacttgtgacttttactctcttctctgtctaggaaggttgaaaagaaatatatattgtggtacaggttgagtattccttacccaaaatgcttgggaacagaggtgctttagatttcagattttttggggtttgggatatttgcattttac

SEQ ID NO: 80101 - DNA, 1069 bp, Homo sapiens
ctgtttgcattctgattgggaacactgggatcattttcatcatgccgacagtggtggtaatggatgtatccctttccatgacccgacctgtgtctattgaggggtccgaggaataccagcgtaagcacctagcagcccatggtttaacgatgctgtttgagcacatggccacaaattacaagcttgaatttacagcacttgtggttttttcatcactttgggagttgatggtccccttcacgagagattataataccctacaggtacaaaatgtagtaagttattgtatgtacagggcctaaatttattgggaggaaaacagtgttataatgcgttgaatatttagaactttggcattatttaataagtctatgagtacttaatatgtgtaactaaacagcaagaattcacaaccagtaggtcttatgcctactgtttcttcggtacagctatgagttacagctgtgagttgttcccttattttcctctcttggttttctggaattctctgtggaaaagtgagcatctcaggatgtagtgttccattccctaaaatttaggatctttaggctcaacacttaatttttttctactctcccataaaacttgaggaaatgaaaaaatagccctttcttattctagagtaattcaaaatgatatttcctttccaacaaatagctttgattttgataccaataaattataatttttaaatctcagttggtagatattatctttcaaaggtgttttctgtgttatgttagaatttactttctgacaacatctctaaatcataatattcataatatttccagcagtgcctaacacagtgtcttacccatagtgagcagtcaagaagtgtttgtgggccaggtgtggtggctcacgcctgtaatcccagcactttgggaagccaaggcgagaggatcacttgagcccaggagtttgagaccagcctggacaacatggcaagatcccgtctctatttttaataaaaagaaggaaaaaaaaaaagaagaagcatttgtggaattaaactgaacagttttaacaattgttaggtggttta

SEQ ID NO: 80102 - DNA, 1001 bp, Homo sapiens
atgagtcaggggtagaaactccacccctccaggggtgaggttcttaatccacaatgagctgcaggtgtttccaaggacaaactttagtctcagatcacattcatatcagaggtcctaggtcacccagttcactttccaggatcatatacattctttcattagggtcacaagagatacagtaacttctgcatggtcttctgatccatgcccattgtgagcaagagtgactgattcagacagatacaggacaggatatgattcgatcttctaacatcacactgattatcaggaatacaaagtaaaggaggaacattgtgaagcccaggatcttgttcattctccatttacatgacgcaattgaagagatcacaaacagaagcatgagaaaaagcaaaacaattgcacaaaacaagccattgctgctgactggaactggctgtaatccattgataagagagaaaagcaaccaaggaacaggcaagctgcaagattgaagaaacgatgtgaatatccttaatgtttataataatcccatacacttaaatagtagtttatactttacaaagtatttttccaccaataaaatatctatgaagtgaacagaaattattagccccatttcacagacaaggaaattaagtttcagggaaattaaattacttgcccaaggactcattaataactagaagagcttaggttaaaactgaagtattctgagtctgagctttgtttttattttctgcatacttcatgacttctatatgactcagatcagttgatgtgtgcctttttttttttttttaaatgctggaattacaggcacacttcaccacacccagccccaatgtgatatgtactcttaaatctctacattttgataaggcctacatttcttttaattctttagtgatgagggctgcctttttagctgcccctcaccccaaatacacatacacaaattcaaatttaaggaaacaaatctaccacccaaattcagaaca

SEQ ID NO: 80103 - DNA, 1008 bp, Homo sapiens
gagggattagacattctaatggaatgtcctggctccaccctccagcatgttctcacccaacaatgacagttgagtggagtgggaagggaagtcattctaaagagtccaaagtcagtagcgccacatctggtttataaagtaagagatccagtgggacaatgctatttttgtatgccaacctagataggattataaagcaagactgatttcttctgtggtttatgaatggatcttaaggtaattacaaaagggaaattccaagaatgcataacacaatgacaacatggtgagaaaagtgcagtactacttccaaggtagctagtgtaaaggacacttgagtttttaaaactgtggttaaatgttttatgtggaatttgatgagtttgtatattaaataccactgcttgctgcttttactagaatcaagttaagggacacgttagaaatagaacagcttaatatcactggcttcagagcaaaatgagctcgggtgactgcagattatgatggtaaatatggctttaattacaaacatgaggaatgattcactgaagatgaaaagataggacggatgtgatatgaaaaaaacccaaacattttggcattgaatgatggctaaggtgttccaagtattccatcttttaagatgaattgcttaattaattgcctcgctaccccaggattctcattctttggaaataatttttattaaatttcaataaactgtgaatcccaatggtattttactttacaacatggatgggctcatccttatctttaggtcatttggtcagaatcctcccgagaagactgatgaagagtatggaatcatgttccaattctatattcttaattatccttattcctgatgctactgcattgctgggtttccatagccaaggcctaagaacaggaggagaaggcaatgcttgtgggagggaggtcccaataccaaaattctgggcactaacctggtgtctgcagcccgttcccgttagcctcggggat

SEQ ID NO: 80104 - DNA, 1033 bp, Homo sapiens
agtgttgtcctaggattgcatgttagtacccctaagcctgagtgtggggagtgagttatgcaagggtagcgtgcactgcccagactgactcatggagccttgtgcaaggagagccagagaggttcactataccatgactccaaaattgtctctattgctaatagatacgtatagtatacagggaaaacagcttataaatccaaatatcaatttaaattttaatattctacatgaaaacttacattgggaaatatgcagacaagtgattatattccaaattttacccttattttaatatctaaaatattgggtatgatgcaaattatactatagaatatttatctgaaatatgacttactggggtattctgttaatactatatataaatattcagaatttttttcaaaagtagaaaaattcccctctaaaagtacagccagatagattttcatccatattgaggaacttagctttttcaacaagcttcagaatctgaagtctgtagaatctaaaatacagaaatatccagaaatcagacaataaattgaaagtttagacatcatgagtattaaatagctttaaaaatatatttttagtcatattatttctaatgtaactttctttgggtaatttctggtaaggaaaaacatcttttggctgctagaattagttatagattttcaatatgtgtgtgtgtttgcacacattatcattagtgaaggaattccctagccagctttaaagaaggaaaaaatggatagtcccaaattaggtgtataaagccagtagagtccacgacacttggactggaggtatcttggagtcctgagacttagaatcagttcagctgcagaaaacccaccttttgagttcacaccattagtgaatagcaccatgctgaaacatttcacagcttccaactctgggaaataatggagagagtttaaaaatgtaaaacttcagttagtttggggctgaacttgcttacttgaaaaatctggtgctaggcacatatatctgcctctcctttgta

SEQ ID NO: 80105 - DNA, 1028 bp, Homo sapiens
gcttaggggtactaacatgcaatcctaggacaacacttgacactagcactgacattttaaaattcattctcccaagtaataaaaaatatatatatagatagatatacacagagagatctgcagctgtactaattacttcaaatagcagcagacaaggaaaatacacgcttgcttgcttaagtttaaattcattttaagtttgctatattaaatttaaaaattaaaaaaatatcaacttactataaacaatttaaaatatgtataatacaacttcatggtcaaaacatttgaatagtctatgaaaacaggaaatacgttcatctgacatttctgtttagattccattcatgatttttcaatctgtctcttccaaaagaaaccataaagcagttgtcatattttatggcaactaattttgtttagggatttcctcatcacaaaaatactttatttcctattacaggggagttaaagaagaagaaaaaagaaatgagaaacaaagtggctttctccccacttgtcactattctcttcttcaaacattctgtacataagctgtctgagtcttttgaaccatttacaaattgtattttcaaaaattgaagaaaaaatatttagagtctaaaagtgttattttatacactgactatacaatatacattgaatgtttacacatacaaatacatcttaaagataaggttctccaaaggtttttcgacattccatcacccctgtacttggtggtctatcacagttgtgtgtactcttgacttgactaggtgtgagacgatcgtatgccatcttgtactctttatcaaaagcatctgcagaaattgataaagaaataaaagaataaagaaatttaggtctgatgttgaaaactatcaagtttctataatactacagaaacacaacattagaggccaagaaggaattgctaggacatttctttatccaaaggaccacagctggattgcacagaccagtgaaacttaaaggtttgaaaatgccaatttttaattttacca

SEQ ID NO: 80106 - DNA, 1023 bp, Homo sapiens
aaaaagtgtgtgtggtatttggtggtttttaacatctgtacctggtaaaattaaaaattggcattttcaaacctttaagtttcactggtctgtgcaatccagctgtggtcctttggataaagaaatgtcctagcaattccttcttggcctctaatgttgtgtttctgtagtattatagaaacttgatagttttcaacatcagacctaaatttctttattcttttatttctttatcaatttctgcagatgcttttgataaagagtacaagatggcatacgatcgtctcacacctagtcaagtcaagagtacacacaactgtgatagaccaccaagtacaggggtgatggaatgtcgaaaaacctttggagaaccttatctttaagatgtatttgtatgtgtaaacattcaatgtatattgtatagtcagtgtataaaataacacttttagactctaaatattttttcttcaatttttgaaaatacaatttgtaaatggttcaaaagactcagacagcttatgtacagaatgtttgaagaagagaatagtgacaagtggggagaaagccactttgtttctcatttcttttttcttcttctttaactcccctgtaataggaaataaagtatttttgtgatgaggaaatccctaaacaaaattagttgccataaaatatgacaactgctttatggtttcttttggaagagacagattgaaaaatcatgaatggaatctaaacagaaatgtcagatgaacgtatttcctgttttcatagactattcaaatgttttgaccatgaagttgtattatacatattttaaattgtttatagtaagttgatatttttttaatttttaaatttaatatagcaaacttaaaatgaatttaaacttaagcaagcaagcgtgtattttccttgtctgctgctatttgaagtaattagtacagctgcagatctctctgtgtatatctatctatatatatattttttattacttgggagaatgaattttaaaatgtcagt

SEQ ID NO: 80107 - DNA, 1029 bp, Homo sapiens
caccatgtaatgatttttttttcccttttccacatggcaacagatggagctaacagactgttacttttatttttaaggacgttataccaaggtctgtgtgccttttccccagaagatagtccacatgtgacaaaaagggacaacagaggtttacaagcttctgctaaaagtttctctcagtctagaaatcatgctaacttattgcttattttaaacacatactggataaaaatttgcccctcagagagccaaatggggtatgaattataacaatgtcactaagatcctatttttctgctttggggaggtgacggacctaagaacatctttcctctctgaaacagtaccacagtggtacccatgaaggcttgttggagttgagtcaagtgcatgagcaagtgagcttctctagcttggaggtccggaattttttagacattcaaggaaatcccacctttggcagagggctagagtaatatctgactacagtctgggcttgtattaggtagggaataaagggatggtaacaaggatctgaataatcctttttggtatcctctgtttcaccatagttaaaaggcctagctcaaataacactattcatgattttggttaagttctggcatctttctcaagtggctagaatgactatcccaatgccatttaatagtctacctttcctaacattttattttttatatatatgtgtgtgtgtgtatatatatatatatatatatatttttttttttttatttttttttttggttagacggagtttcactcttgttgcgcaggctggagtgcagtggcacaatctcggctcactgctgcctccgcctcctgggttcaagtgattctcctgcctcaggcgcctgagtagctgggactacaggcatgcgccaccacgcctggctaattttgtatttttagtagagatggggtttcaccatattggccaggcttgcctcgaactcctgacctcagatgatctgcccgccttggcctcctacagtgttgggattacaggcg

SEQ ID NO: 80108 - DNA, 1045 bp, Homo sapiens
tctgcctaggagaacaatatattcgtctaagagaaggacttacctctgtcttttaaaatgtggacacttattcagtgtctctaaaatctgactcattggtccatagacatcattcattttaatgctttttaccatacttttcaacagttcctggttaaatgagttatcacttttttgcaataaatggaccattggatatttttgggctgtaaacgaacaaaagaacagatgaaggaaaatgttctgtgtagaaaggagaaagaaattaagcagcaactgacagatattaagttacaaagcactaaaaataaattaagggcaatagataaagaaataggaatccaagaatgaagaaagcaaaaaataagacaaataatgacaaaaaaaggtctaaagctttctgtggtcttaaatagacaataactaagaatattgtttcccttaatacagcctctgatgaaaattctaaatcagcagcctgggatggaaacaaataaaaaataagtaaaaagaagaaattgggatgagcaatgtgctgaaagctgaattctgcaaaacacaaccaacccctccagcacatacacagcacccctcaaaaaaccaaaccaaaacaaaaaacaaaaaacaaaaaaaaacccttagacctccatagaaggtagcactaaaaaaatcaaacactcactctcaaacaaaagagtacgactttgacctgtaagacaaaaagtagtacagtaaaataaaagtcagttatacattggtttatgctatttaaagctagtagagattactctcatatgaacaaagtcagcattctatgatggcacttactgtgtgcattccagagaatgtacaagggctgtcccggatcctgatgtaacttcatattgtcccataacatttgtattaaaacatatttgctatcttcagacatacagtggcggggaatctgtgttatacaataaacattcattaatgatccttacatgataatttttcataagtattttataaaattcttataaatattttttaggatgtatatgtg

SEQ ID NO: 80109 - DNA, 1050 bp, Homo sapiens
tagtacttctggccccttggataaggaagatactggaagacagaagctcatttctacaggcagcctgccagctactttacaaggagctacagtatgtattttggtgtatttttttatttggaaattgatcacttacgtatgattttgttccccttgtcttaagtagtcttattagctttattattgccaagaagagtctcttatcccatgatacaattatattacttttctactcatatgggaatcattgaattttttaatggcttagtattattttgcatttgccatttatggtttttatttattcaacaggattctttaggtttagaatggcaccttccaagtcccgatcctgtcactgttccgtatcttagtcctttagtggtatggaaagaacttgaaagcttattggaaaatgaaggtgatcatgcaataacagtagcagactttgtggaccatcatccaattgttttttggaacctggtatggtatttcagacgtcttgacttgcccagtaacttacctggattgattctttcttctgagcactgtaacaagtattcaaaggtatgagactaaaaattaaaaggcaatgaatgcttctgttaccattgtaatgtttgcatattcctaatgattaaaaagtaaggtctgtttttatgctaaatttattttattttattttttgagacgtagtctcactctttcgccaggctggagtgcagtggcactatctcggctcactgcagcctccagctacagggttcaagcaattctcctgcctcagcctcccaagtagctgggattgcaggcacacaccaccacgctcagctaatttttgtatttttagtagagacggggtttcaccatgttggccaggatggtcttgatttcttgaccttatgatccacctgcctcagcctcccaaagtgttgggattacaggcgtgagccaccgtgcccagcctatgctaaatatttttaatagccctctgggtcattagataaatagaattgttttagttgtatttacaaataatattttcttctt

SEQ ID NO: 80110 - DNA, 1111 bp, Homo sapiens
caagtttccctttcaggcaaaaattctggaatggatttagctgaagacgattatagtatataatacactgatgtaatccagtgtttgtgtatagcatctgaatccttctgggttttaattatccaatgaatttatgaattgaaatggtttttaattcataatctgaattaaccagctttctttataaagtgctatcttctcccacaggttctcatctcaagttgctctcggtgtagaacttgtgattgtcttgtccatgatgaggaaatcatggctggctggacagcagatgattcaaatctcaatactacatgcccattctgtggcaatatcttcttaccctttctgaatatagaaataagagatttaagacgacctggaaggtaatgatatttttttccttcatgtttaaggatcatgttccctataatatctcttttctcaaaaagttccttcgattcacattacagatactttctaaagtcaagcccatcaacagaaaatatgcactttccatcctccatttcaagtcagacgaggcagtcttgcatttcaacatcagcctctggtcttgacacatctgctctctctgttcaagggaattttgatctaaataggtaattatgattatgtggaactatattttaacaacatatatttacacatattttagaagtatgacagaaaaattagttgaccatttccaggtttaaatgtctatgaataacagattcataatcttaaattcttactcttaaaacagtgttaaaattctctaatcacataaatctttaaatatgtagttatatgttatgctttattaatccccagagtttaagctgtatgtatatatgataatgtttactagtattttaaaggtaaaaaaaatgtagaacacttgaggtttataatgactatcttttttcttgtctctatctcttcaggaattaagtcaatactactactttttaatatttaattttctacctagggaatatttaataatctaagaaaacatttggagctgatataggaactgcgaaattaaactaaaatttatatagtaagcctaatataagtaaatctacacttaaaactgatgcagaaatca

SEQ ID NO: 80111 - DNA, 1054 bp, Homo sapiens
gtagtagtattgacttaattcctgaagagatagagacaagaaaaaagatagtcattataaacctcaagtgttctacattttttttacctttaaaatactagtaaacattatcatatatacatacagcttaaactctggggattaataaagcataacatataactacatatttaaagatttatgtgattagagaattttaacactgttttaagagtaagaatttaagattatgaatctgttattcatagacatttaaacctggaaatggtcaactaatttttctgtcatacttctaaaatatgtgtaaatatatgttgttaaaatatagttccacataatcataattacctatttagatcaaaattcccttgaacagagagagcagatgtgtcaagaccagaggctgatgttgaaatgcaagactgcctcgtctgacttgaaatggaggatggaaagtgcatattttctgttgatgggcttgactttagaaagtatctgtaatgtgaatcgaaggaactttttgagaaaagagatattatagggaacatgatccttaaacatgaaggaaaaaaatatcattaccttccaggtcgtcttaaatctcttatttctatattcagaaagggtaagaagatattgccacagaatgggcatgtagtattgagatttgaatcatctgctgtccagccagccatgatttcctcatcatggacaagacaatcacaagttctacaccgagagcaacttgagatgagaacctgtgggagaagatagcactttataaagaaagctggttaattcagattatgaattaaaaaccatttcaattcataaattcattggataattaaaacccagaaggattcagatgctatacacaaacactggattacatcagtgtattatatactataatcgtcttcagctaaatccattccagaatttttgcctgaaagggaaacttgcttttaagtgaggatttttttcattataaatcagagtaaaatgtgctgtggttttattaatggaaaagtaaactcaatcactaatttgt

SEQ ID NO: 80112 - DNA, 1054 bp, Homo sapiens
aataaggggaaagactgatacatttgatgatatagaatttaaaacttacatatggcaaaaaaaacacccccaaaaaacaaacttagataaactacttgcaacttatataagcaacaaaggattaactccccaatataaaaaaagctactaaaaacattaaaaaaaaaaaggaccaacaattaaactgtaggcaaaggacagtccacagaagaagaaatgcaaatggtccttaaacagattctcaacttcatttataagagaaatagaaatgaaaactgactgaaatacattcctcacctatcagatggtaaaaatccaagtgtgccaacatagtttgttgacaaggctgtggggaaataggtattctcatatactggcagtgggaatgcaaaataacctgaggaagggaacttggcaatagcacttcaaggaagaattctgaagtatcttccaaagacacactggtaaaaatataacatatatgcattatagcattagaaaaactggaaacttgacatccattaatagggaagtcgctaaaataaattataatacatccacacatgatgtataactataattttgtactatatagctgaaaaaatgaatggggaacattgctatgggatgatatagaatgatcttcagagtatattaagtgaaaaaatcaaggggtaggaaactattgacagtatgttacctttgagtaagaagacagggaagtaataaggaaaaatatatatatatatatatatatatacctatacctatatttttaaaaaagcaacgatggaaggataaaccaaaaatgaataaaaatggttgcttctagggatagggagaaaacaggatgagggagtggggatgaaagttatacttttgtgaaagtgccttggttttattgttttgactttggaactatacaaattgtttacaaaattaaaaaacaacattaaatcataaagaaaaaagtgaaagtgtcacaattcaaatgaaactacaaatcaaatgcagtatgacagaactgtttggacaaaccttccaaggatgcaga

SEQ ID NO: 80113 - DNA, 1079 bp, Homo sapiens
caggcatatgatttgcccttctggttaggatggagtaacttacgatagacttacataccttcccctaagagctaaaagctagatgaaatagagaaagtatctgtttaaagtcatcagagaactgctgaagtaactagaaagcagagaggcaggattctagagaggtgagctgaagttctagagccactttctccctgaggggatttgctcattatgggcatgaagcactaggttgtaaatctaggctttcccttatcagaagttttgggaacttgtgggttagagagacaaaattgaagactttaagggcctcaaatacactgaagattttcttccttcaagacattttccaaatacttgatactgcatgagaagggtaagtagaacgtctgtgagaaatcaagttctcagaagtttcatggtactggaatcataatagctcgattcaggagctgccagagggaggagggcctcagttggaatacttacagaggtatgccttaggaccattggcaaaccagaggtagactaagcctgaccaaaattgcaacctagacttgactcaggttatctgtgatttggttaaaataatcagcttttactctatcaacagagaaaagattgtaccttttctggagaaataaaacatcagttagaatccttacagtttttaatatacaatgtctatcactcaattaaaaatagctatgccaagagacaggaacatagctaaaaaatgaagaaagcagataacggaaagagaccctcaagtgatccagatgtttgaattaacaagggactttgaaataattataatatgttcaagaatataaaggaaaaggtttaaaaaataactgtaaagatggaagatttcactagataattggaatgtattaaaaataatcaaacctaaattttagaactgaaaatgaaataaaaagcaaaaatcttgagccagagagaagagatgcattacctgcaaaggagcagtggtcttctgaagagaaactatgatgtcagaagacactggaaagatatctttaaagtgctgaaagaaaataactgtcaacctatttttc

SEQ ID NO: 80114 - DNA, 1063 bp, Homo sapiens
caatcatagttcactgcagccttgaactcctgagctcaagtgatcttcccacctcagcctcccaagaagcctcccaagaagtgtctataggtgcatgccaccattcctggctaattttttttattttttatttttagtagagatgaggtctcactgtgttgcccaggctggtctcaaactcctgggctcaagtgatctgcctgcctcagccttccaaaatgctgggattataggcatgaatcactgctcccagccccttttgcttttcttaacaatatcttcaacactagatttttatctcattcccatgtatttgtactcacatacagttcaatgattattcagctaaatttttttaaaaattaattacccatcaataaatttgaagaaatccaatttttttgtaaaatcatttagacatttagctctagtgacctatgtatgaatgttctgttataaattctttacagatttctccattgcttagttgaaactcaaactttcaactagaaaggtcatggacttgtataaagaatgtctggtttgtctgtgtcttggagctcatatagtagtgtgaatgtatgtagttacttttgactacagtgtggaaccaagagtaaattatttcaagatcatctctttcttatattaatagagatgatggaagggatagttaacaaactaatgctttaagggtagctaacaaaataatgctttaagttggaagttgtccagaaaaaaatttataaggaaatccaaacactagtatgttgctcctaattccagttgcactcactaaagaagtttctaatagagttttgtttatttttgtttttaccaggtggccagtctgatcttggatataattcattatctaaagatgaagttagaagaggggatacatctactgaagacattcaagaagaaaaagataaaaaagggagtgattgtagttcctgtaggtattgtttaagttgatattgtataaaattgagaacttatattcatagaaaatgcaggtgattttataaaagtgctggttttactttccatttttccatta

SEQ ID NO: 80115 - DNA, 1032 bp, Homo sapiens
atagccctttgcccatgttcagaagaacaaaacaggtactttatcacattcttcatgtaatcaaattttagaacaagaaataaattggatatttatcctcccgtaatatgctttatcacttcatatataactattactagattattatgttcaccaaagcactgtgaagatggagcaatctgacttcaagaaattaactagttctcttgtcctagaactttattttatatgctgtttaatacagattcaaaaagaaacttgaaaacgcattaattacagacatattttgttatggaaacattataaaagcatgtgacttgtacttgtttagcactcagttaaataaagatgcctaagtgcataaatttattagtaagatctttatattttttccaggaaattaaatcagcccataaaattgcaaagaggtactcttccatccctcagatgtggtctaggtgtctactgcgccactgttatggactgtggtttatttgtctcccagcttatgtgaaagtctgtcattcaaaagtcagggctctgaaaacagcatatgatgtgcttaaaaaaatgcagtcaaagaagatggatccacctgatgaggtaacaattattttattgttgttattttatttttttgagatggggtctcactctgtcacccaggctggagtgcagtgatgcagtcatggctcactgcagtcttaacctcttgagctcaagagatgcaatcctcccattttagcctcccagatagctgtgactacagtcatgtgccaccacgcctggctaattttttaatttttttgtagagacagagtctcactatgtggtctaggttagtcagaagctcctgggctccagagcttcacctgccttgccctcccaaaatgttggaattacaggcatgagccactgtgccctgccacaattattgtttaaaatgcattattttattctagatttatgtacatggtgacatctgtgtttcggtacaattttgaacttgtatttcaggtatgctaccgcatt

SEQ ID NO: 80116 - DNA, 1050 bp, Homo sapiens
accgaagtattttgataagctctgtggatcatgaatttactgaaagtttttgtagtgctttttcttacagtatttaagaaaaaaacttatggtaggatttttctattatttaggtgtctaagcacacttaaatggagattaagagtaaagatcaccacattaagctttatggtgattagcaagattccaaagcaactggaatttactcagtataaatataaacttgtgaactatatttaatacaaggttctaccctcatacaaattaatttttgtatattcaacatgccaatttacccctgtaggatttttctcttgttaatgcaaatattttgtttttcatttttcattcaaggtgtttaatcttttcccgtttttatatataacagatatatacctttcccctccaaaagaccatgtaacaaatatattcctgttgttatttaatcttagaattggtgacaagaaaaatgtagcctggaagatacttccaaagaagccatgtaaaaatctgatgaacacactgaataatttgcatcagcaattggcaaaatgtaagtggataacttaattaaaggaggtaatttaatctgaaaaagggactccaattactttgccttacttataaaagaataatgtttatctagcagaaagcggttttaccattttaaaggcagatgatcattaaagcaaaatttgttagaagatgaatgagagatttataaaatgtgtatttttttttttttcgagacggagtctcgctctgttgccaggctggaatgcaaaatatgtatattatatctaccaaatttttatagaaccatcttaaaataataaaattcaaaaggatgttaaggtggtttattttaccgttactgaaataccatggaaaaaatgtggggttccacctttatattgttttttttttctcttttgagacacggtcttgctttgtcacccaggttatagtgtgtggcacaaacatggcccactacagccttgacctcctgggctcaagtagtcttcccacttcagcctcttgagtagctgg

SEQ ID NO: 80117 - DNA, 1049 bp, Homo sapiens
agcactttgggaagccaaggcaggcagatctcttgagtccaggagtttgagaccagcctgagcaacatagtgaaaccccatctctacaaaactacagaaattagttggacatggcccatgcctgtagtcctagctgctcaggaggccaaggcacaagagtcacttgaacccgggaagcagaggttgcagtaagccacgatcatgccactacactccagcctgggtgacagagggagaccctgcctcaaaaaaaaaaaatttccttaccgtatttacatataatgaatgtaaaggagaaattagatgaatgcattttttttcctttggcaatatatgcagtaatggaatcgccagatcaatttattttaaagataacacacccattgcatgttaatataaatgtcttttttgaaaaataacttttccaaaactaaaaaaactttagtgagcagaatggcattgttttacatttttgcagatctctaatgtctagcttaattaaacatagctgggcttccatatatggtctgcattcaatctgttgcagtagttgttttggttgaaatatacaaagaaagcctggcctcccacagatatgtaggtagaaaagggagggattttggatcatattttcagaaagtttgggatattcttttttttgacactgcaccaagcttgacaaatgctggtttcttacaggttatttgcaatctaaaactgtagtagtgaactttgtcagttacattaaaatctattggtctgggcaggtgtggtggctcacacctgtaatcccgacactttgggaggctgaggcaggtgaatcacctgaggtcaggagttcaaaaccagcttggccaacatggtgaaaccctgtctctactaaaaaaaaaaaaaaatacaaaagccagctgtggttgtgggcacctgtaatctcatctactctggaggctgaggcagggagaattgcttaaacctgggaggcggaggttgcagtgagccaagatcatgccactgcactccagtatgggcgacagagcgagactccatct

SEQ ID NO: 80118 - DNA, 1001 bp, Homo sapiens
cccagctacttgggagactgaggcatgagaatcacttgaacccaggaggcagagattgcagtgagccaagatcgcaccactgcactccagcctgggtgacagagcgagactccatttaaaaaaaaaagatttgaaagttaagttattcttttaaggagtggtaattaaagcctgattggaaatgaatttgggagaaagtaggaaataaggaagtggacttaacaaattacaactcttgaggcataaaggattgcagaaaaacctggcaatatctgaaacagattgtggagtcaaaggtatgcacttgagtagatactttatagtttatcatttatacccacagtttggactcagaataaaatctaaatggttgtgacttagctttgtttaaaagagtcaagttttcctcatgttattgctgttgcaaggggaaaaaagtagtaatttacttctgaaagaaaagtggacagtgattccaataaaatattgacaaaacagccaactgaaaatagctagcagagggaaatttgttactacatattagataatacatactagagagctcaaagagattccattttatcaagttcctaccttttaaaaattaaatgatatttctatttttttaaatccagtggggatcagcagtatacttgtgttataaaaaatcggtggcaaagacgaacactgtatcttacaaagctggtaagtgtaatttttcatgcaatacttcatatataaatgtattatagggcccggaaaggttaaagtaaagaaacctgcctagtctgtgttagtatcaggactgggactacaatccgtatcttctgattctcatttttgtcttcacttatatgtttattggatgcttgatggaagattaattttaaaataaggtgagtttttattttaagccttgggtttaaataaataataagatctcaattatctttaagtttttaaatcagcagaaatatggtaaaatgtattttcattttaaa

SEQ ID NO: 80119 - DNA, 1048 bp, Homo sapiens
tgcaagcagactctacacagttgggcaagtaaccttttgtaaaattttaactttggccaaaatgcccagttgctttttctaaagaaggtgcttgttttagagacaaaaaataaattaataactatattaaatgatgtgccaaaataggtaccttcacatttaattgtacctttctctggtttatattaacaaacacaatggtttgtcagaatttttccttaaaacaaagtttttggtggggaaaagagttattctttaattcatacaagaccgtgcattttaaaattgcagtaagattggaatatttttaccatgctactacatttaaggatcagttgatgatgcctgagaatattacttttcatatttaaagtgctttgtgtatttatttttaaaaatttatttttagggttttatatgactggaaagaaagattgaaacagggttgtgaaattattcagagtactccctatgggcgccccgcaaatattagtgggagtacctcatcacaaagaatttatatcacttaccgaagagcctctgaaaacatgactcagaatacgttggctgtcactgacatatgtattattatacccagtaaaggagaaagcccaccacacacgttctgcaaagtcgacaagaatctcaataacagtatggtaagtgacttacttgcactggtaacattaaccactgatgaaaagagcataattttaaatacatcttttttttttttttttttttttttttttttttggaaaacagcatagtttaattacagaattgaaaaatgtgtttttaaagatattagatattttacttttcggaaagtactttggttgtactttcaaaagaaactatgcaaagtacttttttttaaattaaaaaaataatatcccccaccccccccgcccactacaaaagcaatgagtatccttccacttgtgactagatcccacacctcaacgggactagatcccacatctcaatttacccatttgaagacatggctttagcagtcctccctacttttttgtaaatcattggt

SEQ ID NO: 80120 - DNA, 1228 bp, Homo sapiens
ggagtgcaatggtgcgatctcagctcaccacaacctcttcctcctgggttcaagcgattctcctgcctcagcctcccaagtagcggaattacaggcatgtgtcaccacgcctggctaattttgtatttttagtagagatgggttctctccatgttggtcaggctagtcttgaactcccgacctcaggtaatctgccctcctcggcctcccaaaatgctgggattacaggcgtgagccaccgcgctcggccaacctgagagcgcttttattattaatttcttagtttgtagtttcctgggaccatccatatggtttaagtacaaaccccaaacccaagtgtgaataggcctattgttaggaattctcagaggagactcccccgctaccctccctacaactttattatctccctgtgtcagtggataggtcttttaaaaccactctttggctgggagtatagtcctttgaaactctcagctttatataggtggctcagttccaattctctatctatgtggtctgaagtgcttatctcccatgcttttaatgccttctaaaacacaagccggatcaggtgcagtggcttatgcctgtaatcccagcactttggtagactgagatgggaggatcacttgaccccaggagttcaagaccagcctgggcaacatagtgagacccccccccccccatctcagaagaataaaacaaaataaacacacaagcctcttgattattgaggagatcagtaaatttccccactcagtggtagtttacagactgcattctgacttttggtttcttcagtgttttggggacctaggaatttcccttacattcttacaagtctgtgtaagatttatatttaaaagcgtttactgaacgactgtgcatttatttatttatttatttatttgagatggagtttcactctttttacccaggctggagtgcagtggtccgatctcggctcactgcaacctcagcttcccggattcaggagattctcctgcctcagcctcctgagtagctgggattacaggcacctgccaccacgcccagctaatttttggtatttttagtagagacaaggtttcaccatgttggccaggctggtctcaaactcctgacctcaggtgatccacctgccttggcctcccaaagtgctgggattacaggcgtgagccactgcacctggccagactgtgcatttaaaaagatctctttttgt

SEQ ID NO: 80121 - DNA, 1019 bp, Homo sapiens
ttataacccaggcagctattttctttttttctttctttattttgagacagcgtcttactctgtcgcccaggctggagtgcagtggtgctatctcagctcactgcatcctccgcttcccgggttcaagtgattctcctgcctcagcctcctgagtagctgggattacaggcacatgccaccatggctggctcatttttgtatttttagtagagatggggtttcaccgtgttgtccaggctggcctcgaactcctggcctcaagtgatcctcctgcctcgtccttccaacttgctgggattacaggccaccgtgcccagccccatgcagctattttcttactaccctggggtagcatgatttctctgagtcttcctgcttttccacttcatttttcttactttgcatgttgtctttcaccactgcacgtggatggacatgtcttctaactcttaaattcatatattcgctcatggttctgtgatttcattctgaacctctgggagaaaattgagtctgaggcaggtatctctttctggtctaatcaactgtggccgatgaagccaaaggttcataaaacatggctttcaggcccaatttttatggaaggggaatgatacaggacatacaattctcagaggataggtgtgtaggtaaatagactttctaaaaggtggtggatacaaagggatacttaatgattaaaaaaattatgatttttatgaaataaaaaagttactgctcagtggctttatatatagtaggaaacttaaattatttcatccccaatctatacatgattattgtgaagactaaaaatgtctcccttttttaagtaaaaaacaatggaggtgattagcttctgcatacagaattggaagtttgagtcattattttatgagcatatgtgtatgatgatatataccttctttaatattaataccattaatacatcacatcattctttatttagcaaacatttattgactgacttctctctgccagggagtatgctaaaacag

SEQ ID NO: 80122 - DNA, 1430 bp, Homo sapiens
atctcacatatgaaaatgtagagcgatggctgaaagaactgagagatcatgctgatagtaacattgttatcatgcttgtgggcaataagagtgatctacgtcatctcagggcagttcctacagatgaagcaagagcttttgcaggttagtgataggaattccatgatatttcttaccattgtgtcttgtggttttgataccttccaatgagagtaataggttataatagtttcagagaggtaaacatgaatgcttagcaagaattgttttgaaagtttgtgatgactgtatagcttttttgctttgagtcattaaaacactaatattttgctgccaaaaaatgaatataaacattgtatattctgtctctttttctgttatgtttctgtgtttacaaaggctgctgtacgtgagctctatgtgagtgaaaggcagaggctcagggagtgtcagggaccaacagggatgcagctgcttaggagctgtaactttttggcttcataaagaattcacgtgtctcttgcccctgttctggtagggacagcatgccagaagacaacattgtgcattgtggctagtgaaagtcttgcggccgggcgtggtggctcatgcctgtaatcccagcactttgggaggctgaggtgagtggatcatgaggtcaggagattgagaccatcttggctaacatggtgaaaccccgtctctactaaaaatacaaaaaaccgggcgcggtggcgggcgcctgtagtcccagctactcgggaggctgaggcaggagaatggcgtgaacccgggagcagagcttgcagtgagccgagatagcgccactgcagtccggcctgggcgaaagagcgagactccgtcccaaaaaaacaaaacaaaacaaacaaaaaaagagagaaagtcttgcctttgcactaatgcttatgctatgaataactttctgtaacagttttttaaatttcccatgcaagaatagctttattgtaaataatatggctacaacatacggaatactatagccaatgtagttgatggagaggatagcaagagatggaaataactgggcacttgatacatttttaccacattttaagtggtgtcattcgtcactagtgagtagtacttagatataacaagtatttattttaattaaggagccaattgacaatttctcactttttttttttttttttttgggagccaggatctcactctgtgacccattctggagtggagtggcacagtcaaggctcactgcagcctcgacctcctgggctctagtgatcttccacctcagcctcctaagtagctgagactgctggtgtgtgtcaccacgctcagctaatttttagtattctttatatagagagagcaaaacctctctccagtgttttgccatgttgcccaggctggtcttgaactcctgg

SEQ ID NO: 80123 - DNA, 1049 bp, Homo sapiens
actgtcccagaagttgaggaggtcttaagttttaaaaagttctgttatttttccttttgagggcttgagtatatcctattccttgttttaaaacttaacaagactgaacttttgtgtctcccctcagaaaagaatggtttgtcattcattgaaacttcggccctagactctacaaatgtagaagctgcttttcagacaattttaacaggtaagacttgtattttcagattacaccagtaggactagaagttttaggaaggtaatttaaacaaactaatcagtaactaaactatatatcagccgagagtgactatcatttgagagctactctagcaaaagctgtttagagtgcaaaattaactacaacccttgctcactgagcttcagttgtcctaattcatctgatttatagtgggaaaaatactttgaaaataattcattcacttccattattacttcagtccaggtattccattcttcatggtcacaaagtaatgtttaaatgtacttttatgaggtaaatattgagatcccagctatagaaagatataaatgcccttttttaaatttagtaaaggcaaagctagggaaaaaacatttttaaaaattatagcgacaaaataaaattctcccatgatacagaagaagggtatcccttgcgtattctatattgtatcatgggagataattggtagataaaatcagccaatgattgcatatagaaaagttttaaaaagtagttggaaagagatggagttcatgctgttttggaatgtgaatgaccaggtcagcctctgagataagaagtgttcactcatatttatcctgaaactattagaataaccagatttattagtaagattagtcttaatcttctaattagtactttgatgggttgtttttaaatacttttaaattgtatgttacttttaagaactcatgatttaaaatgtggtcttaatatatagtatagttttacgtggcattgttctaaaaagtctatacagagatatgattgagtttccaattataatgtaacaagttttgat

SEQ ID NO: 80124 - DNA, 1078 bp, Homo sapiens
atgttccaccaaccactgaaaacaagccaaaggtgcagtgctgtcagaacatctaaggcatttctcttctcccctagaaggctgtgtatagtccatttcccaggtctgagatttaaatatatttgtaattcttgtgtcacttttgtgttttattacttcatacttatgaatttttccatgtcctaagtcttttgattttagctttataaaatcatccacttgtcccgaatgactgcagctttttttcatgctatggcttcactagccttagtttaataaactgaatgtttggattcctcagttattgtttacttttcatcatggaagcctgtcactgtatgtaggacataatagaacttgatcacttgaagctcagacctattggtcttgatcaaatcaaactaagaagaccttagaaataagctaccattttgccacagagcagcttataggtaatacactcttctctcagtgcagtgtacatttccacaaatctaagaattgccctataaacatagcaggattttgagagcttgaaaattttccattattctggacatgaatttctaaaatgccttaataggtttatgtagttgagtaaattttgttttttaatttttgtaagcatcaaagttgattagagaggggggcactttttctggagaattctcttagtaaacacaaaagattgttacggtttcattagtagtatggttgtggggccataagttaaacagtgctgcctggtaggctgggaactgaagagacttgtggtattccatctcgggtgcctctgttggcaatgatcaggcagcccaaaagatttaaatgatctataataatttccaagcggtagattatgtggcattttattgctcaggcaataattggtttaatgctggtagtgtcaaattttgaagtgttaattttgtcttagaaccttccagtaagtgaaatacaacctagttttatcaccatatccaccagcaggcatggataattattttaacaatgctaatatttgagttttgcagtatattatagaatatagtccagttaaatctttggtttcagtatg

SEQ ID NO: 80125 - DNA, 1050 bp, Homo sapiens
aactttatttcatgcacaaaattattaaaaatattgtataaaattacctttaggctatgtgtacaaggtatatatgaaatgtaaaatgaattgcatgtttaaacttgggtcccatcccaaagatagctcattatgtatatgcagatattccaaaatttgaaaaaatcccgaatttgaaatacttctggtcccaagcattttggatactcaatctgtatttacattcatagtatctatctccccctccccttgacagttccatgtcaggacaattagggagggccatctaaaaagagtgagagggctagtcttagggttcattctggtgtagcctggggagctatgagaattactatttaaattttaaagttttttattaaaaattatacagaattatatattacaattatataaatatatacttatatataattattatacaaaagtataaaagtacaatgaacccccctatgtatccatctcttcatagaaagagtttccatctcctgttgctgcatattgattaaatgggcctcttctttcttccctctggttaaatgaatggctaatgtgtcattcttgagtgcacaacttgcagcaattggccattagttatcattcatagtattgagtaatattctgagacttgtaatgcataatcttacactactgtcagtaaatatcttttttagtcttaaaactctttgattatgttttgtctttaactgagatgtcaactcatagctcttgagaattacctattagtaatttcttctgaatgggtcttcagaatgtgagggttatgtacatatgaggattatatacaaacctttggaactatgaaggaggaattttaaacttatttgaatgaactcagtaagccatattttagcatctgtattttattacaaaattaatcctgttgcttctttaccagtttgatcacaagtttatgtctttaaagtttataaaatagatatacccatagtaactatactggatgataacttctactagtggaaagctattcattgcattatagaaatgaag

SEQ ID NO: 80126 - DNA, 1936 bp, Homo sapiens
agatttttaaataagttttgaacatgaataaaaatatggtgctcacatttattactttaaagaaagagactcgtctatcaaaaatttgatacaagtttttcacttattttcaaacatctactagaataattttcattcttccaggtgttcaaagtgcccaagcaggatgtaggttagttctacccttaaacttaaggtgtagattataagcacgttttccatttgcaacacaacagtaggcattcttgttaaattagtttgagaaatttgttttattttgtacaaggtacaatccctctgcacagtgaacatatattacaaatctgtgatttaaaaaagtattgccgtttcatagtctcattaatacctctgtacaataatggtttttctttcattcattttaattgtacacatattaattttttgaaaatttagtttctgaaaaataattgaacagatctttcaaagtcacccataaaatgcacagtatacatgtttaggctgaccatgaacctatttgtgatggtgttagacagaagtttctaacagttgctttgtaagattgaaatgtcttttactgataactgttcgataggggaaggcagctattgtcaccataatcacaccctctgcctttcccttctcctctgtattgcctggtttgacttgtattacatttccttaaaaagtcatggactgctagagctgaagggttagtagagctgtcttcccactctctgcttctcccctttttatgcataggaaaaaagggagcccagagagggcgactaacttgaccagagtaacactgaaatctcttgattcagtgtctagccattccacctcttgctgaatacctttgcccagaggatagttgacaaaagcggcgaaacttcaaacttgagtgatgctgcttgtttgcagtttgccaggcagcagttattgtacatgcaggataagggaagaagagaaaacctgggattgagttgaagtttctccttgctgatctgacatcttcatgctgctcatccttgcttcacaaacacttgctgccctgaaatactgaggtaagctgcttacctatatttctttctacatatgtatgagaaatatttacttgggtctccaaagtaattttctaatatttatattttaataaggcttttttggaaagtaaatttactattgctactcagttgctcccatgcacacatgcaacattcatgtaagtattacatattttcctctaacagtaaaatctgcttatgccttgagtgatgtgggaaggggagatgtactcatttatttatttttttgctttttctgattattgcccaaagtattgtgttccatggcaggcttccagtttctatcaagggtttcagaactctcatacttcctgtagcagtattccagcttcgcagtcatttagttcctcttctgtgtatctttttggaagtgttttttactggctggactgtaccagtgaatagagtggtacaggagtagccgttagcttcctaggtttgccctttttgtttttaattcttgtgagaaggttctctttagggcttgggagttgatttcatttcatttggacttatctgagcctcagtttatctgtgttcatagtggaaggtatagacacatctgaatactgggatctggagcattagctcattgtaatgcatattgggctagctcagtaagtagtagttttaagatagaaggtggaaggacttcatatcctcatgctgtttacagtaacgtttttacatcacgttacagcaactggttacagtccattctttttttgatcatttagttccattaaaaagcataatgtactttaagcagtgtaaacttgctgtatccacatttgtccaatttcctgtatacttttaggtttcatactacgtcaatctcaagatttatg

SEQ ID NO: 80127 - DNA, 1072 bp, Homo sapiens
cgtgcacgtgcatgtgcccatttcccacccccagtatttgtttcatattagtcctggtgttttttaaagcagagttggtacaataatttgacttcctgcattagctaggagggtagtcctaggaaagacagttcaccttagagatgcctttaaaagcaacaaaagaaggatgtgtggtcaaggtggggtgagtggagagggcttgcttttacttcaaatgctgcactattgccctgatttcactaagttacttatttgagacacctaccaacttcatatatatttttattagatgtcgacaaggatggcacatctgtgtacggagaccccatgtgcacaggcgacttcatttctacatagctgctttctggaagcttgcaggtgaggatgggtgggtccttaattgtggcgtaagggttttcactgctattcaaggaacaagtactagaactgcacacggattctttcatgtaatctgcaaggcaagagacatttcttaggacaagcaagaatacaagtcttcatgttaatatcagaagcagactgcagttgagtttatgtgccttcaggatcttagagctggaaaagccaggataatccaagatttatttacttattaaatgtgctgagaagtgctctcccaggtaggcagagttctttttccaaagaaacttatgtttttggaggataggaacatttttgtttttagtagttgggtattaattcaagatatgcataatatgctttgacatgtatttaatttttgtaaattcctgcaagggttgctgatagttgcattttatgagatcaaggctcagagatatgaagtgacttagctaaagtcacacagctagtgaatggcagtgccaagaattgaatccatgcctttggactccttggcctgtgcattttctgtgatgatattcttgtgaattcttcttttttgagatgttgcctaggctggtctcaaactcctgggcttaagtgattctcccgcctcagcctcctgagtagctggtattatcggtacgtgccaccacacctgacttgaattgttttcaatgactgagaa

SEQ ID NO: 80128 - DNA, 1067 bp, Homo sapiens
tgagaggctcatgctgcatacctctggacacccacctgtgcctgtgcccatagacacaaaacagtggggagcagggccatggtgggagtgggaatctcaggactcctagcttcccataatatccattcagggacaaaagcatggctttcatagtccacggctatgccctagagatctaggagtcctttcttccctgtctgtcccatggagaatgaccatcagcctacagacctggtccagcaatagtaatatagatactatacagcctcaagggcaaccactatcaagccaacaccccaaggccactctcagcctccaccctcttttggtaaggggctggaattactgcagagtagccaacttggtgaccctctgggtcacctcagcccaggggcccagagtggctctctgtggttaaccagtctaacagatagggcatctgcagcagaggcaggcagctgtgatgacatggaaaggacacggcactgggaactgagttccagacacagctttgtcactgactcgtgtgtgttcatgagcaaggcacgcaagtcaggactcaggtcgccatctgtgaaatgaggataaccatccttgcctcatatgaagggcagctgtgaaaatgcagagaatggaaggactacaatataagcctcaagacactctgttctgaagctttcctttggtcgcaggaaaaggaaaatctcacattcagccccaatcaggatcaggtggcagaggtgacagtgatattgcaggcagcctcaagacttccctctgtgctggagatggcctcatgttgcagctgagacatcaccagaggcccctctcctaaagctcagccccaccccccagctaatctgcttcctctgtcagggccagcttggctcaagctaccccaggaggcctgggaaccctacaacttcagcccaacagctggggtggggtatgttctattcccactagcatcaaccacaccatggtggcctgtcatggaacacctagctcgccctttctctcaacggcctaggacccaggtgggtcaggattattacagggtgtgtgca

SEQ ID NO: 80129 - DNA, 1024 bp, Homo sapiens
ctgggtcctaggccgttgagagaaagggcgagctaggtgttccatgacaggccaccatggtgtggttgatgctagtgggaatagaacataccccaccccagctgttgggctgaagttgtagggttcccaggcctcctggggtagcttgagccaagctggccctgacagaggaagcagattagctggggggtggggctgagctttaggagaggggcctctggtgatgtctcagctgcaacatgaggccatctccagcacagagggaagtcttgaggctgcctgcaatatcactgtcacctctgccacctgatcctgattggggctgaatgtgagattttccttttcctgcgaccaaaggaaagcttcagaacagagtgtcttgaggcttatattgtagtccttccattctctgcattttcacagctgcccttcatatgaggcaaggatggttatcctcatttcacagatggcgacctgagtcctgacttgcgtgccttgctcatgaacacacacgagtcagtgacaaagctgtgtctggaactcagttcccagtgccgtgtcctttccatgtcatcacagctgcctgcctctgctgcagatgccctatctgttagactggttaaccacagagagccactctgggcccctgggctgaggtgacccagagggtcaccaagttggctactctgcagtaattccagccccttaccaaaagagggtggaggctgagagtggccttggggtgttggcttgatagtggttgcccttgaggctgtatagtatctatattactattgctggaccaggtctgtaggctgatggtcattctccatgggacagacagggaagaaaggactcctagatctctagggcatagccgtggactatgaaagccatgcttttgtccctgaatggatattatgggaagctaggagtcctgagattcccactcccaccatggccctgctccccactgttttgtgtctatgggcacaggcacaggtgggtgtccagaggtatgcag

SEQ ID NO: 80130 - DNA, 1119 bp, Homo sapiens
atgtccctctggcaagtgtgccagagcccagtgcatccatgaatgtggttaacagctccaataggcattttatttgggagtctgagtggggtcaagatggggctgctgggcgatatccttcctttcccctgaaccctggactgctgccttggaaatacgaaaggttttttgcttcatattggctaaacagtagaggccaaaatgctctgaaattgccctatagtcctgggctatgtgaggctgagcctgtctgggtgagcacaaggtgacagctctctccaggtagctccatggcacgtggctcatggctcatctgcagcctcctgcatcttgtgcttagaaaacccagatcacttcagcccattcctgctaagtgttgccttctgtatgtccagcttcatgctaggcactgcaggatagacagaggcaggccagtgcacaccatgccttcaaggagctcctggtctacatgccacactacagccaaagcagacatcccacacacagatttggggattttcttctatgactatactgagaaggctggctagggtttcctatgccattcctctggtattccccagccctatggagaggttctggaatccttaggagggaagagcagagtcagaagtgaggttctctttatgatctcattaccaggatgtgaccctagaaggaagcaggtgagtccagccctaaatagggactcagggacatgtaaggctatcaaagcaaacatgccccatccaggctccagttgatagtgcctccccttggcacaggtgagcctatcctgcattctgcatgctgcagggaggaccagcgtaagggaaggagcaaatcaggctctccagatttcagtaggagtagtggatgccaggaagcttgggggatggggtacttgcctgtttgtctttgcagggctctctcaaggctcccagcgcaagcattagtactgggggtatctcatgccaggggcaggggtatgatggtatgtggcaccttgttctcttcccagatttgtctcaaagtagcagccatgcccactgcttttccaattccagctaccacgcactggcatgtggggggcctgccaccagccaggccagcactctg

SEQ ID NO: 80131 - DNA, 1051 bp, Homo sapiens
ctgtgtgtgggatgtctgctttggctgtagtgtggcatgtagaccaggagctccttgaaggcatggtgtgcactggcctgcctctgtctatcctgcagtgcctagcatgaagctggacatacagaaggcaacacttagcaggaatgggctgaagtgatctgggttttctaagcacaagatgcaggaggctgcagatgagccatgagccacgtgccatggagctacctggagagagctgtcaccttgtgctcacccagacaggctcagcctcacatagcccaggactatagggcaatttcagagcattttggcctctactgtttagccaatatgaagcaaaaaacctttcgtatttccaaggcagcagtccagggttcaggggaaaggaaggatatcgcccagcagccccatcttgaccccactcagactcccaaataaaatgcctattggagctgttaaccacattcatggatgcactgggctctggcacacttgccagagggacattgtccaaactttcagacctcccaagtcaggtactgtccccttccgctgtactaataggaccctcctaactgggaactgggaaggagggttgtcctgaggcgttcaccagggaaacagaaatggatgagctctgggcactgggctccaaggtctagcctcctgaggtggtacaggcatcaggttggggagacagtcctctggagagcttaggaaagtgactggttagtgtgggtgctcctgaggccgaaggctggtgagaaggatagggaagctctgggaaaatggcaggaggctcccaaccacagctgctcagagctagggactcaggaaacaattttcccttggaaccccagatatcttctctaggtaggctcctgctccccatccccactgtcactctaggggagactgagcttccacattcagccacagcagccaaccctacaggcacaaccattcctggggtatgtgtgtgtggaggggaagaggagggaggccaggagcatggcccttacctgagagggagtagtcggtgctggtcatc

SEQ ID NO: 80132 - DNA, 1040 bp, Homo sapiens
ggatggcaataggcaatgatgtgtggaggcagctcctaccttctcactggttgttcaatatttgggaattttgtgaatgatgttaaaccattggtaccttaaaatcagccgtggtaggaatatttatattttaaaaatctgcagatgttacagatcagggtttttcccccacaaagagctggtagggtggaacaccaatgcaaataagctttatatctcttttcaactcctgctgagtggtagcagttcttggagtcggtattgtgaaggattctgaggtcaagtcaggaaagcatatggggagggattagggatggtggcctgaatatgacggggagaagggcttggaagttgccatctccagccagagccagctcctctgcactcccacagcattctctgcctttacccttggcactcggcacagaccacatggtgccacttctgatgcagatctctgtgcttgtttcacttttcatcccttcagcatgcatgtcggaatcagaatttgtttctgccacttgctagctgcgaaatcacagacaaatcatttcacttctgtgaggctgttaactgtgttagggcctttgtctcatgccatgtggggctcaattctcataaaggcagcccaagtcctgaagagggaaggagctacctccatagcgtatgatgaaaatccccaagcccttccttccctgccactttcctcccagaacctctcacctccccacccagtaccttcccactggagacagtaccttggttgcagagagctccagagaatcctgggaggcactcacagatgccgctgatgtggtggcagggcctgctgctgtgcacgcagagggggcatggctgggcgcagccgtggccatagaacccaggggggcagactgagggtgaagggaagatggtggtcagcagcccaagagaccccagccagcctagctacccttcctgttccacacttctcagaaacatggggagacctgcatccttccctcatcttggagggcgcatccctttctgcagagaagagc

SEQ ID NO: 80133 - DNA, 1121 bp, Homo sapiens
ccaggaggaagaaggacccctactctgacttttctttttttcttttgagatggagtctcactgtgttgcccaggctggagtgcagtggcacaatcttggctcactgcaacctccgcctcccaggttcaagtgattgtcctgcctcagcctcccgagtagctgggattacaggcacctgccatcacgcctgatttttgtattttttactagagatggagtttcacctcgctggccaggctggtcttgaactcctgacctcaaatgattcacctgccttgatgtcccaaagtgctgagattgcaggcatgagccaccgcacctggcctgagtgactcttctctccccttttctcacacacacgcattctctcactgtcctcggctgcttctgcccttcactcctccctcccctccccgcctcagcccctcctcttagcccccctacttctgacttgtgtgtggaggagagtctaagctgaatggcctcctgtttaactcattacaagtaaactggatgatcttgaaagatgactctggtctggcacaattttcctgaataaactagcttctgcagggttggtgattattggtgcttaataattgtgtgttgaactaattgattaattaattggaggaacatccttgatctccataagagaaatgactgtcgggtatgcgcagggctggaagggcagcaggagacaagagcaggctcagatctgttaaaaacctaagactcatgcatgtaattttaagttatataataccacaaggctaatactggggggcaggggagtcccctgctccatttacaaatcctgctccctaaaggcaacactttcaaatcttttaggtatttcttctggcatttccctccatttttctacataacatgctttatagccgtttcttgacttttccatcttagacagtcattgaatccattgactttctgccacagaataagattcagctctgtcatacacacccatacaaacacgcaacccctctcccaccctcccagtggagttatattacaatttgtggttaaatcatttaaaaaagttttaagacacgggatttggctgtgtcgcccaggctggagggcagtggctattcaca

SEQ ID NO: 80134 - DNA, 1023 bp, Homo sapiens
agggcatcactaaacgctgccagtggtgccatggacacagctttgaatcccaggtctgccatctctaagtgctgtgtggtctgaagcaagttactcacctctctgagcctgtggtctctcgtgtgcaaagaaattgaattcttcttgtaagattagctttgtctttgggtgtgagcacccacatgagctgccacaggccctgggccagaggtggcagaaaaggctgggaaaggaggagaaacagcaggtatggatgacctgaatttatctaacttcgccccctgcacttgcacacacacacacattctgattctgtgggccccagaatctgtattttaacaggtactataggtgattctgatgtagcctgaagcagcccaggtctcatgtctgggaaaaaccactgtgggaaaggagggtaagatttgtaacctcatgggcctaaattcaggtctcaaagccaatgttgaccctgaaaaaagcctcaattactccccttcccccaagtacaaaactgatataacaacagtgagccctgccctgcccagctgccatggttggaggctggctcatgtgaggctgtgcatgtccaaagtcttttgcaaactctgaagccctctatgatagcttgatttctatccctgggtgccacagaccctccacaagcctccttttagccaacataccctgcctgtcagtgcctgcctcgcagaccaagcccttacaggcagtgagtcagctgaagctgaccttcctgggctgcgtccctgcctctgactctccagtaacacgctccgtttcaggggaagctcagcgacacagtccaccacctcccctggggcctgaggctttgcaaagccagagaggaaagggctgctgagcagaagcaggatattttaggaggctgcgaatgcagaggtcacagggacagatgggaggacacctgcagggcccatcgatgcaggcacagtcttgacagaatttttttagggcaggaaaggaccttggggaccacttggtccc

SEQ ID NO: 80135 - DNA, 1172 bp, Homo sapiens
gagggtgcctgggtggggagggtagaggaggtggaggggctggggcggggcctggagtggctgccctcaccgcagctgcacgcccagccctgggctccttgtgggtgggctgggtggtgggaccaggagggatagtcttggctgtgaaatctcctgtgagtctaaatgcccaggcctcacccacgcaggtctcagattccttccttccaggaccgcgttgactggtccttcctgagactgcccgagtgggcactccctaaaaccctcccaggaggcccttcctggcagagacagcccttatcttgaaagtctcttctgaccttacccaaatgatgctgctcacctggggccttcccttctagggcatttgggacagagagaggtgagggtcctaggcagataccatgtacagatttgggaggattactctgcctgttcctctcccctactttctctccccagacaccaaacagcccctcattccagttccccagagagtagtattgacaggagacctacaagactgcttagctgagaccccctcagaggcaagattgaagttctcctcccaaccctgtagcagactctgtggcctctccaacagcctagatcctgaggggtggccaaggactctgaccacagagacgttgttgattgagggtgttccctaccccgatgtctggccagctcccaagtcctagtgagctagaggccagggccattggatgaaggcccaagaccaagaccccatgcaaatcctgccccacccttcaacagcacccagtccctgcaaatgagcctgtcatgggagctgggagccttcctgagcctggaaggaacgtgctccagattcttcccctctctgaatctaggtggattcttaaagatgggatccatgagcacttctcagtgccttcattaatgcaatgactttggcctggcatgcccttccttccattctcctggttaaattaacttcacctttaaggcccaagtaaaatgccttcctccttgggaagccttcctcagcctcctccccagaatactcttctgtacactaagaacacttaagtcatcccacaagtattggcccaagcaccctacattccaatgtattcagtctgagccttgcttccccctcctggcagggagcaggactgcagttcagcgga

SEQ ID NO: 80136 - DNA, 1047 bp, Homo sapiens
agtttgcaccactgcactccagcctaggcaacagagttgagactctgtctcaaaaaaaaaaaaaaaaaaaaaggaaaaatcagccaaagcccaatataattaggaaggaaagcctgggacagaaaaaaagaaatgtgtgaggggtgacattccaaggccaaattggtaagagtttgcgattctctgtgaaagaatgcaaagtcttcttgtaattataatgatggtagtttttagtcaccttcagcagagttgataattgactcgctgcagctctgcctcatttctctgtcattgctggagaatgaggtgttttaagtgaattttctagataactgaagcttatccctgtgaaccctaacattgtttttttttgtttaatcactctggtgggaaatttctctggaatgaattacacacttctctgcttccttaatcagaatattctaaattgaatgtcacttcttcctgtcaatttggatatgagaggctatttgcccctatattaatggctgcaagttgctttgctttttttcatctataaatgtttcctatttccatagtttcttactatgacacagagctcttgctcacatactttttaggagccccataaaacatgcagacattgtcctgagccacaatctcagcactttgggaggctgaggcaggtagattacctgagatcaggagttcgagaccagcctggccaacatgatgaaaccctgtctctactaaaagtacgaaaaattagctgggcatggtggtgggtgcctgtgatcccagctactcgggaggctgaggcaggagaatcgcttgaacccgggaagtggaggttgcagtgagctgagatcgtgccactgcactccagcctgggcaacaagaacaaaactctgtctcaaaaaaaaaaaaaaatgcagacacaaacatacacatgtgcatatacacacacactcacatgccagtctgtgttgtgagaaagcagagtgccaggcttaatagaattgtgtttacatgtccttctataatcccctgagctgcccttattag

SEQ ID NO: 80137 - DNA, 1047 bp, Homo sapiens
gccctctgtgccttcttttcttttcttttcttttcttgagacagggtccacctctgttgcccaggctggagtgcagtggcacaatctcagctcactgcagcttctgcctccagactcaagccatcctttctcctcagcttctggagtagtagctgggaccacgagcacgtaccaccatgcttggctaatttttgtattttttgtaaagataaggtttttccatgtttcctaggctggtcttgaactcctagtctcaagtgatccacccacctcagcctcccagggtactaggattacaggcgtgagccaccacacccagcctgggccatcatttcttttgtttgatgtttaccctagcatgcacacagggaaattattcaacttttccctgacaaggagaacctagcagggaatcaaaatatttgaattgagggggagccatttcacttgcctctggaatatgctatgtggtataaatgtgtgactttattttcctgagtttgtcccaagtatgggcttggctgttgcttaaggctaaacattgcataagcctcatgctgctagtgatgcatgtaaacgctgccgtcaacataaggtagtagccagggctagccaaagtgcctggtgactcacgtgtgctgacctatgagtcttcctaagttagcacactcagtgctggcacggtggaccctcagccccaggcaggtcaacagcgtgcagccgctgaatccgaacctgaattagccttgctgttagccactgagccaagaggggaagaattcaaaccaggctaatagaaagaatgtggtgaggtaaacccctgggtgagggagagggagggggcttgtgtttgtttgcaatattggatcagtgggctcaatttcctctgcttccaagggaaagcatgaaggtctccctcccattatgtgtccacatgtgcacgcttccctttcttggagactggaggggctgccagcagggagctgcccttggctgtctcccagccataaagcccacctctccatgttcactgctctgctctttaga

SEQ ID NO: 80138 - DNA, 1712 bp, Homo sapiens
ttccggaaacagcgccaggccccctggaggagccggtctgctgctggctgcggggctggaaggggcttgcggttccctagcctccctcagagctgctgggttcctggaggagaggcttgtgctgcccccaggggagggagggcaaaattggcctaagaccaaggcagccgcaggaggggccagcctcttgcaaatgaaatattcatgggggttattgaatcaagttttattggaataaaaatacacttgctgaatacatttatttcccctggttcctttcaaccccattccctccctgagtgatttgatttgggggccacagaaggtttttttccccaagtaaattagacttcgttcagcagcagaaggatgccatgtcaggattggtgcttggcaaggggagtgctgtctgcggcctctgggaggactgagggcccagaagggaagggtcaggaggtcaagctcctggttcccacgcacaggccctgtcaccaaaatcatccacactcgctgcaccctcccctctttcttggcctccctgccccttgccacttatgagggaccaagcctgacgtgtggagacagggagagtcccacaggcctggagtcgtggtgatgggcctcactgtcagatggaccttccgaagccatctaagaggtccccatctggggggcagagcagatgactctgccctctctgccaaatctctcttctttctgcgtttctcctcctcaccttagcgttcttggtttctttctcttctctcctgctctacacatctcattctggcttcccggcctctggcctctctccagggtcagtctctctccaaatgtttcttttggtctcagtatctctttggctgtgtctgtgaaggtctctttttcttcctaacctcacactcagcaccattccacaaccccacacacactcacacagagtctcatgcacaggtgcacacttgcacacgcagacaccctcacccacgcataggcaggcacccgctcgcacacactcacacatgcgctcaccagcttgcacacgcacaccctctcccacacagtcattcacggtcgtgggctgctggctgactcagcagatacagccagggtcttctgtccccactccctgccctagagtgggcatctggggttcaccttactcttcatgcactgcacagaaaccacagcggggctgagtccaggccaccctgtgctgcctgtagccccactctcttatttcacagggaggagtcggaggggagagcctagaggaaggagcccagccacaggtgtcacttctcctgaagagcacagctgggcaaggcggaaggactctcccaaatgggcagggccactggctggctggtctgtgccctgcttagtgactggaatgagatgggaggggcagactctgaactgtgctgggggctccatggaccccgagacagtcaggcacccaagggagactccccggctctgtggcccagccagcctcatcctgtggactgcccttccttttcctgaggctggagggaccctgctggggtgggcactgccccatcacacacatgttggtgccccagtgcccttcctccccgctccctctcacattcaccacttgactgtttctggcttcaagcccacccggctccttccctgaagtgtgacaatcaggctctttgcctgccctgcgagcggctccttccctg

SEQ ID NO: 80139 - DNA, 1004 bp, Homo sapiens
aattagctgggcgtggtggtgaatgcctgtggtcccagctactccggaggctgaggcaggagaatcacttgaactcgagaggtggagattgcagtgagccaagatcatgccactgcactgcaacctggcaacagagcaagactccatatcaaaaaagaataaaaaggttgaggactgtgtgtgtgagtgaggtaatggatgtgtggtctgaggcctgtatacaacatgtatgggatatgtcatgtgtattgacatagcatgggtccatgaagggtagatattacatgtgaggtttctgatatatatgcactgggtgtgatgtggaaatgtggtatgggctggatatgtcatgtgaatacctgccattttgcatgcggcaggtacatagcatatgagttgcagacgtgtggcctgtgtgcacgagaagtcatgtctgaatctctgtgtgtgctcaggtgtttgagcctgaaggacattgtcactgtcagaagcaagattgctgagaattcccatgacattgggcagaattatgatcccgcttagcgctgagataacattggttggagaaagtatggatgaaaaatgtccccaggaatagaaaaaggagttacactggcttagcagaggatgagctggtgctggggagacagggaggaatacttgattaaaactgaaaatatctgttaccaggagggagaggtccagaggagggaaagggacagctcagcctagaggagcgcaggagggaagagtcataggcagtggaagccggaagccccaggaggggcgttgatgttggtggagaaatgtgcaaagaggaaggcctgggagggagagaggaaggcacagaggtccccactcagctcccaggacagaggtaactcatggaagtcttgagtagggggcaggtggcccagggcccacctagaacaattcttgacatctctgggtctgcgcccctcaggggaaagaccccaccatcacaccaccgttcatcagtcaca

SEQ ID NO: 80140 - DNA, 1021 bp, Homo sapiens
tgctcaagggcgatgtttttcggtggagtgatgcatcccatcgctgccatccctcaaattctatcgcataggtagtcacctcattaccctgtagaaaatggacccatttatcattcatttctcctttggtagggctgaggtggagcccgagactgcatttccagcaagttcacaggagacagtcctgctggtgctgctggcctggggactgtaatttgagaaccattccctagactgcactggcaggagtatgtgccctgagtgaactgttaagccctacaggtgcccaagggttaaactaagccttccctggaatgcccacttcttttttcccctcctgctttggatccaggtgctgctcggcacagatgccagtgagacccaggtgattggatttgtgaacttggctcaatttctcatcatctgccctaggaaactgcattataaggtgggaagaacacaggactcagaggcagaaccggggttcagcctggtatctgtttcataataggtgtgaccttgggctgctagtagttgtaactgaagcaatggggacttagcttgcctgggcctcagttttttcatctgtaaaatggggacattactgttctcctggcacaccgcccatgtttttatgggatgtgcttgaacagcctcgttaaattaaagtgccgcaaaaagactataatcttattatccctggtgtgaaaggagaggaaatagtgaaaaacagattctaacatcacaaagatgcaaagccttagccactgaggggactttagggcatcgctcccttaaccatccctcgattttataaaggagaaaatggaggctcagaggcaggcagggaagtgacatgcccatggtcaaatagcaaaaccaggagaagaatccagctctcccctgagccctgctctttcctccataccaaagtatcaacatctccccaaacctgggctcagaaattctgctttttccgtcaccccgtctttgaagagaagccaggtatgcacctcaattt

SEQ ID NO: 80141 - DNA, 1030 bp, Homo sapiens
cccttctctcctattaccttccttagtaccaacaactactctataaggtatgtattattttccctaatttatggatgggattcgaacccaggtctgggtgatgctagcaactatattccttccacatcaccttgccatagtggagatgttcattgctttgtacaagctccccaagggtcgaggtttcctctcctttctcagattagacccagatcactgcctcctgtgggaagcattctcaaaactttcctccatacaccacccactacaccaagcaccccttgcatcttttcagtttttgtttcttaaaagccttattgaggaatatttcaaatatatataaaagcaaaagaataatataatgactcccatgtcatgattaccccactccctttcccccttgcccaggcatcgtgctggttgatctgtaaatacttcagcatttatgtggtcgcttacttctgttcatccttcccgctctggggctggtattgggtctttttcatcttcaattccccagtgctcagttcactagaaactgggtgtgtctgttgagtgaataaatgacagagtcccatgtggggacatgagtaggttcctggtgcctgtcactgccccattacagcttctaaagagtctggcttctcagcagggccagttcttctgggtaggacgttccttagattgcagtgtgtgaaaacctttctgttgtggtcatctgggactctggatgctgataaagccttctcaaatatggcttcttttgtgtcaacatcacgcgggcataattacattcgctgtgcaaacacacaggcgaagggcctctgggccacgcagtgtggtattatcgtggcttctgcccagacatccctcagaagtcctgccaggagagcagatggggccagttcagtcccccaggacgcccccagcatcccagctggcctggcaaggccctgttctttgatctgatttcagcccaagaggacccacagagctggtcagccctgtggccctgctacatttctgacag

SEQ ID NO: 80142 - DNA, 1903 bp, Homo sapiens
agcttgtgtcacaggcaagatctttacgtgaaaactgtgttgagtcccgaatgttaccaaacattataaatagcagctggtttgttttccaaatgctctatgctctgaaatgagaaaagaaatacatagaaccaaagaggctgtttctgtccccccgattctgacacaccagcacaaacacacgctaccgaacgaggcaccctcgtgcaattatgttgtggatcacgtctgaatatctccttgtacatgacatttacgaagaaaaacacttgcaaattaaatgtttgattaaattacatcttttacagtgtaaaatgggtgagcataattgaaagctgcattagctaaagaacacgaactttatatgagctttatcctgggcctacgaatctcgatagttttactgaatccttagtgccaatggcccagagtatttatgcattacatctcgtaaaataatctaaaggttcagtagtgtgcagccttatcagagctaaaccggtacagtttgaccacgaatcttgtctaagggcagtgagcacttgccggtggaattgtgggtgtattttatcaagagctaacttggttagtctttcttgtgtggttcaatacaggagggatggctacccagtcacccagattctaagtctgtactcacttttccagattccatgtctacaccaataatagcatctaatttactgccggcttctagagaatagcctcttttataatcttgagatgtagacatatactttctggactattcccttcttcccttttgtatttcatccttttctcttctctttactatccctccctctctttccttcgtttccacctttaatcttccctttaccaccctcataaccctgccttttcctcaagtttgaggactgcatcaaatttcccaaggtagttccctatttaagagcacctctcaatgactgtgtgtttaaaatgaagactttatatagtagagtaaggccctaattccattatctggcctttcttgtgatacttttaaaagaatacctctgcagcccaagtgttcaacatgtgtgctcactccattttccaggccgctcactctgcccaggccaatggaggaaatcttcatccagacacccctggaggtgatttttaaagaccgagttagagtttgccaagtgaagaagccagagtggggaagggacattctaggcagtgggagcagcacattcaaaggccaggagttgggaaagggcccaggtagtctgggaatgttggagagtctgtgggggcaggtggagatgaggggctggagttgactctggagggacctgttaggatcaggctgtgagaggccctcatggaggagcctgcagagaattttaaaccaagaggggacctgatcgcttttgtgtttcacatggttggctagagtacagggtggactgccagccagtggagagcagctggctaggagctgctgcatcaacgcaaccaggcaggcacttaggagacaggggctgggccaggcagccctgccaggaaggcttcagggaactgagcagagctgggaactggggacccaagagggcaaggatgccagccaggaggggagaactggcaaaagaaaggctaaggcctccagtggagatcaaaggggtcagggaggccgggcatggtggctcaaatctataatcccagcactttgggaggctgagctgggcagattgcttgagctcaggagttcaagaccaacagcctgggcaacatggcaaaaccctgactctacaaaaattagccaggcatggtggtgcatgcctgtagtcccagctatttgggaggctaaggtaggaggatcacctgagcccagggaggttgaggctgcagtgaaccatgatcacaccactgcact

SEQ ID NO: 80143 - DNA, 1040 bp, Homo sapiens
agatcttgatgtttgccaagtggaaaagacaggaaaatcaatagggggaaaaaatctcattttcaagcctctaagcaggtattgcaatcaataatgcaaagagccgcaggaggccattaagccacactcggcagtgtcctcttggacgcaggaaatgtttgctgagcaatgggacttcaagggcacctcagtacccacccccacctgcccaaggaccacggctgtgggctgtgtcttttaagggagctggtctgagtctccacaagggaaacgctacttggaagtgagttagcccatcccccaaccagtgcggaccccagtgcagtggaccctcagatccagacatgcagagcaaaggacacaaaagtgcagggggtggcatcccatctaacttggccacaggaggtttaccaggagttgacacttgccattttcccctttgttttttatttgctcctggagataaactggatcttttttttttttttcaccatcatagaataaatagactcctggtttatgttccatcatttcctagcttattgtgtatgctgcaaagtttcatttttccatcctatttctgataactgccaaagaatattaggtgctctggtgggatgttagggacgtgtgctctgacaatgggtgcatccccctcctgccccacccgtggcagcatttgcttcccctcttgcctctgagctgtgactgtgcttttaaaacctgctgggtctctatggacacaagggccagtgaatcagggcttattggcatggcactgcatggaccaggaggaagagggcttagaaggagacctggtgccttccagacactcccaggttggggtgggagctccaggctctgactcacagtgctcccagcctgatggaggaatctagaccctgtctataagatgatggaacaatagcacttaaaaaaccatataaaaatcatctcacaaggccgggagtggtggctcatgcctgtaatcccagcactttgagaggccaaggctggtggatcacctgaggttgggaggt

SEQ ID NO: 80144 - DNA, 1137 bp, Homo sapiens
gtggaaacagtaatgttgatttttcagggctgtcctgaggctctaataaggtgacagatgtagacagtggataggaatgcattttactgaggtactaggcatcattactgttggtgaccaccgtgtgggtaataataactgcagtagtaacgtacagggatttagtcaaacattaggcccgagactggatctgaggtgtcatcaaacattagacctgggcaaagcttcataaatccatctagttcattgtgtaagtaatagctttcattcatcctgcacttgtgatgcaccagacaccgttctaagcactttatctgtattaactcattgaatcctcatatcaaacctatgagttagggatgaatatgatccccattttacagatgagaaaaccgaagcccagagagatagcaaggtggtgcagctgggcgcaggcagattagctccccctgtgaccacgctccaccctcacacggaggagaactggaatcaattgtgggtgacaggcagatggtgcctctcctttctgggggtctctctctctcctgattgctggggccacagagcatcatctgaccccaccctccctgcagcaaaatggaaacacaatggtttgtttttgtggggcttgatttttgggatgactccaagcctcagcccggtgggctgatcagggaggtgcattaaggaggcaggctcagccctctggctggcatccagagacctcccagcccccctaggggtgtggcaaggagatggcagggactcgcagccgtggagcttggtgtgaccacagtgcagcaggtgcatttcagacagacctgtagtgagcagggtctccacttggacgcaggccacttggacccagggcgggcagccagggaggacagcttggtgctcggttataatgtggtcttccaggttttgcacaacatgctgatgtttgttgtttttaaaattatcattgaaatagccacataaaaattttaaattcctatagattccccctgggcttccagcaattctagagaaacactgccttagatggatcccagcatgccaacagtggggaggtggtggggagggaggtcagcaaccaactggggggctctggtgtttgtgctgggaccctaagag

SEQ ID NO: 80145 - DNA, 1088 bp, Homo sapiens
ctctggttgatgccctctgccttccctccccaacccctcccacacttgggaggtggggaggctactgaaacgccaattgggccacacctgtgtccctgctctctattgcctgccgggaagtgctcatctccttggcccggccttcctggcccctctggatgtggcacctgcctggctttcaacctcatctccctcccatcattcccacccttgccctctttcatccactgacccattgctcttttgctgtcaaagcccagcacagatgcccccctgctgtgaaggttccctgattcccaggggcctcgactctgtacatggccaggcggtccttgccaccctgggcagttttggtttgattgtgtttgtctccctctcacccgtatcccctgaggcctcttcatgcaggacccacgtctttcttgtctctatgacctggagcacctcatgctgcctggcacatggaaggtactaagcagtgttacatggaatctggtagacttgctctcctgtcttatcacgtctttcgttccttctggaggtggaggtgggactagggaagattatggggctctgggttggatgcttgagagaatgcaaagccatatcacgtgatcttccaatgcttctcacctatggggagtagggggccagacacgtgccccaagaattgcaatatgaggccaggagtcaaattggtccttcagaggaagcagagatcatatcctgtggagagatcggaaagatgctaaaaatatggtagaagcagagctcaaagaaggatgagatgtgaggtttcagtcatcagatatggaaagagagggtgctccaggcaggcccacccacatagcaaaggtgccagtgctgagcaggtcagtgtggttgaagcggaggcacccagaggagtgggagccaggctggactggtgggccagggcaggtggcatggtgttctcacaccaacagcccaaggggctctggcattattctgtgggcatggggagcccctgaaggcttatttttcatctactcactctgcagcgtttcctggtgggcaaccttttaactctttcttctcctaagtagcat

SEQ ID NO: 80146 - DNA, 1019 bp, Homo sapiens
gattccttacggtcccttaccaggtggtctaggcctggcatccctcagtgggaatggcatgtgatgactgcatcactctgggcagaagtagctgataccccataggagacagaagaagcaagatccagtcttccatggcttgtgggcccagagctcagggttttcttggctcatttccccccaggtccacaccagacatcttttttctctttctccttggcaggagggagtagggaaaggaagtagatgggcaaagaatgtcaatgatgagggataagggaatggggagggcattccctttaaagcagtccagatctggggtccctgggtccaaggatgggcccgggggcctgaggacaccctgcaattatagccgattttgcacttgtgggcattttcctggagagaacatctatacctttcactggattctcagagcagtccctgagtcaaaaaacattcagaacccctggcctagaatttggactttttcctgactcaggcttcccactctcctgttactcagaaccagtgaactgttacagtgttagtcaaagcctgcaatgtgaaatatcaaatgctcattacccacgacgatgggaaactaagtagttgccaggaacatggtctgatcacagacgcagcctcctttgttctcctgtgcagggcccgggatggtgctctccctgacggggctcattgccttctccttcctgcaagccacccttgccctgaaccccgaggaccccaacgtgtgcagccactgggagaggtaaggtgtgggcctcagatggccaggcactctctgggggatcgccctgggcatggcagtaggggacagaggcagtcaggagatccaggagctgccctctaagggtctgcagcctggctggggagatggcccacatgctgagagacaggacagagatgtgtagattctgtctggaaggtcagggtggaggcaactcacattaacttcagttacgatgcactgtcctacccctccctgcactagcact

SEQ ID NO: 80147 - DNA, 1154 bp, Homo sapiens
ctgttaccagaggtttataatagaacagccccacctccatctctctgcagcccctttctgatctctggccttatccttccctttggggaggctttctgggtgatagcctattccatctcaagatgaccatggaaataggatttgctgatgacttttaggcttgggccaggtatatatggacttggcagttttcgtgggttctcaatccctgtgaaataattgagaccaggccagaatgaagtgtcaagtgtggaccacaaagtggtgagcagacaacccatcaccaggtgccttgaaacacagggagaggattctgcctcaggagacagaggacatatgggagcatgtctcaggctatagaggaaggcagggtcggcccctctgaggactgttctggagcagaggcacttgaccatccaagagaatattgacttgagctgccaggatgggctgttgatttgtggcaaactgtccaagggtggtctctgcaggaagcaggtggtcagggccttttccctgcagtgaatgactcctgtgatggtagagggtgagttggacccttcgtgaacagctcgcagggctcggagttgtccctgtcgacctcactggtctccttcctggggaggggaggggtaatggtggagggaggcagttcacagctataggagaaactccagtagaagtttattgactaaataatcaccttctgttggctgggtgtggtggttcacacctgtaatgccacactttgggagattaaggcaagtggatcacctgaggtcaggagtttgagaccagcctggccaacatggtgaaaccccatctctactaaaaatacagaaaattagtagggcatggtggcgggcacctgtaatcccagctattcaggaggctgaggcaggagaatcgcttgaaaccgggaggaggaagttgcagcgagccaaggtcgcaccactgtactccagcctgggccacaagagcgagactccatctcaaaataaataaaaattaaaaaaaaattgccttctgtcatgaaggacttatgtaaaaaagagaggctttgggtggaaacttggaccccagatctattggtttggttggggtttgcttgtggtagagatggtctagggtttggcattttcaataggtgcact

SEQ ID NO: 80148 - DNA, 1034 bp, Homo sapiens
ttcctgaaggtctgcgagttgctttgggctcttctgctcccctcctcccacgtgtggtagaagttccagaatcaccaacctccagctgggcggaatggctcatgcctataatcccagcactttgggaggctgaggcaggtggatcacctgaagtcaggagttcaaggccagcctggccaacatggtgaaaccccatctctactaaaaatacaaaaattagctgggtgtgggggcgtgtaccagtagtcccagctgctcaggaggctgagaagggagactctctagaacctgggaggcagaggttgcggtgagctgagatcatatcactgcactccagcctggatgacagagagagacttcatctcaaaaacaaaccaaaacaaaacagagtcaccaacctcctagagctggggctgtgatgcttcccgggctgacagattgaccctgttttgagatatccggagagtgaaagtactggaaaattaattagcagcagtagacactggctacccggaggctacaggaatttatggggtttttgtttcttttttgtcatggaataagttttcagcatgtgtgttgattgatttcctgctaagttcctctctgtcttaaaaaaaataaaacaactctcagagtttggagtccgttgaagcatgttaatgaccttttttccgaatcacttcttcttggtattgtgtctatcccccacccccactctccttctctctcttttgcttctgactttcagacaggcaaggggttggtccctctgaagggctgggacccaggacccgggtgaggcaagctgaatacctggggctgaaacatttaaggaggcactcactctcagggtctgcaaatgcagggtcagcatctgagagtgcgggcttccttaaatgctgccctaggcacctgcttgtcttacctaggtcctggatttgctctcctgactgctgtgcatgccacattcaggggaagaaccaaacaatatctggggaattcaggtgctaaaacctcatggacagcaacaa

SEQ ID NO: 80149 - DNA, 1042 bp, Homo sapiens
tggtggggcttgggcagaaggtctggctggttgcccaaggggacattcctctaggagaacttcagtggagcccttcctcatttaggagcaaacagattagtattcatggaactcacaggatgggaggtcagttcctctggactactgtgaaaagaactttgctctcaattaccagggctgataagcggcagagacacagcgcccctcccccagcattggcactaaataaaaatttaattaagaaaaattagtctatgcctgtggttcccaagggtggtctgtagacctgtgctagactgcagctaactttccacagatgagattaggaaaatgagaacagagaaagtgagttcttcatgaagctaaacatattcactattaaggactattctttctaagattggcatcctacatccctggtattcaggaaattgggatgatagtagaagttatagtagaagagaatagaagatgaccgcaaagtccttatgtggctaaataaaaagctggcaaatttctgccaggctcactaaagtgtgaatgtgtgtgcatgcgtgtgtgcattcaagtgtgcataaatcttactgttctgtgaacctccaaattctgaaaaaaaacaaaaacaaaaacctgagcctgggaggttgaggctgcagtgagccgtgtgagccgtgattgtgccactgcactccagatcctgggcgacagagtgagaccctgtctcaacaacaacacaaattctgtgaatcttcaaagtctgataacaacaggcaacaccaatcagacattgattcttagcttcttccccaaatggataacacattgtatctaatttttgcctaggtaatatgttactttgtttctaataataacagatttttgttaagataaaaatcttccctttggaaaaggagcaaatgcttaaaattaggttactttagcaaacatttacattttaatgaatatattctgttaaaaatcgcataagatgtaaatgagcgcagccggaggagctggtgagtggtcagctgagggcaattga

SEQ ID NO: 80150 - DNA, 1017 bp, Homo sapiens
tgttccagactccctcgtataccaaattccacacaaactcaagttctgtaattgaacctgcagaacccacgtatacaaagtcagccctccatgtccttggtttcacataccacaaatactgtatttttgatctatgtttggtgggaaaaaaatctgtgggtaagtggacccttgaagttcatgagttaactgtaaatgtattatagttagtacttatatacttatctaattattctattatattgctctcctagaggactgtaagctccatgagtttagggtctgcacctactttacttaaccttgtacctcttgtgcttaacacagcgtctggcacttagtaggtgctgaacagatttctgttgcatgaatcaatgaatgaagtcgaaagcttttgaaagggtccaggcagtcactgagcagctatatgaacacaaaggagtcagcttcagtctgagcccagacatctagagggaggatgtgagcacaacatgtagactcataatgggtttggagtcaaagaacaggatttttttccataactagaagtacctaggagtcttcacaaaatgttaaaatggtatattcggcatgggttctgcctttgtatactgacagtttgttaacacatggtactaatctgaaaacagaaatggatttaaggatttatatcgatccagggattgtttggttcattccagtgaatatttcccaatttagggaagattgggatgtttgggaatgtccttggtgctgccttggtgctgacctattcctctccatcacaccactgccactgccatgttgccaatgaatagctagtaccaaattatagaatcatttgatgttggtgacatcacagacggaggcaaaatgatatagtgcaaagggcgccacgccaggaatcagaagatcctacctattagctgatgattttaggtgaatcagattcacagtaatgctggctcctcatctccaataatgttgctcttcctgcctttatgggaaggctgagaa

SEQ ID NO: 80151 - DNA, 1033 bp, Homo sapiens
tacagcctccgcctcctgggttcaagtgattcttctgcctcaacctcccgagtagctgggactacaggctcgcaccaacatgcctggttaatttttttttttttttttttgggatttttagtaaacagggtttcaccatattggccaggctggtctcaacctcctgactttgtgatccacctgcctcggcctcccaaagtgctggtattacaggcatgagccaccgtacccggcctggaggcaggtttttaatggcaggccacatgtcagggtgtcggcagggagaggtgccatcattgcagagcggcagtggttcttttgttacactttcctttctagctgtggtttcacagctcctccatcacccctttatcccttgagcatcacccctgtccagtgctgcttggcctcagcacccctgggtgccgtgtgcctcatcctaccctttcttccccctggtgtctcctaccctgtgtcaatccctccctaccccaacaatcttctgagagcaactgtgggtgggggcttcctctgcagcctcgaaacagcctctccagccccacattctgcaggaggaggaaggaccagggaaagataacagtggaggaggggctgtgctcctgaggctgaggcctggaggaagaacagggcgagagggataggtgagctggacttgtggtgggatgagggagaagcgaggacctcagtggggtctgcggaattacgggacctaattacccaagcagtgagggcttctggtcttggtctgtcatcacacaccagggctggtcctttggagaccctttccttatgatcctgagtcacatggaggccatgtggtcctgactctactcgccaccctaccttctgaatggggtgtacatgcaggggcagcccagccatctggccttgggctcgtgtctgaatacttctgtttggcagtggggagggctgaggggtactttggatctcagtggcaataatctctagggacaacctgacctcacccaagactccatgatgcatgctgggc

SEQ ID NO: 80152 - DNA, 1041 bp, Homo sapiens
gtacaaccttgagaagacagaagtctgggcttccctcttggcctttgcttgtgggcccacagttggtgtttggctggagttgaatggctgttatccccaccacccccaagacaggatctcgttctgtctcccaggctgaattgcagtggtgcaattatagctcattgtaacctcaaattcctgggcttgtgtgatcctcccacctcagccttccaagtatcttggactatccaggtacgtgctaccatgcccggctaagtttttaaattttttatagagacagggtcttgctatattgcccaggctgatcgcaaactcctagcctcaagtgatcctcctgcctcagtctcccaaagagctggaactccaggcatgagccactgtgtctgactgagtggctattatctaaaagtttcttgtcttgctaagctgcccctttcttagtcctctggcaagagagagcaggattttgttggtgttttttgtgtatgctcctattggcatttctgggttcctagtgtctttagctccaaatcagggatatatggagcaaaaaaaaaaaaaaaaaaaattcaacccaaggaacacaccaccatgttgttccttggggcttaaagttcctagttgctttggcctcttccctctacctttcacagtcttcttatgtttgttttacatgtaatgtccaggggttttagttgtgcttagcagaaggaatagggaaaaatatgcttactttatctctctggaagtggaaatccttccttaaattttgagtctcattgtctcttgctagaccggtggtcttcccaagtagggaaatgcagaagaggacaagaatgaatgttgatggaggcccctgggtgctgtgtgcttctgcatgtgcaagtttattgagttctcatgacttggtaaggatggtttcattattccctctttacaggtacgaataacctgaggctcagagagagtaggttcaggcaggtaggcgggcctgtactggccttgaacccagtgcacatgccttttctaccacaggtc

SEQ ID NO: 80153 - DNA, 1023 bp, Homo sapiens
tgctctggccaggcacagtgtaatccctgtaatcccagtactttgggaggctgaggcgcagaccacctgaggtcaggagtttgagaccagcctggccaacatggtgaaaccctgtctctactaaaagcacaaaattagccgggtgtggtggtgggcacctgtaatcccagctactcgggaggctgaggcaagagaatcacttgaacccgggaggcagaggttgcagtgagccaagattgtgccactgcactccagcctgggcaacaagagtgagactccatctcaaaaaaaaaaaaaaaaaaaaaagtggccggctcattttgggcatatctaactgcttctgaggtctcagggagaggagaagggttggcggccatatccttaccaaggggtaggtttctctggtttgggagccatcttggggcctctgaaagttccaggggatagtcattggcagtgttgccctgggtggaggcacttctcagcttagctcctggcagggtggagagagcttgctgagctgaatcctctgaaatggcactgtctaatgttgtagctactagtcacatgtggttatttaaattaaaattaattaaaaataaataaaataaacaatttaaggctgggtgtggtggcttgcacctgtaatctcagtgctttgggatgctgaggcaggaggattgtttgaagccaggagttcaagaccagcctgggcgacatggcgagacccccttctctacaaaaaaaaaaaaaaagtttctggatggaaaaggagatatatcatgcaaacactaatcagcacaaagcaggagtgcctatatcactatcagacaaaaagttctgttgggctgagttggagattgccaactccacgagggcagaaattttgtctgtgttgttcactgctgtgtccttaccgtctggaagaatccctggcacatagtaggcgctcagtatttggacacttgaggagtgctagccttgatgctgccaccatctttctgtgtgaacggggacacactg

SEQ ID NO: 80154 - DNA, 1043 bp, Homo sapiens
gagcctcggttgagaatgattttcaaagtctctcactgaagttcaaagatgcatttctccagccagaccagtaaattataggagcaatttgccatgaatttccaatgtggagccattcctagttcctctcagggtgcagtcctctgtccctcattccctcctgccagtggaggtggagactgtggcctggtgtctggagagcatctcctcccaacattcactgaactgtttatcccaacccactggtcttcctggcccccaactctgttgaccctcctgttccccatttcaatcttgtctcgaacctgtgctgatgcctcatttttgagggtggggaggtccaggtcaattgtacactctggtacagataaaaccttgatcctgagtgtatgtcttcacactttatttgtctgtatgataaatgcaatttctgcatcaagactatcagtcattttctgatgtgatctatgcagctctgcttgaattgaatcagctcctgtattattgtgacagtttatttggtaagaaaatgaaataagatgtgtaaattaaagtggaggtgtgctctgtgcaatgtggaggttcccagggctcaggtggtccctctgggggcatttccattctctgttctttctcctcttttttccactccttgcactgggctcacagctctactgccttctaagctcaggtctaagagaccaatgcgaagatacaaagcgatggctgagggaaggtaaagatgctgggatagtgtcaagagcccagcagataaaaagtgaaaacgcactgagactagaactcagattaagctttgtggtcttaatacagagggctgcagagagcgcgtatgagtgtgtgggaggaggcgttagagctccagatgagaggttaatggtaaagagaacatcaagactctttacctgtgcattccatgtgcttctgcctccctcctgctcctcagcccttgccatgcaggaccattgctgacctagggtagcaatccttttctttttccttctctgcacccctcccctccccta

SEQ ID NO: 80155 - DNA, 1018 bp, Homo sapiens
gggagccctggttgcaggccccatgagccctgccctggcatgcgggtgtgttggcagcgtttggggatcatcactgtggccctgggaacaggcttttagcttaattcaaccaagtgtcttaaaatggcaactcatcagttagctttcattttgttcctttctttaatgtatctccctctagggatgaaccacattgatgtaaatgctgggtgatttttcccccatttttaaattttggggacatataggtgattgtcgactgtaacaacccagccaaaaccaataaaagtatctctttccttcattgaaagaaagaggctcccaataaatcctgtaaaatggcagtgcttgtgcccttttctgagaaggatgctggggacatgtgccaagagctgccgagagatcacccagcaagttattggcttcaggacaccgaatttcccacaaaataacagagaagctgtggggtgaatagggacagggacctgacccttctccattactcagctgaggcccaagcctctctctggggagggatgcttggggcctcagctttctggatggttcctgggaaagttggagtcaggaggcccgagttctagaagcagctctgccagggactggctgtgtggacagaggcaaatctcttcccttctttgggtccccttgggtctgacatgaaggattagatgaaacaaggggcctaatgtcactccaaattctgtggtacccacaacatcaggcttgtctccatcttggccatgaaaattccctttcctgtgccttaatcccctggccaggtacttctgccctggaagatgtgaacacatatttgcatgttggccacctctacaaagaaagtcccacactttagtggggatacagagggtctttttaacatcaaacaacaagttctgtacctgggaggagtgggtagtcagttcttatcacaagcctcagctgcatagctgtccttttgtgaagtagatgttggtcaaacaccacatccaaaggggcc

SEQ ID NO: 80156 - DNA, 1126 bp, Homo sapiens
agcactgagataccaccgacagtcgatctgatagccaagatggccactaagtgaccaatgggcagggggcgtctacagcgtggctacactggacgaaggcatgattcatgtcccgggctggagggagtaagagggcacgacatttcatcacactactcagaattgcatgcaagtcaaaactcatgaactgtttatttcttgaatttgccatttaacatttttggactgtggttggtaactgaaactgcagaaagcaaaactgtggataaggggctgctgtatgtatgtgtgttcatgtgagtgtgagtgtgggtgtggacatgacagtgggtgggagtgaatgtgtgcatatgagcatgtttgcatgtgcctgtatatgtatgtaagctgttacgtgctgtgtgcatgcctcagtgtgtgatcttatgcgagtgtgtgcttgtaaacatatgccttcatgtgagcatatatgtattcatgtaagtgtgtgtatgatagtgtgcgtgtgtgtgtgagtgcatggggttgtgtgcatgtgtctatgattgtatatgtatgtaagctgtttatatgtgcatgtgtgtgctcaagtgtgcaggaccatatgtgaatgtgtgcttgtaaacataacgctggtgtgtgagtgtgtctgccagatgtgaccagatgggttaagcccactaggttcctgcctccaaagggcatcattaggaagcatttgaattttccagacccagttaaggagcctggtaaggtagagggtggcaccacccactgagcgctggtctccccgctcctcactagggctcttgaaggccatattacctacggagaacagcatcctcagccattgcctttctgggcagagagctggtttttattgccactcttaggcaaaatggagtgtgggtggtgggcaagcatgctgaagaggcctctttttcaggcagggctgctgcctcttccccaggatgggaaatggctcctgcaggtttgagccttggctctgctccctaatgggcacttggtagaggtgctgggccgtgaccaagtgtgaatccatgccaggccactcaccttggctgggagagcagatggcagggccgggcccttctggctggctgct

SEQ ID NO: 80157 - DNA, 1011 bp, Homo sapiens
aaactggaccatgtccctgcctgtcggaaaccctttaacagtttcccattgccctcgggatgaagtcaaaactcattagcacagagtcaaggcccagcagcctcaccccatcctctataatccaccttgcacttgatgcttgggtagcaccaagccgcttctggtcctccctcctccagaacacacagtgctgtgtcacacctctgtgtctttgcatatgttgttttctgactgcaaagcccttcctaccttccttatgtggctgactcttactcatcctccacaattcaacccagacaccatctcctccaggaagccttccctgaactcccctccctctggtgggctgagtgacttgtctttctgttctgactctctgtgcttattatagtcaaatacactcaacactgtagtgagagcctcaggaggagggacttggtcaaacagggagccagtacccagtgctgtccctggcatgtagtagggttaaagatttgttgtcacactgaaccgggatagtccttgtccttgatatggagacttgatgcttgcctgtggctctccttgacctgtggggaagaggtgggatttggcaggcaattttggggtggactgtgagatgtgggagcccgggcagtcttgggacgcttccaggatcctgtaggaggacccaggctcttctggagtttagagaacatcactgctctgagtgcctggagggttttggcaggtattggggtgtagtgctgttgctcagaggcttgagaaacgaggatgatcctgggtagttgagacccctgggtaggtagtcagtttctattctccctcttggccatgtctctggatttgttacagattttgaccttttttttttctttgagacagagtcttattttgttgcccaggctggagtgtagtgataccatcatggctcactgcagcctcaacctcccaggctcaagcagtcccctcatctcagcctcccaagtagccgggaataaaggtgcatgc

SEQ ID NO: 80158 - DNA, 1024 bp, Homo sapiens
tcgaatcaatcctctattaccgtgcaaatacatcctataggatattgctgtattttcccttcaaacacttaatacataattaatgatattaaaatacatctaatgccacagaagataccagcctcaaaagcttcctgttataatttattcccacctagataaaagattgatttattggttcacttatcattcaggagtggtcctctcctggccatccatgggaaggggcggtggaggcaggaagtgcctgctgtgtggcagactgccctccagacagcattgagcccggcgggagatagccacgtgccagtgtcttcaaggattactcattcaattctcccaaactactccaggaaggaggtcctgttgttattccactctatagatggagaaacagaggccagagaggcagccccacttgcccaaagtcataatcttaggcttccccacaggacggtggacctggaaggtgggcttggcatttcttaccccttaaaacggcagccattgtcactactctgcaggagtatttgagaattagagataacagcagatgttaggcactaaaacatgctgctgacgtccttatttggaggtgaaatggtgagaccatcaattttaagggtattgttttggcagctaggtggtcttttgttggggggagtgagttggaaggagacagggtgtgggaccccactgtcatcaggcacacaccttctctggccgataagacaccatgagaagaaaccacactccagagtccatctgggagtttcttcatccaggcttcacccaggccctcctgtgaatcacgagagcgctggacttgggaatgaagataacgtggtccctggatgaggcactgtgtctggtggaaatggacagacacataactagtgtgacgaggtgtgatgggtgttagcatgcaggcaccaggattccaacagcccggggtgcctggatggtgctgccagtggacaagggaaggaggtgctgggtgagggagtggcatgtgacccatgcc

SEQ ID NO: 80159 - DNA, 1077 bp, Homo sapiens
tatctccctccctccctctctctttctttccatctgtccttctttcttcttctttttctttctttctttctttctttttttttttagacagagtctcactctgctgcttaggctggagtgcagtggcacaattatggctcactgcaacctcgacatcccaggctcaagcaatcctttggcctcaacctcccaagtagctgggaacataggtgtgcactggcatgccaggataattttttatttttttttgtagagatggggtctccctgtgttgcccaggctggtctcaaactcctgggctcaagtgatcctcctgctttggcctcccaaagtgttgagattatagatgtgagtcactatgtccggcttgcccctacttgttagtgctgctttgtgaagactaaatgaagatttaatgttctgcaccatgcctcacacaaaggcattcaggacatctaaatttctttcttttccagatagatttatttgactggctgcagttgtcagtatggctatgtttgtatttgtgtttgtgtttccacttgtgtctagattggtgtgtttctctttgttgtctgtgtatgtgctgctgttatccacgtgtgtatttctgagtgtggtggtgtagatagggatgtgaggacgtctgtatatgtctttgtgcttgtgtctttgcgtgttgggttgagtagcgtgctttgtgcctgtgagcagctgtgtctctgtgtgtcagtgtttccatgatggcatgactgctctatgtgtgtgtgtattgcagggctggtatgcccagagatctccagggattcaggaagcttcacagtgcacaggagccctggacctgggtcccctctaaggtccctatggtgtcctcctccccgcaaaaaagcctcctgcagttcctggagaccttcctaattgccctctgtctgttttcctctgcctcccactggaggcacatggggcctaagaatgcttccgaggtggcagggcccctggtccatttgcattcgtgtttgcatatcatttgcattgtctatacagactgtgctttcagttctgcagttttcaaggtaa

SEQ ID NO: 80160 - DNA, 1050 bp, Homo sapiens
aagaaaagaaccataaaagagttgttctcctaaacgccagcatttttcatctggattctatttatcgattattttatagttgagagggagcaaaaatccatgtttttatagcaaataaagctggctgcagtaattatgcaggcttaacatgtctgttctggagcaggaagttggaattcagcctgactctcaaacatttgggtgagatctaattgaaaaagacatttcaaagaacaaatatttaggaatgaggagtttcgctgatggtctctctgggccaagtgtgagtaccttgcttttagtttgatcctcagaggtgggaggagactatggagaaggacctggtcagtaatgttgagaccacagtcaaaatgtgaggctgaaacttaaagataatcagtgaggcttagtaaagggaagaaagatgccttcagggaatatatcccctgtacctggtgagcaaggggaagatcaattaatcaaatatagattgaatacttattgaatgccaaaccttgggataggcacaatgagggcaggggccaggactttactagttatatatcttttataatggttagctcaggtatccattgtgacaaaagcccttgattggagtgggaatgaaggctgcaagtgacagagaagctgaattcaactggctgaaacaataaggaatttagtatctcccataacaagaggtctgggttatgtctgccctatagttggttctttcagtttgttcaacagcatcatgaaagatccggatgcttttcatctttcctgttcccaagatcacaagatggtggcaacatttccaggtgttatatcctcacaatcatgagcagaggcagaaaaggcaggagggagtcttacccagaagcccctcagcagactttcccttttgtcttattggctagaattgtgaatcatgtgtcacgcctaagtcaaccaccacaggcaagagaaggaagtcattgtaattgacctagaacaattttttttttttttttggagacggagtttcacttttgttgcccaggctggtgc

SEQ ID NO: 80161 - DNA, 1052 bp, Homo sapiens
cagagcctgcggggacgcagcaggttttcggcggcggccggcgatgcgccccgcggccgctaagccccagcaagtgccatgcacgcttttgcttttgggagaagggaggcggaacgtgtatccccctatttctttcccatcccatagccgttactctattccgggaagtccaggacctggacggccttgttggttggctcccaggacgatcctcctgccctagactgcgaccctggctcccaaagttaaaggagaagcaagtgactctctgcgcgcgcctggagcgtggtcccgaagttcccaacttctcgcccagccgtgggcggtagtgttggaggtggggaaatgggtggtggttgtggctccttggagctgccgagcgcagccgccttcctcctggacttggtttattttcctaatttgttagaaaaaatactacttaaaaataggcagaatcgttcctcgagggcgtcaaggtccctgagtgggatgcagccgtcacctgtcctgagcccgggagcgccgagcctcggcgtggcggtgcccagagcccccgagcccgggcggcttctcccggacctggactcgcgggctccatccagcggcagccgcgtctcgggatcggtgccccgcagcccgcgctgcgaggccagtgtgactgtctcccgagtggtcatgttctccggaaaaatatttcaaagtggctccgcttcaggatcgcccactctccatccctccaagagccgagagaacagggcctgcggcgggttggaggaggcctttgggatggtttgggctcctggccatctcggctcccttgggcaggggtcctcgcgccccggcaccagcgcccctccggcgctctgccagggaaacaagggttaaaaccccggccggtggggggtggggggtggggggcggggggtgcggctcgcggcggccggctggggcaatcggagcctgccgggggctcagtcccactcgttcccggagtcggaggggccggattcgccgacctctgcggcttctcggagccagcggagccccggccc

SEQ ID NO: 80162 - DNA, 1105 bp, Homo sapiens
aaaacatcatatgttgtataattccatttatgtaaaatgtccagaacaggtatatcaatagcaacagaaagtagattagtggttgccgggggctggggtcaaggggaacaggcaatgactgcttaatggatggatacagatttcttttccgagtgattaaaatgttctgtaattagatcgacggtgatggttgcataactgtgactatactaaaacccactgaactgtgtgtgttttaagggcaaattttatggtatgtgaattatatctcaataaagctgctcttttttaaaatctctagaactagtgatagatttaggtacaataaagctgctcttttttaaaatctctagaactagtgatagatttaggtatgtgagatggcggggaaggtagggtcaagagtatcactgaggtttctggcctacatgactggatggagagagggaacactagaggaagcctgggggcaggggagtcaaggtcgagagtttgaagtgtctctggggcatctgagagggccgcactgacgccaaatggcagtgcagttagaaggcagtcgttcagatggccccaaatgtactccataaaaatgttttgtgagtattgtctaatataaatggcaatataaacttgtggaaaactcagtggtgtctgaaggtaagtctgtgagaccctacctgggttctgcaaaatccaggtgatgaaacacatttagtacagaattcactttgtaggtctttccactggtgtgggactcccacttctaatccttagagagaacagtcagcagcggaaagggatgttgcatctgtaggtaaggtcaccactgaataaaaatagtaaaaaaaatcaacctaaagaaggtaggtttaactgcccctctgagaaattgcttaaaacattaagatgatggagttttagaaaacatccaagccagtccaaggaactaaggtttttctgcaagagttgaatttatatttatttatttatttatttatttatgagaaggagtctcgctctgtcacccaggctggagtgcagtggtgccatctcagctcactgcaacctctgcctcctgggtttaagcggttctcctgcctca

SEQ ID NO: 80163 - DNA, 1034 bp, Homo sapiens
gcattccatatggttccatatcagaccctattggattatgatcttcagctacttgcaccttagtttttctcttagccaaagacttgcttcttcatcttttaagcctcacataatatagcttgtcatcttgtgtgctgccccagttaaatggtgtaaaagatggcagagcctcatggtttctaggccatatcaagaaatgaaagtggttgcagtggtggttggatgtcttagggaagagaagtcaggttctttctggttcatatttgtatcccccagagcacccagcccagggcttctttataatggatactccagaagtatttgttgaacgaatgaatggttatctatatagtccaaaggatagcaaaagccagatgtgaaattctgaacaagagcttgtgtttgtctgcctggggagagctcatgtgccctttgcttttccaggagcatatacaacgcagctgtttggtactatcatcactgccaggacaggatgccaattgttatggtgacagaagatgaagaggcaattcagcagtatggaagtgaaacagaaggagtattcgtgattactttcaaggtatttccagatattgtatatgtatgagtgctcattttctaagtagtacccataaggctctagatccctttggtaacacagaaaagagaaaagaggaatagacattaagttccattttggccaggcgtggtggctcatgcctgtaatcccagcacttgggaggctgagatgggaagatcacttgagcttaggagttcaagatcagctgggcaatctagtgagaccttgtctctacagaaaaaaaaaaaaaatatatatatctccaagcatggtggcacgcacctgtagtcccagctactcaagaggctgagatggaagaatcactggagcctgggagatggaagctgcagtgagccgtgaacacaccactgtactaatgcctgagtgacagagtaagaccctgtctcaacaaatgaagttctacttcttcattatgccccaactatttaatgtt

SEQ ID NO: 80164 - DNA, 1028 bp, Homo sapiens
tttagttgtaaggtggttggattgacaaaccagaaacctgtagctttgtaatttcttttaagttacagttaggtcaaattccacttgcttcaaaaatagaagacttaggtggggcatggtggcttacacctgtaatcgcagcactttgggcaggagaattgctcaagtccaggagattgaggcagcagtgagcagtgatcatgccattgcactccagcctgggtgacagagcaagatcctgtctcaaaaaaacaaaaaacaaaaaaagccagatgaatttgaatagtgatgttgtcaatgttactgtttttgtaggtatgctgtaagcatcatgtgggaactggataaagcctcttatgaaattaagaaagtgtggtatggcagaaccattattcgatcagcatacaaactgttctatgaagcagcccaagaactactggatggaaacttaagcgttgttgatgatattccagaattcaaagacttggatgagaagagcagacaagccaagctggaggagttggtgtgggcaattggaaagctgaccgacatagctcgccatgtcagagctaaacgagacggatgtggtgccctggaactggaaggggtagaggtttgcgtacagctagatgacaaaaagaacattcacgacctcatccccaagcagcccctggaagtccacgagacagtggctgaatgcatgatcctggccaaccactgggtcgccaaaaagatctgggagagcttccctcatcaggccttgctgcgccagcaccctcctccacaccaggagttcttttcagaactccgggaatgtgctaaagccaaaggcttcttcatagatacacggtattcctcttttgagggggcagaggaatggagtggcatgctgtatatttagttatcttacagttgttcttaaaatgtgacagccagatctttgaccaaaaagagaaaacagattcttggctctcctcatttttgaagacacatttttccctcttcattgttatgtatagagacttaaa

SEQ ID NO: 80165 - DNA, 1076 bp, Homo sapiens
gctgtatgcagtggctcacacctgtaaccccagcactttgggaggccgaggcaggaggatcactgaaggccaggagttcaagactagcctgggcaacaaagtgagaccctgtctctacaaaaaaattattttgagaataaataaatagaatgcttactacctctttaaaaaagaaaaactaatttaggtttcttttacttgtacaccaagtccattattttacctatatatagaatgtttaaggttaaggatgtaaagaattcaattcaacgagtatttgaccacctattatagccaagcactaacttaacctagtattaaaatcagtacatgattcatttctacttaagaaatgtatttaaattctgacactcttgttttgtttaagccgtaaagcaaactagatttctgtagttgaaaagaggtgcttctgaaacgtgtccaaaacaaatttactggcagatgaaggtattcagacggatgagtgaagggttcccctcaaagtgttgtcttgtaaattactgtctgggactagctaacggtttttctgttctttgtcaggtccaataaaacactggctgattctctggataatgcgaacgacccccacgatcccattgtgaacaggctactgcgctccatggccacgcaggccatgtcgaatgctctgtacttctccaccggatcctgtgcggaggaggagttccatcattacggtgaatcataccatattcctatgtgtggctgtaactttgcgctagttattttaaaatagtttttgtttattttgatcttttgctttctttttgaaggtcttgcattagataaatatacccactttacttctccaataagaagatattcagatattgtagtacaccgcttgttaatggcagccatttcaaaagataagaaaatggaaattaagggaaatctgttcagcaacaaagatcttgaggaattatgcagacatatcaacaacagaaaccaagtaagagggaatttcaaaattctcttacctgtcatctcttgctaagaaaatatcagctttattgtgtagtaccgtgaagtatcat

SEQ ID NO: 80166 - DNA, 1038 bp, Homo sapiens
ttctagataagcatacaagatctgtgtactaagaatacattgtctctggatttatattctggtcataatataggtttgggattaaaggtgctgcttatctaaaaaataaagatggtttagtcatctcatgtggcccagatagctgttctgaatggaaaccaggatcccttcaacgatttcaaaacaaaattacctctactacaacagatggggaatctgttacgttccatttgtttgaccatgtaaccgtaagtctgtgtttctattaagtattattaatattttaaatgtaaggaataaataatgtgatttagtaatatgtattttcttctctatgctaggtaagaatatccatacaggcctcacgttgccattctgatacaatcagacttgaaataattagtaacaaaccatacaagataccaaatacagaacttattcatcagagttcccccttgctgaagagtgagttagtgaaagaagtaactaaatctgtggaagaagctcagcttgcccaagaagtcaaagtaaacatcattcaggaggaatatcaagaatatcgccaaacaaagggaaggagcctatacacacttctagaggagatacgggacctagctctcctggatgtttcaaacaattatggaatatgagaggctcttacttcactaagagctgtcatatgtgaatgttttacagtcttttcaaacttaacatttaatgtgtgtcactcagtgctctagtcgatcaggactgggtagctatttcgcatatatgtaaaatgttctcagccgggcacggtggctcacgcctgtaaccccagcactttgggaggctgaggcgggcggatcacgaggtcaggagattgagaccatcctggctaacacggtgaaacccagtctctactaaaaatacaaaaattagcccggcgtggtggcatgcgcctgtagtcccagctacttgggaggctgaagcaggagaattgcctgaacccaggaagaggaggttgcagtgagccgagatcgcaccactgcattccag

SEQ ID NO: 80167 - DNA, 1206 bp, Homo sapiens
tattggctaggcgtggtagctcacgcctgtaatcccaggactttgggagcctgaggcgggtggatcacctgaggtcaggagttcgagaccagcctggccaacatagtgaaaccctgtctcttctaaaaataccaaaattagccgggtgtagtggcgggtacctgtaatcccagctactcgggaggctgaggcaggagaatcacttgaacccggtggaggttgcagtgagcccagatcgtgcgattgcactccagccaaagtgatggagcgagactccatctcaaaaaaaaaaaaaaagatatatttagaagaaagtgatcataattaacattaagtgatcttagacttcattttactaaactgagcttttgaagaggtttgtactcatgcggtaagattggatcaggtacttataatgaataataatggtatgatttctttcagatatgttaatgaatacacccagggcacacacggttgaagaggttaatactgatgaggatcaaaaggaggagtcaaatggattaaacgaagacattctggacaatccatgtaatgatgctattgccaatactttaaatgaagaggaaacactgctggaccagtcttttaaaaatgtgcaacagcaacttgatgctacatccagaaatattactgaagctagataagtttccattaagagaaaatgtatctgttaagtcatcgtcctgcaagcttggcgttactatgtattttttcttcttggagtgaaaatccttagatagtaaaactgttatagattattgtttaaaatctgataatctggtatttatttataattatgcttgtcactttagttaaatctatttgttctctttagtgtttgtttttatataggtatttcttcataaaatgattaggaggtaataagcagtttctgctgctggtctgtcattgaatgccttgttttcactaagttgggaggttttgtttctgttttttactgctccttgcaaagcagggctaatccatggacagtgtgcccagagtagtctagttgaagttttttgttttgttttgttttgttttttttgacacagagtctcactctgttggccaggctggagtgcagtggcacagtcttggctcactgcaacctctgcctcctgggctcaagcaattctcctgccttagcctcccgagtagctgggactacaggcgtgtgcc

SEQ ID NO: 80168 - DNA, 1106 bp, Homo sapiens
tgggaggctgaggtgggcagttcacttgaggtcaggagtttgggaacagcctgaccaacatggggaaaccccatctgtactgaaaatacaaaaattagctgagtggggtggtgcacgcctgtaatcccagctactcaggaggctgaggcaggagaattaacttgaatccaggaggtggaggttgcagtgagccgagattgcgtcgttgcaatccagcctgggtgacagagtgagactcttgtctcaaaaaaaacaaagccttggtacatctagaatgttgtatatcaaatttgttgtagaatatgaacttttgaaaactctggtgacccactgatcctatatagcacttgttaataaaaatatatatcaagataaaagtgttcatatacatatacaccattggataaagtggtactgggaaattaggcaaaataatttatgatgaaagtttgcatttcacttggagcgcagctctcggatataggactttagtgagacctttgtgactgttcctggtattgattgcatttgttagttgtacagtgcaaccatagacagtcacacacattaaaacagatggttcctgccgacagggtctgtatagttatcagattttctgtgcgatggctccatacatgtttgtttttgttttttaacttttaacagatgtggaagaaaatacaggttccatgtagaataccctaaagttatttataaactactttcaaacatgtaaaggaatgtgatttaggccgggcgcggtggctcacgcctgtaatcccagcactttgagaggccgaggcgggtggatcacaaggtcaggagatcgagaccatcctggctaacatggtgaaaccccgtctctactaaaaaataataaaaaaaattagccgggtgtggtggcgggcacctgtagtcccagctattcgggaggctgaggcaggagaatggtgtgaacctaggaggtggagcttgcagtgagccgagatcacgccactgcactccagcctgggcgacagcaagactccgtctcaaaaaaaaaaaggaatgtgatttaaataatccgtgatttaaatttcttggtaaaatatggtatgtatggatgg

SEQ ID NO: 80169 - DNA, 1001 bp, Homo sapiens
agtagagacggggtttcaccgtgttagccaggatggtcttgatctcctgacctcgtgatccgcccgccttggcctcccaaagtgctgggattacaggcgtgagccactgcccggcctactatcttttaactttattaagtgtttttttttttgtttttttgagatgaagttttgcccttgtcacccaggctggagtgcaatggctcgaccttggctcactgcaacctccgccgcttgggttcaagcgattctactgcttcagcctcccaagtagctgggattgcaagtgcccaccaccacgcccaactaatttttgtatttttggtagagatggggtatcaccatgttggccaagctggtctggaactcctgactcaggtcatccacccgcctcggcctcccacagtgctgggattacaggcgtgagacactgcgcctggccaactttattaagtttttgtactgggattttttttcatctaatttttatgaatctgtatccaggcggggtgctatggctcatgctgtaatcccagcactttgggaggccagggtgggcggatcacttgaggccaggagttcaagaccagcctggccaacatggcaaaacctcctctctactaaaaaatacaaaatttaggccaggtgtggtggcgcacacctctaatcccagctacttgggaggctgaggcatgagaattgcttaaacccgggaggctgaggttgtagtgagccaagattgcgcccttgcacttcagcttgggtaagaaagcgagaatctctctgaaaaaaaccaaaaaaaccaaaaaaacaaaaaaaacccctgtatccagtgctcttttagactgcagtcctctaagttcttaataattttctctcttttttttggatataggatctcgctgtcacccagtctggagtgcagtggtgtgaacttggctcactgcaacctctgccccccaggctcagggagtcctttcacctcagccacctgagtagct

SEQ ID NO: 80170 - DNA, 1050 bp, Homo sapiens
tgaagttcttgcggggagaggggagtcggactagccagggagccagatggaagagccagggagccagacagactagcgggaaagcctaattgtcgcaggaagggggtcaggaggttggggggtcgacctgacccggcctggagaggcggggaggtgggcgcgtgtcccggttgcttaggttttgggatgcctcttactctgccaagccgcttagcgggagggaacgtgttcctgatcatctttaccccaggcttctgtccggggcgtgtcaatgtagaaatcccccagcgaatgttggatgaatgaatgaagttgaagagagggtaggcggggaacgaggatgagggggacggctggagaagaggtatgggaggttcgatgtttcagggatggcacccaagggggacatcgaggcagcacggtagcacttcctttgcgatgaggggcgtctctttggacttcttggaaaagaggtgggcattggaaaccagggtctgggaacaaaccgtggtttggacataacatttgttaccttcactcttctgggagttggagaagtagaggaggaagttcagacaatttcataagtgtctaaaaagagacagttatgcgaccattgacgaggagtaaaagtcgtctattgagcatcttattcactacaaatagaagaaagaaataccagtttcctgacaagccccaccccatgcttggccagttcctgagtacacttaatatattttaggtactgtcatcaaactcaaagctcgctgtcagcctcaaaggtctgaaccctagtatagattcttgtagcttgcttgaagttacagtgggtcatgatcaggaattgatgctttgtttttgttttgaaacggagtctcgctctttcgctcaggctggagtgcagtggcgcggtctcggctcactgcaagctccgcctcctgggttcaaatgattctcctgcctcagcctcccgagtagctgggactacaggcgtgtgccaccacgccccgctaattttttttgtatttttagtagagatggggtttcact

SEQ ID NO: 80171 - DNA, 1022 bp, Homo sapiens
acatttgttctttttttttttttttttttgagtcggagtttcactcttgttgcccaggctggagtgcaatggtgcgatcttggctaactgcagcctctgcctcccgggttcaagcgactctcctgcctcagcctcccgagtagctgggattacaggcatgcgccaccatgcccggctaattttgtatttttagtagagatggggtttctccaagttgttcaggctggtggcaaactcccgtcctcaggtgatccacctgcctcggcctccgaaaatgctgggattacaggcatgagccaccgtgcccagcccatttgttcagttttagtatacagtgtttcaccctcttaaaatagactgaaagtcatgactgttgttaggacaagttttgaccacagtggattctggctgagtgttatggcctcattatcctttcctatttgatttggaagtggatactgagtagaagtacctgttatcattctgttgtaatcgtgataccacaactgtattctctcaaggaggaggaatttcattaaaacagtaaaagcaggatgagaagaaactaccccagatttggtggcagaaaaatttggatggtactgggagagtctaaacagtggttaaaaggtaagggctctggagtcaggctaagtttgaagcctagctctgttgtggttttttttttttttttttttttttgacagtctcgctctgttgcccaggccagagtgcagtggtgcgatctcggctcaccacaacctccacctcccggcttcaagcgattctcctgcctcagcctcctaactagctgagactacaggcacgtgcaaccgtgcctggctaatttttgtattttaatagagacagggttttaccctgttggtcaggctggtctcaaactcctgacctcgtgatcctcccacctcagcctcctaaagtgctgggattacagcccggcctctgttgtggttttgtgacctggttcaagtcttttagtctaaggcttaggtttagttttt

SEQ ID NO: 80172 - DNA, 2001 bp, Homo sapiens
gccctccttggcctcccaaagtgctgggattacaggtgtgaaccaccgcaccggctattaatctctttctttaaaacaataccgttaatccagttgcagtagtgaggcagggtacctctcaagatctcactttttctttgaccttgggcaagtcctttctactttctgactcttggtttccttaatctgtaaagtggaggtgataattgtttacaaaatctttaccatggtggcctacaaggccctacctgaccaggtccttagttttcttccagtgttctcttcactcatgcactctagccacactgtcctttgtgctgttgggttgtaggttgggcacattcttatcttagaatctttgcatttgccattcctgctgcctggaaagcttgtctctcaaataccgtatgacttgcttcctcacttccttcacccctctgttgaaatgtctcttcacagaggccatctttgatcactgtaatacagaactccctgtcattttctaccctttgattttgccttatttttctttgtagcgctgatcactaactgatgttacatcgtgtataagtatttatcttcttctgccaccccaagtgtaagcttcatgatggttggggctttgccttgttcattgctcagtgtgtagaacagattctggcacatagaaaatactcagtagatacctgttgattaaatgattgactagatcctacctcagaggaatacctttgaagatgtataaaatttctttgaaggctataaggtgccgaataaccttaggagggttcactgcttggccttagtagcgttcatgattttggattttgaattgtttctatgtaaccctgaaacactcagacttacttattgcattcagggtgtagttcatagcatcagcagttctgccaggtttgtaaggaacacacatctgttagagtgtgaaggccctggaggaagaaaggttgagacaggttgatgtgcttttttttgtctcttatggctctttctgagatgtgtaccatgatgataaccaggaactttttttttttttttttttttgagagacagggtcttgctcagacactcaggctggagtgcattggtgctcactataaccttgaactcctgggttcagggaatcctcctgcttcagcctcctaagtagctagtactaccggcatgtaccaccatgcctggctaattttaaaatttagagatagggtcttgctgtattgcccaggctgggctcaaactccttgcctcatgcaatcctccctccttggcctcccaaaagtgctgggtttacaggcatgagccaccatgtctggcctgataagtaggagcttttgaagtggtttcacactgattttgtagttttgaacttggatgcttcttttgggtagttgatgcagtaactaatactggtgctgtctttcagaacagcttcatgtgaaaaaggcctgcttaagcctgtgtctttgggaagaacatctctgccgctgttacagcagatacagtaatagcaaagaaagtcttaaagatgatttagcccatggcaaggaaatatatgggactcttgtttgaatataaacactcacagaattccagtttcacttatttatgcacctttcaaagaaaggaagaagatactgtggtagagtacagtagtcctcccttatctgagtggcatatgttccaagacccctagtggatgcctgaaaccacagatatcaatagtaccaaaccctgcatatactgtgttttttcctatgcagtatatgcctatgatgaagtttaatttataaattaggcatagtaagagattaacaataataaccaataaaaaagaattataacaatatattgtaatgacagttacatgaatgtggttactgtactcactgtgggtaactggaattgtcaaagcaaaactacatttaagtgggtactcctgtagctgttggccctgccttgcctatctagcttaattttcctctg

SEQ ID NO: 80173 - DNA, 2597 bp, Homo sapiens
gagctgtgaaaaaaggaagcagctgcccagatttatagaagcagagcttattagggctggatgggacctaacaggttctctagacctgggccttcatttgagagatgaggaaaccagacctagagaggtgtgaatttgccagagttcacactgctgcagtggaaggaggtggttgagcttttactcttatttttttatggtacatattacatacagtacatgttttcatttgggaaagttacttggtttgacagttttccaagtttacccaacattaaattttggtaactatgcaatatccttaaaaaaattattttcaagtaattatctgaagctctagaaaaggttacccctctatatcctcactctcctaggtggttgagggaaaagagaataaagaaaagttgtggggttggggctgggacagggaggaaagggtattttagtccttgatccttagtaggagggcctatttttaagcttcataatgtcagttttaaaagcagtggttttcaaaataaccgcagacgaaagtccccttgaaatggatgcctttctggaattgacctattttgagtttagctgttaccagaagggttcagaatctcgaatgctcttaaatgcatttacttttcagacaaagtggaaattgagtgcataatccacgtgggttccagattcaggttaaatttagaaatttggggagttgtggagagaagacatgaaatgagtcaatcgttgttttacaggtttgtccgaatccaggttaattatatttccttctttattgaattataatttgtatatccaggttagttttacaaattagatcagaccctcagtccatttgagagtagactcagagtcagaattatttgccccctttgctgctttcataccaccctttagtaaacagtcctcaagaatgtccttatgtcggggagggcagacctcagaagttagcaagaattccaagctcactgtaaaccttttgtttaatggtttactcaaatccagatagaaattctaccaaaatgccagcctgtatttcagctcctctttcttggagtctttaggatggtgggaaaacaggcagaagaaagctgtttaacattccaataattattaataatagaaaatgtatcctgctaatcaggcactcatttgcgtccactgataaaactaggtcattggagccaaggaaaggtaccgttcactaaaggaaagaccagtagatagtcaggcatggtggcgtgtgtctgtagtcccagccactcgggggctgaggcaggagaatcacttgaaccagggaggtggtggttgcagtgagcggagatcgcgccactgcactccagcctgggtaacagagtgagtgagactctgtctcagaaaaaaacaaaacaaacaaaaacagtggaatattgggctaagctcttaacacattatatttagagattgcaacacttcaatatttactggaatactcctataaaacggtctcttttgccttgttttattttggtaactaagtgaatgctgggttagccataaaggtagcttgctgcatttctatttcttgtgttctaaatcactgaataattttttaaaaaagtagttctaaagcatttccagttaaaaaggaaggcgtaacatttattaggggaagtcaaggggagaggtagtgaggaaagtaccagaaaccaccaacaggtgtttcggttacgttgaacaaagaatcagcttgatatgcagtccctgggaagagtttgtaaattcctgaaggagggtgagagctggaggggacacggtgagcggaaatggtgagcggaaatcagtggttcctgaggcacagaggacttgggttaccggaggcttgccctcagctgaggacctgggaacaattcctgagcaagttgcttttttgatagacaaggatgcatctgtaggaccactgctgttaatctgtggggcaataagaattgatcctactgcaagaaagagagtaggataagtcagaagacatggaacttgtatccctagaggacatcgcaactggaaaaatagctaccatttatgaaggcctacctcatctctttgcattcattatcttgaatttgcactaaaattctgcaagaaaggtcatagtattctattttacaaataaggaaaattaagctcagggaagttatttcataaggttgcacaactagtaggtggtagagctaagtttagactcaggtctgtcctactctgataggcatgctttttccacacggccctctcagtactgtgtaaaatgccagagggctttctggatcttcacttcccaaaactgctaaatttaaattaattaaaattaaagttgaaaaatcagttcctaggttgcactgcccacatttcaagggctcagtgtccatgtgtggctagtggctactatactggaccagcacggattagaatgctttcttcattgcagaaagttctattagtgctggtctagaggtcattcagttttgcccctttatttaattttttcccccttttattccacaaaggagaaaatgagggacaaagaaaggaagtaacgttcagcatca

SEQ ID NO: 80174 - DNA, 1089 bp, Homo sapiens
ttgccattgattcaaatggcatttatgttagagtcaaatagatttagattatggccaaaattacaacaatagatttctaacttgtatgttaagagtaagatgtattaacagtcattgaactgatgtttagtgtttaactcatacataccaggcactgggttgcaacatgaactaaaaggacttttgctgaaatggaaaaagatgtcttattatggacaagttgaatgcattttaaattcctgtctgaattatattgctggtatttgccatccatgtaccttcctgtttagccttgaaattcagtaaaagcctcagtgtggatcatacttcatagctctgaagtaaagtgaggagtcatgtgcaaatgtccttttagtagatgctattaaaaggcatttaaattatacactccagtgtctaaatgacagtctgaagtgtatgtgtgtttggaggatgggcaagtgggagcaaaaggaggcattgtgctggggcgattgatatttttaggaagcctaaatgtaatgtttgatttcggtataactaacagactcatggtttagaaaagttgtctatcaaaaactgagaaattgaggttttggtttcttcttaaagaaatgttcaagtcatgtgcatgagtatgctcagagagattaaaaatggagagaaattggaatggtggcaaggtatccaggaaagtacctgtcttctctgagagtccaagggcaggagcagaaaggactttaaagatggtggcaacaggctgggtgcggtggctcacacctgtaatcccagcactttgggaggctgaggcgggcggatcacctgagctccgcagtttgagaccagcctgaccaacatggagaaaccccatctctgctaaaaatacaaaaaattagccgggcgtggtggtgcatgcctataatcccagctacttgggaggctgaggcaggagaatcaattgtgccattgcagtccagcctaggcaacaagagtgaaactctgtctcaaaacaaaacaaaacaaaaaaaaagattgtggcaacagctggaaggggtccccaggagctctgacacagggttttccaactgc

SEQ ID NO: 80175 - DNA, 2535 bp, Homo sapiens
tagtgccactacaccccagcctggccaacagagcaagacttcgtctgttaaaaacaaaacaaaagaaaagaaaaaccaaagtaaggttaagagaagttggctatgtcacacagtatgttctatttggaattttgtgacttttgagtaacataacctaaaggccgtgtggcacagtggaaaggctttgtagccagcagactttgagtttgaattctgaccctgccttactatgtctgtggtcttgtgcaagtgcttttacatccttgggtctgttcccacatctgtaaaatgggcataacaacatttatccaacagaaaggattcatacactctgtgtgtaaactgctttttgtgattaacaagactaatgataacagccaagattagatccccagtgcaggttgccttactttctatcaggtgagaaggagagaaaattcttatttcccaaagaacttacagtgacggggctcttcagctgctctttatccaacagacttagaatagagacaacaccgggcatacttgcaattttttaggatgtgcaggaagcaaaagaattattttcagtgaaacaggagtctgcaaaaggtgccttaggaaacaactgccacacagtacatcccaatatagactcctcccagcttctctagggcagccatctgcctgacaggccccacccagataagcccagctttcttctcccaagagtttaaggaagatttcctgatgtatgtgtgcgtgtgtgtgggggtggtatggggttgtgttgggcgggggtcaagaggggtgttaatttgggatgggtagtcactggcttttggtggcataactggaaggtaacactccctgtggctgaatcctgatccctgtggggatcagcgcatggttcatccagacatcttcctcagtgggtcctggcctctgctcatactatgtcttctactggggattcccgtctccacctccaatatacgtatgttgaaatcttcatcttacgtcaaagctcaacttggaggtcatgtcttatgtaaatccatcacagacctctcctccaccccatctgggcagcggtcatctgctccaccctccggagcactctgtacatattccatcacacttcagttacttatgtaattgtctagtcagcagaagatactcctctccaaagggcaaggttctgctaaccgctgtgaagcctggctttgagtttatgaggggtgattcttttcagtttataatttcttggcacaggagggtcacagtgttgttggtaaccgtagcatctgtcctgggaggctctgtatgctcttcattgttcatacatccatttatttcttcactcagccacatgaggcatgtgggatgtatgttatctctgcttgatacatgaggaaactgattctggttaaaggacttgtgcctgtcatacaggcagctaagagtgcctatagtcctttgtattgccttttcagccaacagtcccatcccagcccaaaggaggaaacatttggggagcatatactggtgagaacatcttccctattctgtggcgttctcttagccttatgcctggcacagaggaaggctctgggaatgtttgggccggatggatctgggagcctcttttgcatgccaagctgcatacttatccctagcaaatgctggtctccttgatggatatgtgacatgggtggctgaatttacatggcacctggtggcttctcacactcctccgccacgcctctggggactaggataggacagatggccacagacaggattctcagctctgcaaatcacatttgggaaaaagttaagtttgtgcaataacacaattttggtaacatggtttcatgctgctggtaaattctataacactctctggataaatcacacttcagcagaactcacttgggaacagagtttaatttcactgtaggtggctgtgattcccacccaccagtcttcacacccccgctaatatatctaggctgataaggtgaatgctgtgctaagcaggctatttctgggcccaggatagaattacattgtggtttttaaagaatttttttctgtatatttttctattcacagaccctttgaaagaagaattacattatgttaatcatccgtttccccatcagcacctttaattccttctccccagagtataaccacttgtccttaaaatgacagaggtggaaaagatcttgatagttcagcctcctgtatgtatatatgaagaggttgaggcccagagagactgggcagcctactcagttgtcagatggctggtgaagacctgcatccggatccgttgacttctctcctgtgcagggcccttgttttttgccctgccctactgcttaaccttgtcttctgtcttacaactaggggagagtctatggcatgttcagtttgaaatgaataaaagtgaatacttgttcattgttaaaggaccccaacacagaactaatttcctgttaacccttacattttctcttgacatatctttggtgaggaccattaaag

SEQ ID NO: 80176 - DNA, 1039 bp, Homo sapiens
aaattctcatccatttctgtattgtaggcatttttttttttcttttggttttagtgtttattgtatacctcacactgggttagactcaagtttgggggatacttccagcttaattgagggtatgagcatgtaattgcaaggcattgtgacacatgctctaactctggtgtgtgatacagcacaggctatgggaactcaaagggtgagtgactaacgctgtcttgaggagtgaaggactgtatccccaaagcagggatctgggcctgtcttggggtttttgggtcttctgttttgttcttatttttttcttcttcttcttttttttttttttttcctgtaaccttatttatggtgaagggacttttttttttttaattgtttacacttgcccttttgatatcctctgcattcgtggctcttatcatcatcttagacttgtgaacctgcctcaggtctctgttaggagtttctggcctatctggtcagccatatactgagtagctccacacgtagagcctgcaggttatctccaactcaccttttccaaaaaatagatttataatcctcttgtcgcctgtgatgacctctcatgctaactacccagagtcaggcagacctcataggttaaacacacagtcctctgtaagactgcccttcataagactgttacaatctaaggggtttcctgaccacacacacttctgttgaactagctacaaattggggttttcactatcctctcaggttccatagtttgctagagcaattcacagaactcaggaatgcactgtacttctgattacaattttattatagcaaaaagggtacaaatcaggagcagccaaaagaagaggcatatagggtaaggcctgggagggtcccagatgtaaagcttctggtgtcttcacctcttggaatcagggcacagtcactctcctagtacattgatgtgtaacaatatgcacagagtattattaaccagggaagctcccctgagcttcagtgtccagagtttttactggggccccattacataggc

SEQ ID NO: 80177 - DNA, 2174 bp, Homo sapiens
tgtaaaatgagaattggataagttggtcttcaaggtccctccctgagatacattttatgctgctgcttgatttaaaccactgagccacaaatgaaaggttccagttgcaacagtgtaattaggcttagcagatgggtgagatgaaaggaaggacatgttcttgcccataggattatcctttcccacccatttccttgcacctcactggtgtttccaaaaagcaaatgacaacccttgtttttctctgcattcccattcaaacctttaatcttcttttatcttgatgaacttgtatttaccgttagacagccatgatgcagaattcacattacagtgtgtggttctaactctgccatggtgaatgtgatggaggttggagccgatcacagctggtccctggagagagggctgtgtgtgtcagatttattgtgctgcagctccagttttgttttggtttagtttttaaatccccagtgtcagttttgctgatttcagttaaaactaaagattgtgaagggagacagagacaggttcatgccctctgagttttagagattggtgatatagtcgttgggtgagggccctctgtcttatatcctttgcttaaaacatttcaccttggaaaggcagaaattagccttgttgaacttcaactccctctgcaagaggaagaaatactgaatactgtttcattattgatatctttttaatgagtactgaaagccactacaggatctttgtttcaccttcagataaaatgtttcatctttcattctctgaaaaaaaaaattgagtattttaagaataattaaaggaaaggcagtagtttctggatcctgccgttgctgccttggcctctcctgccttttctccacttccactcctctccctctatattagtgtagaaatgtgtcaaaaatttcttgcttcttccattagtttctattttgacccaccccagtgaatgaaataagcatagaattgttacttctattttacagaagagaaattcttatttttttgttgtttttatttttaagttcaggggcacatgtgcaggatgtgcagatttgttaacataggtggacctgtgccatggtagttttctgcacagatcatcccatcacctaggttttaaggccagcatctattagctattcttcctgatgctctctctcctcccccactgacaggccccagtgtgtgttgttcccgcccctgtgcccctgtgttctcaccattcagttcccacttactagtgagaacatgcggtatttggttttgtatacctgcgttagtttgctgagaataatgacctccagctccacccatgttcccgcaaaggacgtgatctcgttcctttttatgtctgcatagtattccatgatatatagaggagaaatctgaaatgtggcaaggttaagtgacttgtccatggtcacacagctggttgatgaacaatttgtgataagaatccaggactcttgaatactagtgatttgtcaacacgattccatctccagtcctcatccatacacacctgccattaggaaagtctttaccaccccagcctatagtctttgtcatttctctcactggccagcttctgaaagtacaggtcagaagccagttcattagctggtagggtgggtggttaaacggcaaggcataggaggtagaggagggagaaaggaagcacaaagctcaggcttagtttttcctccagaaggtgtaagaattacttatttcaaagagtcagaaaagtgaacagagtcagcattcccttttcctttgcaaattgattgaatttctatggcgagtattagctgcaaggcagtgttaatctgctccagcagatccatcatcagattgatgtgcaggggagacaggattgtctctggtgcaaaggcctttttgtgtagggcacaccatctttatgtatgattgaggcctggtgtgttaaatgcctcacactgggatcttacccatgtttgtcagttgcctcccttgaaagtattgagctttttgaagataatatagcatcatggttaaggtaagacattcgttctctctgcctgaatttgaaacgtggctgtgccacttaccagctctttgacctttgacatcttagttcacctgtctgtgcttgagtttgctcatctgttctaattagg

SEQ ID NO: 80178 - DNA, 1038 bp, Homo sapiens
tgttctgggttcccacaccttagggactggggacactgcaagacatagccgaaccttggatgaaaatattgagtagctgcctcagtttgcttggactgctatgataacatatcatagactaagtagcttagacaacaatagtttattttcccactgttctggaggctgaaagtctaagagcagggtgccagcatggttgggttttggcaagagccctcttcctggcttgcagatagctgccttcctactgtgtgcttgcatggcctttctttgatgtgtgcagcaggtggggtggggggaaaatcagtgaggaaaatcagtaacctcggccttgcatcttctttggtcccatgcatgatgttatttgtaaggcagtgtcagatctcctcatacatggagaggcattaagtcttcatttccctgtcttctagaggtttgggatagagggtgtgaaggaagagcagattatgcttactctatcttttaagctcagaactggggtgtgtgtgttggcaggaacaccaacatgatgatgtataatgaaggcctatcttgtcacctgtgtcacttcagccaccccacacaattgtcactgacatgcttcacctcccgggacttcaatttgaaacccaatgaaatccagtgaaacacagtggaaactcttaccaccttcctgttaaccaactcacaggagtgatgaacacttttcagttccctggatgaaacactcttgagcaatgcccacagcatgctgaatgcactgcaggcaggctgctctctgccatacccactcgcttcagcacccactggctgaattatgtgcttaccaagagccagcttgttcccaaacccatttgttcagctgtagctggtattgtagttaagtaatgtatttaggtatcagataaactgatgaaatgtagctgcaaatgaagtgatttttttcccctatgaacactagttaaaagctgtggaaagacttataagtccaagtcactaaaacacattactgtcaaactagatgaacattaagattgg

SEQ ID NO: 80179 - DNA, 1050 bp, Homo sapiens
ttgcgtatggtaaaaacaataaaaccaacagtagtggggctttttaaactggggttttaaagcaaattaaggtggctcattctggattttagtaggttcttttgttcctctcattgacttgcagcatactgagtgagaaagacctaattttttcactttataaatgaggaaattgaagccctgagaggtaaagcatgttggtgatagtcatcccgggtggctggagtgaagtgggcagagccacagtgggagggggcctcctctctagcctcccactttgattatctgtctggccccagacctggagctttctttccatgataggagtacttctttgggttgacttctctggtgacagtattgacttgtgctccccactttggaacaggaccaacttggaggccttgcagaagaagctggaggagctagagcttgatgagcagcagcgaaagcgccttgaggcctttcttacccagaagcagaaggtgggagaactgaaggatgacgactttgagaagatcagtgagctgggggctggcaatggcggtgtggtgttcaaggtctcccacaagccttctggcctggtcatggccagaaaggtgagtttgccttgattaacaggtaattggattatttctcagggtacttagaagcctggggaccagggtagaaggaagactgattttactcaatacctttttgtgctgtttgaatttttttttttttttaagacggagtttcattcttgttgcccaggctggtgtgcaacctccatctcctgggttcaaacgattctcctgcctcagcctcctgagtagctgggattacaggcatgcgccaccatgcatggctaatttttttgtatttttagtagagacagggtttctccatgttggtcaagctgatctcgaactcctgacctcaggtgatacgcccgcctcagccccacaaagtgctgggattacaggtgtgagccactgtgcccagccgtgctgtttgaattttgaatgcttgttatctatattagattatggataaacacactaatga

SEQ ID NO: 80180 - DNA, 1071 bp, Homo sapiens
tgcagtgagccatgatcatattactgcactccagccaaaaaaaagagtgctgtcagggaatctgggattcataagcatttcccttgactgctcttctttcctttcttttattatacctctcttctctctgtaccccctataccttttgctctggcttttgttacatcctgtattaaaattttagataatttatgttatttttcttttttgagacaaagtctcgctctgtcacccaggctggagtgcagtggtgcaatctcagctcactgcaacctctgcttcccgggttcaatgagttctcatgcctcagcctcctgagtagctgggactaccggtgcacaccaccatgcctggataattttttttggtatttttagtagagacagagttttgccacattgcccaggctgatcttgaactcctggcctctagcaattcacccgccctagcctcctgatgtgctgggattacaggcctgagccaccatgcccggcctaaaaatttagataatttattggaatgttgtgtgccaatgaaaagcaaatcctaagctcctgcaacatcatctcatgtttaattgtcagggtttgtgggccctctgggtcaggggatgagcagtgaattggcagagaggggtgtagggagggtagagaaggagagcatttcaaaactaatgaggcttggaagggaaggaagaaaagaaacttaaaatgcagtttctgggcttggttgtaaaaatcttgaaagtgagggagataaaaatagttgcttgttaggacctggcaggcatgctctggaggctccctgtttgaattcagttgctaatcaggaggtgggaaacaacctctggttcctgctgttagcacctttcttgcagttggccttgtcaagaaggataatgggctggagctgagaaagaagcatcgtgctcactcgctaaactggagtggagaactattctctccttactgaatttcagggatttcagcctgccccaagtcaaatccttgttcccagaaataaagctcattacatctgtaatgtgaatgattccttccccggccacagctc

SEQ ID NO: 80181 - DNA, 1039 bp, Homo sapiens
tcccagtgtgaacacatcctcattccttcttgctggcacctaccccccactgtgactccagccactgtcaacatcactcacctggcactgacccacatccccacccctcccctccagtgacccacagtggaactctctttctctgtcatctcctcattgcttcttccctaaatgtctaataactgagcagctggcatcctgggccatttgactgccaactctcaagttcaaaatccattaacaggccctgggagttactaatcaagggtttaatggttggggtttttgtggttatatggtcagttacgaaatagtccagtgttggagttagtgaaaaatgctactggagaagttaatgtctacgtgaatatactatgggcagaataaagattttttcggtagggttcttgaaatacatgtgctatttcaaataatgctcattaaaaataatgcttttgtatagcactgtatactttttttctctttggcttttcccaccaatatcaaccaatatttgtattgcattttacaacatttgacatacattttctttttttttttttttttgagacggagtctcactgtgtcacccaggctggagtgcagtggtgcaatctcggcttactgcaagccctgcctcccaggttcactccattctcctgcctcatcctcccgagtagctggaactacaggcgtgtgccaccacgcccggctaatttttttgtatttttagtagagacggggtttcaccgtgttagccaggatggtctcgatctcctgaccttgtgatccacccacctcggcctcccaaagtgctggggttacaggcatgagccaccgcgcctggctgtacattttcatttgatttgatcttcttagtaatcctaagtagagttttcttatatcattgttactgtcattttcatcatcatcagccaccacccccccccacctttttttcttccgacatggagttttcgctcttcttgcccaggctggagtgcagtggtgcgatcttggctcactgcaacctctgcct

SEQ ID NO: 80182 - DNA, 1053 bp, Homo sapiens
acaggtgtgagccactgcgtcccggcccagcagcagccccattttatagatgaggctgatattcaggatcttttagcttgtaagtcccggaattgggatttaagtctcaggcccactgaccccagatcttttgttctatgtatccacggcaccacctcactcccaacccgcattccacaagcttcatgtttcagattcagtgacaagatgagcctctcatgctgggcttcggacaggctgccctgcgtgtgcaagactgtggccaagctgggtaaagctggaaccacaggctgtagtggcagccagggcacagctgattacatgtggtctgtcaatttaggccagattataggagaaatagagcagggatgaggggttaaagccacagaagccagctaggatttggtaaacacagtgttgggggtaggcaggaggccaaattcaagaggttagtggagctcttgaaacaggatatgaactattgagaagggacagaagagaaaatgcattagcagacccaggggtccaagttaggttaggtgattatcactgtctgtctctcctgcagccagaaagactccaggggactcattactctgtgcagtcagacatctggagcatgggactgtctctggtagagatggcggttgggaggtatcccatccctcctccagatgccaaggagctggagctgatgtttgggtgccaggtggaaggagatgcggctgagaccccacccaggccaaggacccccgggaggccccttagctgtgagtagcctggtgtgtccccatcttggactgttggaggggagggtcccttactttcaggggtttctggagggctgattctctgtacattctgccaagactgattctctgtccctggatgccaggctagggccaggggaagcagcaagggtctccaggtgggtgttgttactaccaacaacttcctaccatttgttgagtacgtactatgttctaggtactgcacttaggactttatacattatctaaccttttgtatttattatttttattattaagggtc

SEQ ID NO: 80183 - DNA, 1050 bp, Homo sapiens
tacccacattcaccaaaatttcactgtaattcagcctggcacaggttttgatcatcagcatacacacaaatagccccaagcacaaagccaatccacttaggggaacaataatagtaataagaataaagacagtaatattaaaaatgacaagagtagaatcttggcacatgctgtgttcttcatcctttgtcacaggtgaaatgcacatctgaacagagacaggcatgggaaggaggcccaaaagcgacatggcaaaccaccgggcaggggactcgctctttgttgcttcccaaacacttagacgccagcagcatgggttggtgtgctgggctggttaaggccgatggtggagcagagccaacctgcaaaatccacttcctcagcatcagatctcttgataaaagcatgaacctgcatgtaaggaaacgagaggacgtggtgttaaaaagaaacaaaaaaacaaaacccaccaggaaggaaaatccaagagtttcaggtctagagcttgtgctgcacttggaaagagcacctggcacctgcccctgagcaacagtggggccagctgcaggcccaaagacctgctccaccagtcacagcagctgtgaggccttgggcaagtcacctcttggagcctactcgtgcagtatggagacagtaactctgccttaaatgcctcacaggcttgttagaagggacaaagaaaatgatggacttagtgcatattatatactatatacaccgtctatggctgtccagatatttacagtattacttagctatttccactgccaccaaacgagacagcaggcggagagtgactctggaaggaggctgaatgtaagatgaggcagtcagtattagggaaaggccgcatccccatgaagggggtgggctggccttttctttcccatggccccctcaggcatttcctctggcatatgcttactcaggctgcgggggtcaccccagctttcccttaaactgatgggagagcaaaggagactggtgtttggtattctgcagccccaggctcagctggaccacagtggg

SEQ ID NO: 80184 - DNA, 1153 bp, Homo sapiens
ggagcaggtctttgggcctgcagctggccccactgttgctcaggggcaggtgccaggtgctctttccaagtgcagcacaagctctagacctgaaactcttggattttccttcctggtgggttttgtttttttgtttctttttaacaccacgtcctctcgtttccttacatgcaggttcatgcttttatcaagagatctgatgctgaggaagtggattttgcaggttggctctgctccaccatcggccttaaccagcccagcacaccaacccatgctgctggcgtctaagtgtttgggaagcaacaaagagcgagtcccctgcccggtggtttgccatgtcgcttttgggcctccttcccatgcctgtctctgttcagatgtgcatttcacctgtgacaaaggatgaagaacacagcatgtgccaagattctactcttgtcatttttaatattactgtctttattcttattactattattgttcccctaagtggattggctttgtgcttggggctatttgtgtgtatgctgatgatcaaaacctgtgccaggctgaattacagtgaaattttggtgaatgtgggtagtcattcttacaattgcactgctgttcctgctccatgactggctgtctgcctgtattttcgggattctttgacatttggtggtactttattcttgctgggcatactttctctctaggagggagccttgtgagatccttcacaggcagtgcatgtgaagcatgctttgctgctatgaaaatgagcatcagagagtgtacatcatgttattttattattattatttgcttttcatgtagaactcagcagttgacatccaaatctagccagagcccttcactgccatgatagctggggcttcaccagtctgtctactgtggtgatctgtagacttctggttgtatttctatatttattttcagtatactgtgtgggatacttagtggtatgtctctttaagttttgattaatgtttcttaaatggaattattttgaatgtcacaaattgatcaagatattaaaatgtcggatttatctttccccatatccaagtaccaatgctgttgtaaacaacgtgtatagtgcctaaaattgtatgaaaatccttttaaccattttaacctagatgtt

SEQ ID NO: 80185 - DNA, 2880 bp, Homo sapiens
cggcttcaggaactgcgcaaggaggaggagacgctgctgcggttgaaggcagccctgcacgaccagctgaaccgcctcaaggtgaccccgcggccctctcctgcccctcctccattcctcccgagcgaccatttccccccaacctgggcctctgtggtgaccacctgctgcggccagttctccgctactcactagctgtggtggcgccaatttagaggtttacaaacaaacaggtatctgaatcacctggggagtttgctgtgcgcttcttaggccctatctttcagaatcgtgacctcgcaagtctagggtgaggctcagggatctgtgtttggcaagtgcagtcctacctgctgcttcctgtaaatgttcatcgccctcagacagcacgctgaggaagtgctccctcccgaaggctcgcctagacccctctggccaccgaccccttcctcctgagctgctgttttctagtttgttttggcgcttgaaatgctctagttttgccaagccagaaggaactcctagatcctcccatgctaccaaggaagaaactgaggccctgggagaagagacttgtcctaacgtctggagcttccggtggctcttgttactgacgccatggccttgaggaggagtcgggatttaggcccacgtgggccacttcccaaacctgtgcttaatgcagcccctcagcccgggcaatatagtgagacctcgtctctacaaaaaattgagacagggcctcactgtatcgcccaggctggagtgcagtgacatgatctcggctcactgcaacctccgccttctgggttcaagcgattctcgtgcttcaccttcccaagtagctgggattacaggtgtgcaccaccacgcccggctaatttttgtatttttagtagagacggggtttcaccatgttgcccaggctggtttcgaactcctgagctcaagcgatcagcccgcctcggccttccaaagtgctgagattacaggcgtgagccactgcggccggccttacaaaaaaaaattaaaattagctgagcgtggtggtgcgtgcctgtagtccagctacttgggaaactgaggtgggaggatggccaaagtccaggtggtcaaagctgtagagagcccagattgtgccactgcactccagcatgcaactatatggggagaccctgccttaaaaaaaaaaaaaaaagtcccagggaggttattatgctaatccctgctcagcattcttttcagaatcttttttttgagacagagtttcgctcttgttgctcagcctagagtgcggtggcgcaatcttggctcactgcaacctccgcctcccgggttcaagggattctcctgtctcagcctcccaagtagctgggattacaggcatgtgccaccacgccgggctaattttttgtatttagtagagacggggtttcaccatgttggccaaggtgttctcgaactcctgacctcaggtgatccacctgcctcttcctccctaagtgctgggattacaggcgtgagccactgggctcggccctttttcagaaactttaagtccatatgaggtgaggattaccaaagccctttgtaaaaggaaaagtattgtacacctgtgacatatcaaaatcataagcatttttccttagggaagttatacttttagtagagacggggtttcacagtgttagccaggatgttctcgatctcctgacctcatgatccgcccgcctcagcctcccaaagtgctgggattacaggcgtgagccaccgcgcccggcctccttagggaagtcataatgccctccacttatttgtgtttctatattgccacggtacccttacaagtacttaatgagtgtattgatgaccacctccaaagcccagatttccttatgcttcagcaaacacctctgttttctattcttctttccttcacgttctcattactgagtaacagcctcaggtccagggaatctctctctctgaggaatcagatgacacctggctgttttaatgacacacttgtactttgagttgctaggtctgtagaagtggaagccatgactcagccagaacacctgttcagcccaggggagaagggctagagtctttctttactcatctccttaaaagagagaaaacctaagagcctaccccctcaactttccctctagagcaacacagagatagttttcattccctctcttgatgcaaatgtttcatagtgtgcccagcagtttacccacatcagtagtccagtgaaatagtaaggaaaagtgtcctcaactcttcttttctaggttgaagaattagccctccaatcaatgatcagttctagaagaggggatgagatgctgtcttctcacactgtacctgaacagtcacatgatgtaagcttaatcaagtgcaggcctaggagagaatgcaaagtctgctctgctcccatgctgcttgggtggtgaagaactgttgtaaatcacattacctagcccaaagggctctgagaagtgctgataacagttttctggtttaataaggtggcaactctccattaaccaccttcctaccagctagttatacactaattaattaagtagttactaatgttttacctccatcctcctcgtcatccattctgtctagttactcagatgaacccgggggagagtggagatttttgtaggacgatgtcaaaactcttgattttttgtgaataagtaaccttgagattcaagagtgtggcttcaagtacaaggcacagtgctaaaagatgagctccagttctcatcatactcatctcttaccaaatgccctcaagtaagtcagcaaaatctaagtacacaatatttgagcagttctcccagattttgtgtgtta

SEQ ID NO: 80186 - DNA, 6176 bp, Homo sapiens
gtttgtccgcaaagttaaactttcgtttcaagccacccagagctatttactatgtcaatagtcttcaacttccgtctgcaataattaaaataagagcagtggttggggagaagatacctcgactcgcgagagttggcctcgccccctatggattattccgcaaaaaggagtccctattttctaagaattattattacgtttggaagaaaatagataccgtaatttcccacaaataaagaaataacactctcgtttttacttttgtagtgtggtagagagatattttttgtatccgtgttggttcttaggcggggcaaggtggggcggtcaaggggaaggtgacatatacagcgggagtggtaagcacttccttttcctgtggcagcagccgggctgagaggagcgtggctgtctcctctctccgccatggtgagtggaagttctcttggctggccttaccccgtatctcggggccagtaaggaaggatttggggttcggagcatagaatctgtaggagatagagcgaggagagggagatgaggaccaaaggcgtctttttctggtgtggaactgggatgtgcggcgatacggcagccatcttagaggcaacgtggggttcccagcacaggacgcgccgggaagcagtagtggaaagcactgggtcgttctcaggagcagtgggaccttctgttagaatatttgcttatttagcctttttctggatgcttgtctctgcctagcttgggaatcatttctattaaaagctttctggttctcttcgcctaaaaattgttcggtgttatcaaaatctttgaatccttagccaactcgtaataagaccagtgttatatgtgtactgcttttccacaaatagtgttcgtatatactatgtagtgttgtgtgccgggggagttaagcgaacaaaacagacactgtcctgactgggatggtagttgcgttggactaaatacgtagtaatattctatggtagtaagagatgaaaacatagggaataggagtggtttggctttaaacagtgatcagagaaagcttaaagtggcctgaaggatgtgagaaagctggcaaagaggagctttagagtgaacacttggaaagtctgaggcaagtgctgggtggtcctgagaccgaaaaatatctggaagagtgtatgggagttgagatcagaagtagagaagatggtgtaggtcagcctcaggattttcagtttactcacagttgggaagacttggaggtttaaacaaaaagtaatatcaccagtctttccactggtgagctttggaaacacgtgtttagtagagggtgagggtgagtgggacagggatggaagttgggatgagtagagcccgggtagacaggatttgctgattaattggcattaaacagcatctccaaaccttacaatatggttttgatttagctattgtgctttataaggcttgctttgaaagttttatgataaacaattctttttgaaaataaaattgtgcagtagaggttgagattctaagggttctagtcatttactgctattttggtttaagggttgtttgcctcaccataccagtctcttctgcaattgagtatttaatggtattgttggcgtatgagaagagtttgcttcaaacattacttgtcaataaaaataatccttgtctttttctttaggcgtgtgctcgcccactgatatcggtgtactccgaaaagggggagtcatctggcaaaaatgtcactttgcctgctgtattcaaggctcctattcgaccagatattgtgaactttgttcacaccaacttgcgcaaaaacaacagacagccctatgctgtcagtgaattagcaggtatggatttatatcttctgcagatattttagggactgctttacagtagtgatgaaattccacttcattggtccgtgtttctgaaccacatgattttctcggatgttctgatgctgtttgctaccatgcataatagtcatgggttggtatgtatgatgaagcagctacaacttttatctcttctcaattttaggtcatcagactagtgctgagtcttggggtactggcagagctgtggctcgaattcccagagttcgaggtggtgggactcaccgctctggccagggtgcttttggaaacgtatcctttgtttcactacctaagactggtcatctctgatggaatttagcggcctgggtctggtttattgatgataatacggtgtaaaaatattacttttttttgtcttgaagagaaggggcttcatttatatggggttattttgcttgcaatgatgtcgtaatttgcgtcttactctgttctcagcgacagttgcctgctgtcagtaagctggtacagaaggttgacgaaaattcttactgagcaagaaataaccttgttgtaattactaaaatttgagaaatgtgattcttgactggaaaaatagatgtgtcgtggaggccgaatgtttgcaccaaccaaaacctggcgccgttggcatcgtagagtgaacacaacccaaaaacgatacgccatctgttctgccctggctgcctcagccctaccagcactggtcatgtctaaaggtttgtaatactttatataagagagtttgatagaagaaataagacacctactatttgatcattagggtgatttttattcacagtaacccatttcaagatggctagaagagaataatttgaatgtttttagcataaaatattttagttcatggatattccagttacactgatttgatcttgacaaatgagtgcattcagttatcaaatgtactccagaaatacatgttacataccggtttaaaaattttttaatcaaaaatatttcgtatcagtgatacaaaatgccccactttttctttcacgtgaacctttgttaaaattgcacattcttttcattctgaagtgtctgattaaattttaatcctttactaaatactaggtctgactacttaaatctgacaaatcaatcagggaatactagcgtaactggggaactattcaagtagtagtttagtatatccttagaaaacttccaacttaaacttgcctgttgcgtacccatcgcatttttatttaactgtcaaaatgatgagattccacttaattggtccgtgtttctgaaacacatgatatttgtggaaattctgacttggcaaacggaataccattttgcttttattggttgtataaaatgtttgattttttttttttctccaaaagtttcaggataaccaagtaagtgtcattggtttttgttaggtcatcgtattgaggaagttcctgaacttcctttggtagttgaagataaagttgaaggctacaagaagaccaaggaagctgttttgctccttaagaaacttaaagcctggaatgatatcaaaaaggtccgttcaatgagcacatttacagtttggtactccttgttcacagtttgtcactttgaatttcagaagataagggcagtatagctaatccttaatgtgtgagagaacaagaacctcagagcccgattacttgggtttgaatcctaactgctgtttatggctctgtgtaaccttggcaagttattgtgcccagtttaatcatctgtaaaaaggaattaaaactctgaagatctattgcagagattctatcttaatcagaatactaaaactgctcactttgtaggtctatgcctctcagcgaatgagagctggcaaaggcaaaatgagaaaccgtcgccgtatccagcgcaggggcccgtgcatcatctataatgaggataatggtatcatcaaggccttcagaaacatccctggtaattaaactgcttacatatattgactaggtatactctgcaagtctactcagcttttgttatgatgagattccacttaaggtccgtgtttctgaaacaaatgattttgtggaagttctgatttatggctgaaagagttgcaccattgatggttgaaacttcataattaataagttctcaggtaccttttatagctcttaagccataaagatgatttgtgtttcttttgttggaatacaggctccctaatttttctttccctttaaaaggaattactctgcttaatgtaagcaagctgaacattttgaagcttgctcctggtgggcatgtgggacgtttctgcatttggactgaaagtgctttccggaagttagatgaattgtacggcacttggcgtaaagccgcttccctcaagagtaactacaagtaagtatctttcatatactaagcacagatgtttatattgtggatattaacattcagaattggcttacatgttttctaaatttattcccatttccccttatgtgcagcaacagtatgccaaaatgagactcacctggtctatatttttggttttttgttttgtttttgagacagagttgttctgtctcacccacgctggagtgtagtggtgtgatcgtggcttactgcagcctccgcctcccgggttcaagcagttctcctgtctcagcctcccaagtacctgggactacaggcttgtgccaccacacccggctaattgtagagttggggttttaccatgttggccaggctggtctggaactcctgaccttaggtgatccacccgcctcggcctccccaagtgctgggattataggggtgagccaccacacccggcctggtccatgtttatgagaagtgatagtgtagtagatattttggagagcatagtggctaaaaataaagcttcagttgagcttcctgttctttggttgattacttttacatgtacatgtcaatcttttccctttcagtcttcccatgcacaagatgattaatacagatcttagcagaatcttgaaaagcccagagatccaaagagcccttcgagcaccacggtaaagtgatacttagagtgtaattctcgccccaaccctatactattggttgtttcaaaaatttgtatgtgtataatgttaagtaaaatgttgatacagtatctgcttttttatagcaagaagatccatcgcagagtcctaaagaagaacccactgaaaaacttgagaatcatgttgaagctaaacccatatgcaaagaccatgcgccggaacaccattcttcgccaggccaggaatgtgagtggagtttttgtttgtttgtttgtttttgagtcggaatctcgctctgtcacccaggctggagtgcaatggcgtgatctcagctcactgcaacctccacctaccaagttcaagcagttcttctgtctcagcctcccaagtagctggcactacaggcgcacgccaccatgtccggctaatttttgtattttcagtagagacggggtgtcactatattgttaggctggtctcaaactcctgacctcaggtgattcacctgcctcggcctcccaaagtgctgggattacaggcgtgagccaccgtgcccggctggtttgttttgtttttgtttttctcttcctgatacattaagttcttacagggatttgattcttactgttttctgcctaatttgttgcagcacaagctccgggtggataaggcagctgctgcagcagcggcactacaagccaaatcagatgagaaggcggcggttgcaggcaagaagcctgtggtaggtaagaaaggaaagaaggctgctgttggtgttaagaagcagaagaagcctctggtgggaaaaaaggcagcagctaccaagaaaccagcccctgaaaagaagcctgcagagaagaaacctactacagaggagaagaagcctgctgcataaactcttaaatttgattattccataaaggtcaaatcattttggacagcttcttttgaataaagacctgattatacaggcagtgagaaacatgacttggtgtgctctgtaaagcttggttagaatttttttaaagtgacattttgttggccataatttagactgttacattttatatagtgtggtataaaatggggcatggatttatactaagtccatggagttcagtggaaggggaatgatttaaaaaaagttgtggttttctaaataatgtggcttgaaaaataggtgtaacaggacttggtcagaaacgcagaggctgttcaagtttagctccccaccagatggaaaataggttaaattctgtaa

SEQ ID NO: 80187 - DNA, 1060 bp, Homo sapiens
ctcctctcagcccggctgctgccacaggaaaaggaagtgcttaccactcccgctgtatatgtcaccttccccttgaccgccccaccttgccccgcctaagaaccaacacggatacaaaaaatatctctctaccacactacaaaagtaaaaacgagagtgttatttctttatttgtgggaaattacggtatctattttcttccaaacgtaataataattcttagaaaatagggactcctttttgcggaataatccatagggggcgaggccaactctcgcgagtcgaggtatcttctccccaaccactgctcttattttaattattgcagacggaagttgaagactattgacatagtaaatagctctgggtggcttgaaacgaaagtttaactttgcggacaaacaggacttattgtagggggtggtcaaaatagtcccggcggggcggggccatgacccctgacgtcgccggtccggcgcgcagttcagtttggcggttccggtaccgctctcacattggggcgggatgtgggagcggctgaactgcgcagcagaggacttttattctcgtctccttcagtgagtctagtctcttcttttggctggggtcctgggacagcacttctttccctgggtgtctggatccccgccctaagcctcttgccactctggggatcagcgctttgccagctttcctggggtccaggagttggggagaggccggttctcggctccggtgtggggttgaccgtgtgggagcttgcttgtctcaggagaaaacgtgtacgtcatcaaacgagatggaaggtggcaagtgttccaagaggcgatttattctttctgctgatggacacacttgccataagtagaggcaccacccgggatacggaaaactaggtgttggcatccttcccctgtttaaagccttgttgactcctaagaatgaaatgtggtgttagtctgttaatctctattattcgaggtagttgccacatcagctacaattgtaatgatagcagattggtgtgttgcattttgaaaacacctttattttttcactg

SEQ ID NO: 80188 - DNA, 1053 bp, Homo sapiens
ctgagcacttaccaccatggaactgtggtttacttgttggaatccagtcaggactgtgaaccagggactatgcttttgtttgatattctcagcatctagcaggagtgactggcctctattaaacatgctggagacattattgcaagactgattaagtgcatggtgaaaccccatctctactaaaaatacaaaaagaaaattaacccggcgtggtggcaggctcctgtagtcctagctactctggaggctgaggcaggagaatggcgtgaacccgggaggcagagcttgcagtgagcggagatcacgccactgtactccaactccagcctgggccacagagcgagactgcatctcaaaaaaaaaaaaaaaaagactgattaaataacatccctgagttatacgtaagacataaacatctgtaagaataaatcacgatctttcacaatatggcaaaagtgaatcagtcataggcctagctcttctgtttctatttcaggaagtcatatagtattagatcaaatatagatataaatggtttcttgaaacagttctgttgggttccttcaatgactaaagatttcttttcagtgtagatcaggctggtgtgtattttggtatgttaatggattacagtttaagtgctttagattcactattttaaaactttcttgaattaaaggataataattaaatgatatcctggagtttcatgcttacattttgaaaaggaaatggtcaacataatcaaatttactgactttgagtaacaagttataaaaatggaggacagatgcttccattttagccatagaaatctaaggcctaggacccttaagtaacttctctgtggttacccactgattcagtaacagatcagaatccaatcatttttactttgaaaggtcatgtggcaagttacattttaattttaactggtgatgtgtttgaaaagacacacagtagaagcaggcaacccaatttcctgctgcctctgagaatcagttgtacccaattgagggcaacagtctattaatctctgtcacagttttcttt

SEQ ID NO: 80189 - DNA, 1104 bp, Homo sapiens
ccagcctgggcaacatagtgagactctgtctctttttttttttttgaaacagagtctcactctgtcccccaggctggagtgcagtggcacgatctcggctcactgcaagccccgcctcccgggttcacaccattctcctgcctcagcctcctgagcagctgggactacaggcgcccgccaccacgcctggctaattttttgtatttttagtagagatggagtttcaccgtgttagccaggatggtctcaatctcctgacctcgtgatccacctgcctgggcctcccgaagtgctgggattacaggcgtgagccaccgtgcccggccgagactctgtctcttaaggaaattttccattgacttgcatagaactggtctttatgtgtttagatagtagaaatatataagtgtatgtataatgttgctcgatacctgttttaacaggctgatgtccaagtgcagttgatcagcaaaggccaaccaaaccctttgaaaaatattctaaatgaaaatgacatagtattcatagtggaaaaagtggtaagtactggtttgactttgtggttgtttaattctccataaccaaatttggtttcttgggaataatctaacgtacacgttttaaaatcagcatcggtgaaaatgagttctcattcttttaggagtaagtgtagtgctgtccagtacaaataaatatgaaccacatatgcaatttaacattttcttgtagcctcattaagaaataatcgataaaattcacttatttctttttttttttttgagatggagtctcgctccgtcactcaggctggagtgcagtggcacgatctcagctcactgcaaccttcacctcccaagttcaagcgattcccctgcctcagcctcccgagtagctgggattacaggcgcctgccaccacgcctggctaattttttgtgtgtatttttagtagagaaagggtttcaccatattagccaggatggtctcaatcttctgacatcgtgatccactcacctcggcctcccaaagtgctgggattacaggggtgagccaccacgccctgctgacttacttcttttgttgttcagttccatgaattttaaca

SEQ ID NO: 80190 - DNA, 1067 bp, Homo sapiens
ttaactgggaccacaggtgcatgccaccaccctggctgattttttttttcttttctttttttggtagtcacaggtctccctgtgttgccttggtttgtctcgacctcttgggcttaagtgattctcctcctcagtctcccagaatgctgggattacaggcatgcgacaccatgtcctgccgagcacttccttttctaaaagcatcagttgcttcctttgctattagcaactaaggtcaatatctttttataggacagttgaaatgctcctgatggcaagattttttggtaccaagctagtttgtggctattcttgccaaaacccaatcatttgtgcttaagggtataaaaataagtacattatgttctacttgtcattattctgtagcatagtaaagagtcagctgctatcctatatgctcttttgtctggttaaataattaagaacatttttaaagcctttagaaaaggaagaaacaagtcatattgaagaacttcaatctgaagaaactgccatatctgatttctctactggcgaaaatgttggaccacttgctttaccagttgggaaggcaaggtaggttttctcttatgctgagtaggggtggcaactaggatttaaattgaaacattcttataaacgttgggaaaaataggcctctagcccttatatcttccttcatctcccccaccccctgataagtatacccaactaaggatagttctacttgaatatttgataggtatcccaaatgtgaccaagaatactgcacttatcttccctttctctacacctctataccaatttattgttgtttctcaattgttttccttatgtgtaatctggttcccctccagtctttcttcctcaaatgaaagcctgaccaagcttctttcctgcttaaaatcctttagaggttcttcattggcttcatgataaaacccaaattccttaagaatgacacacaggaactttcattgtctagccccactggtcctccaccaggggtggtaccatacccagagggaattggaaatataggggagtattttggtttgtcacagtga

SEQ ID NO: 80191 - DNA, 1157 bp, Homo sapiens
caaaacataaaaataagcctgatgcagtggcttgtatctgtagtcccagctatttgggaggctgagacaggaggatcacttgagccaaggaggccaaggctgtagtgagctatgatcgcaccactgcattccagcctgggcaacagagtgagaccctgtctctcagaaattaaagaaattcttgaattggaaatctctatctataatttgtccttactcttgttttaaaggcagttaattggactttacaccatggctcacaatcctaatatgacccatttgaagattaatctgccagttactgcccttcctcccctttgggtaagatgtgacagttcagatcctgaaggtacttgttggctaggagctgagcttatcacaacaaacaacagcattacaggaattgtcttatatgtggtcagttgtaaaggtgagtgctctctctagagagtgtgtgtgtgtatttattcatttgtatagttattgtttcatgtttttttacgaaaattgatattgttatgatgaaagtgcacaaggtagaacttgcattaatcaccataaatctactctggtgtgtaacttgcagcatgtgggaggtattccagaaacaccagaaacagatctccaaaagtctggacaggaggtttacacttctttgatttgggtttcattttatttctatgtgtatattattgaaaaatttcattggaagatacaaactgacaatatgtttccaatcgtagacatttaattgtatttttggtagtagtattgaccttcattccactttattttttatttgtgtttatttacttatttattttgagacggagtcttgctctgtcgcccaggtgggagtgcagtggcgcgatctcggctcactgcaacctccgcctcctgggttcaagcagttctctgcctcagcttccggagtagctgggattacaggcacctgccaccacgcccggctaatttttttgtatttttaatagagacggggttacaccatattggtcaggctggtctttagtagagacgggggttcaccatattggtcaggctcctgatctcaagatccacccccctcggcctcccgaagtgctgggattacaggcatgagccaccgtgcccaacttccactttattttttatttact

SEQ ID NO: 80192 - DNA, 1022 bp, Homo sapiens
aacctaaaaaatttacacaagaaaagacatcacttgtctactgtaagtgttttgcttctactcatattattttcttcaaattgttgtcaacctgccttcctagtttacaggttttttttcactcctaagatgactagatatttttctgtagtatgaaaatgtttatgtttattttcatatcagctaatgaccaaaattaaaatgccttcatgccttttagccaatctttgtggtttcaaagaattgtcttacttttctatttgggatatatggaaagtatatatcccaaaaatatatggaaagtatatatcccaaaagtatggcgtgtgtgctcttttttcttttgggacaaggatcaaaataatttgggtaatggactcttggccatgtggaagcacagctaaatgatctgctgggtacactcttttcaggtaacatccaaaggctttgcccagtatgagctctttaagtcctctgccttggatgatacaatcacagcatcacaaactgcgatcgctttggatatttcctggagtcctgtggatgagattcttcaaatccctccactctcttcaactgcaactctggtaagagtgggccctatttccttttcgggttcatgagactcctaaatgttggcttacttggttgttgctggtgctccatgcctctagccttggcacttgctgagtgtgagcttggacaactctgaaaggcccaccttgccactaacgtctcaccagggcagccagtgaaggttttgtcaggtgatctgatctatcagttgccctcagccctataataatataacttaagaattttctagtgatgaataaagtttttgagtggtggctcaagtgaatccgtgtttttgtttgtttgtttgttttgttttgagacagagtcttactctgtcacccaggctggagtaaagtggcacgatcactgctcactgcagcctcgaactcctgtgctcaagcagtcctcccgcctcagcctcctgagtagctaggactacaggc

SEQ ID NO: 80193 - DNA, 1026 bp, Homo sapiens
aagatagtttgaaatgcaagtataacacttatgtagagaaggtaggattagcactagaaaactgacagactttggaaactttttagaatattaaagtggaatcaggagagcccagaggtcctttgaatcatctctacagagaactgaaatttcttcttgtgagtatccttctagaattcctttccttaaatctatgtttttataaacatgtgtgctattgttgtttttacttaggtttgtgttactcaaaacttcttcagatgttatgtatccattagaagctctgacagtttgggcagttaaattttacttctgtggtagttgtccttacaattaacgggagcattaggtcgttaatagctagatttctctcaccctttgtgttgttttatttttttaattaatttatttatttttccattgtgtgtggatataccacattttgttcattcatcagtcgattgacatcttagttgtttctactttgtggctattatgaataatgcctccatgaacatttacatgcaagtttttgtgtagacatgttttcacatgtcttgggtggagttactagatcatatggtaactgtatatttaccttttgaggaactgccaaaatataactgttgtccaaagtagttatgttattttatatttctttcagtagtatatgagggttctgatttctttacatctttgtgaacacttgatattgtctgttttttaattatagctatcctagtggtagtgaagtggtatctctttgtagttttgatttcatgtgcttattggctcctgcttatttctttagcttaatctcacactttacttccattcccactgaacccccaaccctcatcataccaagctccttgcttgtagctcggatcctgtcatactctatcatcttctggtgtgtgcatcttgatctacctggtatgcacttctcccacctctttgctaggtgagctctctgtgatggttgcattgatctcacagaatggcttgtgttgctgtagaactcca

SEQ ID NO: 80194 - DNA, 2943 bp, Homo sapiens
ctctttgaaaaccccccatttctgtctgtggtcccatcgttccttcaatttcctacgctagaaatctcatatttcactttagtaagaactgttatttctatcaccactacgtactactatagctagaagctgccactctgctgtgtgccacccatggtgctggctggttcagttattttgcctgaaggtgacaacaaactggtaaatggaagagctggcacaagttcatttaaatgtgtgtttgtctaattcaagtctcccttaaaaagtcacagaatcttagatatacatgtggccatagtctgtctgtgttcaaccccctatattttataaatggataggattttttcttttattccacatataccttgctacccttccccccatacatatacaattcttttcctcctttgaagtctctttcactgtgctcatcttagttaaaatctttaccatcttcttctgggaccatgctaatgatgattcattgtttctcaacaggggcactattggcatttgggcaggaacattgtttgtgatttgggaccatggtacacacaccaagatgtttaacatccctggcccccaccaaactccatgccccaagttcgcctatgctcctaatcatttatgacaacaaaaattatattcacatttttctttttttttttttttttttttttgagacggagtctcactctgtcacccagcctggagtgcagtggtgtagtcttggctcactacagcctcctcctcctagattcaagtgatttacctgcctcagcctccccagtagctgggattacaggtgcccaccaccatgccctgctaatttttttgtgtttttagttcaagaggggtttcgccacgttggccaggctggtcttgaactcctgacctcaagtgatccacctgtctcggccacccaaagtgctgggattacaggcatgagccaccatgcccaaccatcttcacatttttctaaagacctccccccgggagtgggagatgatagcatttcaactgggaaatgttgtattttctctttcctaggaatccatccttgatacttctgatagagaaattcttaactagatcatgtcattttcctgccaaaaaaatcaacattggctgttttctgccatatgaagttaaaaaacttttgaagatcccttgatggtttagctactatttcttctaatcctatttcccgctgcttcatagtcgctttttctaccctggttgggatcacaccaccctcttcatcttatttcatgccgttttcctgccagcctatggttcccacatttgagttgcaactgaagttacaagttgtttcactggcttttgcggcctaacttgactgctttttctttcttttttttttgagtcttgctctgtcgcccaggctgcaatgcagtggcaccatcttggctcactgcaagctccacctcctgggttcacgccattctcctgcctcagcctcccgagtagctgggactaaaggcacccgccaccatgcccagctgatttttttgtatttttatagtagagacggggtttcaccgtgttagccaggatggtctcgatctcctgacctcatgatccacccatctcggcctcccaaagtgctgggattacaggtgtgagccacggcgcccggcacttgactgctttttcttaagtccattgagatattgtatgtatgtgcatacatatttatattattttaatataaacttccactttttacatttattcatccccagactacttcatttgtcttatccgtctatctttgccaaagttgcaagcatctccagggcaaacccagtatcctcagtcttaagtcctctgtagcacctatgcacgtggcatcattgttcagagtaccatctttgggatcagaccactgggtatatatcctgagactatcagttactaattgtgtgaccatgagcaagttactgaacctctcttagcctcaataagatgagaataatagtaatatctaccatagagttttgttaggattaaataacatgtactatacataaagcaccacagcagtacctgggatgtgataaacactcaagaaatgttactgcaattaatattattattacatacatccttattgattaaacagtgttttctgctaacaagtttttggggtttttaaatctcctgtaggttttggctgatggtttgaggactggtgtcactgaatggctcgagcccctggaagcaaaatctgctgttgaacttgttcaggaatttctgaatggtgtattacttgttttattaattgagaatttatacttgctatgtttaaatataagtttctctttaagcttgatactcttttttgattggaatatatacaaagctatgagatctgttatggtcagagggacagcttttgttctgaattgctaatggtagagatctaagtaatcctaagaattaataagatttaatttatatttgagattgaaggaaaaaagagatgaatcagtagcctttgaatacctaccatgtgcctgatgccatgtgtcaggggcttttctgttacctccgttcatcctcacacccccacctgatggatatctattataatctccaccagagttcagtgatttgctaaaatccttagttagacttctactgtccccatttaccatttgaaaataggattaggatggaaataatttggaaagcagaaaaatcaagagctaataaacttttgccactttctagacttaaataagctggatggatttggtgattctacaaaaaaagacactgaggttgaggtaagtgattattatcagttagaaatatacacagaaatagcttttaaaattcggttatgctgacatctttcatgttgtaccatcgcaaatggatttgggatatcaaggcagcatttaaggggaattt

SEQ ID NO: 80195 - DNA, 1504 bp, Homo sapiens
tcagctctgctactttctagctgtgtaaagttcggcaggttcctttacttttcttgtgccccaacatcctcatctgtaaagtaaaggtaagaatagtatctacctcgtagtgttccaggattgattaatgttatccatgtaatgcacctagtgcctggctcatacttaagggcccagtgtgtgtaaactactaatattgtcattgttaagtgttgctgtgaatgagtattctcatatactactgatgagaatgcaagttgagatattctctaaaaagcaattttggtaatgtattgagatcctcacaatgtgtcatggcctttgaaccaataattcttttgttaagatgtaccctaagctcatacacataaatatgtatcaagactttatgtatcagaatagtcatctcagcctcatttatattggcataaaaatttaaaggacctaaatttctcttgctaatggaatggctaagtaaataatgatatagctacatatggcacatgtaatagttgctgaaaaaatgatgctgataaatgatatggagaaatgcttacaatatttgataaaaaggaatatacacaattgtatatgaagttaacttttggagagaaaaatctggaaacaaatatgctaaaaatcttaatagcagtcacctctggtggaagggttacaaatgactttttccagtcaggcgtggtgactcaggcctgtaattccaactctttgggaggctgaggctggcagatcacttgaggtcaggagctcgagaccagcctggccaatatggtaaaaccctgcctctactgaaaatcaaaaaaattagccaggcatggtggcaggcacctgtaatctgagatactcaggaggctgaggcaggagaattgcttgaacccaggaggcagaggtggcagtgagctgagattgcaccactccactccagcctgggcaacagagtaagactccgtctcataaaaaacaagtttttccaactgtgttatatttctactttatgaattttccacagtgaacttgtgccacttttatagtcaagaaaaagctaagtaaaaagttaaaaagatttttaataggaattattttaggtaatatgactaccaattcatcattataaaagttataaacttttatgggtgtgaacaaggtacattccagagtaaaggcatgcaagctctgcttaattgggcattagtgattctaggcattttagttttagccgttgaatttttctcttgagagtttctgtgttcatgagatgtttacaagtataaccttactaaccttaccatgtactattagtgcaaacaaagtgaaactatgtgtatattgtaaaaagaccttgcaaagattatgatgaaagttaaagtagagaaatagaaagtagtggggaaatgacattttatgagtacctaaaatgaatcatttaacatttggaacacaaattaaattgtaaactcacagctctttttaatttacaaattatcaa

SEQ ID NO: 80196 - DNA, 1883 bp, Homo sapiens
gcctgtaatcccagcactttgggagtccgacgcgggcggatcacgagatcaggactttgagagcagcctggccaacatggtgaaaccccatctctactaaaaatataaaaattagccaggtgcagtggcatgctcctttagacccagctactcaggaggctaaggcaggagaattgcttgaacctgggaggtagaggttgctgtgagccgagatcgtgccactgcactccagcctgggtgacagagcaagactctgtctcaaaacaaaaaactgatgttaataacttggggggttttgttcaaacaatttatagtgttaggagactaggaatgcaagcttataatttttagtttgtagctactgtaatttgcttctcttttacttgttgggtttatttatatatttattcatggttttataaaattttcctgatttctagctccatagtggaagtaacagtttactaagtaagctcattcatcagtcttatcatggaaccatggacacagtttctctcagtgggactattccagttcaaatgcttttggaaattggtttggacaaactaaagaaagattatatcagttttttcataggtaagtatctttcctggctcaaaaaattaaaaaacacatcacagttatcagtcacagatattctcggattttctgtttctgcttgtccctcatcgtctgtagtccttcctggctttgtacctggttcactatgagatgagcatttcccttctctgggccttagtttccccccaataaagatatcaaatgcattatatccatagttcttgataatttatttgtttttagttcaaacatttgcggttctataaagttagtattttaaataaaaaaatccttttatgagatgctgttttaataccctacacttggttgtttttaatgagagagaagctgtgatcatttttagaataaatattagtatatatttatggtataatatgccaggaaacttggccttttgtgaggaactacttagcttgacaatctctttcatataggaactataaaaaatttatatagattccttaatatgtaatttaagaatttaagaatttaaatagaaatttaaattaatttctattaatatgtaatagaaaatacctgaagtgtttttgcatgtatgtgttttttcttaataggtcaggaacttgcatctttgaatcatttggtgagtttatttttttattctaaaattggtttttcttttattcagtcattctgtgtgcagttattaactgccaataatatgctagccactgtcttaggtcctgggaaatggataaataagacagtcagtgcccgtagttattactgcctagtaagatagacaaaaaagtagcccattcaatgtcatttctcactctctataaatttgtgatacttatatatagttatatcctactgaagccagtgtactatcacacatctcatctatccagaatgcttagggaatgcctttctttgataggttctgtaaagcaatgtttgttttattttctctttattcatttatattacacttgaaagtttattttccaaataatttataatctttaatgtatacttttgggtttcagggtcatcgttatgaactttgttgtattttcctagcccattcagaaacttcagaaagttgaatagtgtctgtactgatctttgacgttcattgaaagatccttttgaaaatgaatttatagtatcaatttgtttatcatttctctcttatgaaaatacaagatagaaaaactatatctgttgtgcaaaatagactcaactggattcttctgaggtttaatttttactattcaaattttaaacattttattaagggcatatatttttag

SEQ ID NO: 80197 - DNA, 3290 bp, Homo sapiens
tgaggctctttttgaggaatagttttgttcataccaatatcacagctaacaagggaataatgcattgcactacattacagctacaaagtcactactggcgagagggatttttcagttctattgtgatcttataagaccactgtaggccgggcgcggtggtttacgcctgtaatcccagcacttggggaggctgaggcagacagatcacttgaggtcaggagtttgagaccagcctgggcaacgtggtgaattcctgtctctaataaaaatatgaaaattagctgggtgtggtggtgcatgcctgtaatcccagctactcaggaggctaaggcgggagaatcacttgaatccaggaggtggaggttgcagtgagccaagatcacgccacggcactccagcctgtgtggcagagtgagaccctgtctcaaaaaaaaaaaaaaagaccactgtaatatgtgtgatccattgttgactcaaacactgttgtatggtgcatgactataatttagtttgaataatagtattgaaaggtgagaaattctatctagcttcttctggtcttttttttttttaatgcctgttatcaagcatccaaatgtaggtgtagaaggcatacctatattctttacaaaggttacacaggtgctttaaatctctattttgcttatattttttcattccaggaatacttcattgctccatcagtagatatacaagaacaggtttatcgtgtccaaaaactccaccatattctagaaatattagtcagttgcatgcctttcattaaatctcaacatgaactcctcttttctttaacacagtaagtacatctgtattcttcacttatatagaaatgtatttcttttgaaatagttacagcctaaatatgtacagtttttattaccagttaggatagaacctcttcatcctgtctttacagtagcatgcatgagtctaagtcagtgccataggcaggaaaggctttggattcaaaaggaatcagatttgacattggctgcatcacttcctaacttccttaggaagtttccatcactgaatcctgtttcctcatctgtaaaaaggatctaataacctcatgtattcgtaaatactagttccttctcttctttatatccctgtcaatttgggtcaaaatagccttgccagccatctaaatgataacaatggaatcaaatagtactactagacctctgtcagtagcattgctgtaattgtagagactgctgtaatttgagattccaattagtttgactagaggttatttggaaaaattctcagacacggactgctggtatcttatgtgtatttgaggcctcaaactaggaagtgaactgtccagtggaaggactgggtttcttttccctctggaaggaaatgtaccattacattttccaaaattacaatttgcctcagttgtagaggggaaagtttgaaattgttattgtttatagaatctccaagttttgttttttttttccccattatagatcagtggaatgaatgagttaactgtaattccttggactctgaaaaccatggaagctgtacttttgtttctcttctgcctcttttttttgtattgtttctctctttctgtaacctctttctccccacgaagcctttctttggcctcaaatttattttatatttatgagaaatatgtctattaattttttaaaagtgaatgagatttgttttcaaagaaaaaaacataacctaagttttgtttgtagggttgttgtgtttgtttgtttacttttgtggctctaaaagtgttcgctgatgttttagttagtagtactcaataaaatgtttcccttacgagctttagactaccagaaaaacgttatgtcaaatggctcttttttccaaaagaggttccattttgttttttcaggatctgcataaagtattacaaacaaaatcctcttgatgagcaacacatttttcagctgccagtcagaccaactgctgtaaagaacttatatcaaaggtaagcaatttttgctaggcatggtggctcatgcctgtaatcctagcactatgggaggctgaggtgggaggataacttgagctcaggagttcgagaccagcctgggcaacataatgagaccctgtctctattaaaaaataataatagctgggcgtggtggctcacacctgtaatcctagcactttgggaggccgaggcgggtggatccccagaggtcaggagttcgagaccagcctggccaaaatggtgaaaccccatctctactaaaaatacaaaaattagctgggcatggtggcatgcacctataatcccagctactcgggaggctgaggcaggagaatcgcttaaacctgggaggcagaggttgcagtgagccgagatcatgccattgcactccagcctgggcaacaagagtgaaactccgtctcaaaaaataataataataatgataataaataagcattttaatttattatcttaagtccacccatgatcctaggcaatttcagtgttcatattcagtagggacctcatgacccagagcttcgtcacctctgaaaccttaatcatctgtgaccatagtctgagagagttctccctcttccttctctcagacctctctctagactgttgggcctctagtctttcatttttctctgtatttgttattccttcagagaagagtggaaagtatagccagaaaggaaatgatggattaggagaaaaatgaccaggatagtgataacagggtctagggtatgactgtgggagtgagagaagggtttgggattagaggaagtagggaactgtgaggctgagatgatagattgttcatccacatggacactgaggttgcctccaatgagggtctccttgactcttctctcagcatatgatatacttgaaatttctctcatactatagccactctatttatgtcctccctgtatttagttctttcttagccaaactctcatcactccccctgaaattgctctggcaaaggtcaccaatgaccttctaattgtcaaatccagtggatgcttttcagtaaaagattgttttctatctagctcattgtgtaattggttggcccacccagtcttcctacttcagtaagcacttttttttttttttagacagagtttcgctcttatttcccaggctggagtgcagtggcgcaatctcagctcactgcaaccacagccttctggtttcaagcaattctcctgcctcagcctccggagtagctgggattacaggcgcccaccaccac

SEQ ID NO: 80198 - DNA, 2116 bp, Homo sapiens
gctgggattacaggtgtgagccactgtgcccagccagattgattttatctatcaggtatgggacagtgctgagatggcaatcatttgaacattaaagtaatatttctggacagattttagagtgataaacaatcaagtcacaacagtttgtatactatgatgccatttttgtaaataattcataatatacattcattatatacagcaaaatcttaacattaactttaggaggggtgagattacaagtgtttttttttttaatttctgcttatttttattttctaattcttaaatcccagcacaagccaaaaagagaaagagaaaaaaaggtaattattgtagaacctgaaaacagcaatgtatggaaaccctcaaagcagaaaagggaggaagatcctgaagattctcttatgaagctccaaaattgataatcctgtctcagctctgcctcctcaggaggagcattagtagaacagcagtgatgaggacacagagggagcagacagtgggtaccacgatctccgtaaccatttgcatgtgacttagcaagggctctgaaatgacaaagagaacgagcaccacaaatgagaacaggatcattttagtaaatacagctttatcccaaaagctttaactgtattgggaaaacttaaaaaatagcatcctcaaattttctgattcttatttgccatgaaatagaacttagtaaattaaatgttatttgaaaatgttataagagctttgtaaatatttcagaaaatatgggataaatgcctgaatttggttcttctacaggtgctataataaagtccatctctcaatacttatactttctaaattcatctcagaatattagcagccatattccacagttcctataatttttactgggggggatttgtgataggaaagtccttgggaaacatttccaatctttcaaaatattattgtgtatcttaagaagtataggaacttgtatgttgaaatgttgtatggtagttcttgtatagttaaataataatctttttaagagttaatgataagcatatgttatgtgcattattaataaaatagtggccacttaggtaatacccacttttatcttgtgtgctgggtactctggttactgagataaataaggcactggacatcctcacgtggagttcacaggctcatcagtgaattctgtaccacatttcaaccttgtttattttagtttaatggaatatacattcttagtattgcctgattatttaaatttgttgagggggattgcatgttgctttattggcctgtaaaaatagctagtttggtaagatttggtctcgcaccttccatctttgctaccacattaaagatgagcttgttaaaaaggaaagcatatttctctgattgcccttatggagaaataaagataaaattcaaagaaacaaataatatgtgttggcatttcttgatgcatagttgcatctttgttattcgacatctctgatccttttagaccccattacataggaaatgatgtcttctatgaagacagggaccttgttttgttcctggctatatctcatgacttaaacattccctggcaaatagtgagtgcttaataattgcttgccgaatgaacaaatataagatctcaagtattcttttttccttcatcccagttggtatagtggttggcttttcctctccttgcccaagcccactataacaaaaatagtaggtatataaatttataggtatgattctgaaagaataaaacttgaatggataaaatggataaaatgtttatctttcatggtagattaaatgctttaaaatgcttataaatagaaatttgacattgcttcaaagaaacctgattttaatcataagtagttttggaagattgacttcaagtagagccacattttgagattttgaaaatgatatgtataattatttagtttaattattaaaggaaaacattgaaatatactgactcacctgcagcaagcatctgattgttgatagagcaagtttccaaagctttgaggtaccaactttccacctaataaaaacccacttgataagtaatgttgtcttagactaattttttgctgtttcaaatcat

SEQ ID NO: 80199 - DNA, 1036 bp, Homo sapiens
tgtgcctttgcatactttcgacaaagctttgcagggtaacccctctctggagtaaagagcaccctctttattccccacataatatcattccccacatcccttgggtgtcaagtgccagggtcttccatagtccttctcaagttttgtgttcagcttttgtatagagtttagggtcttggaggcatccgtgagtagatgaagaagccagatactggattacctctgagaactgccccccttctttgttctcctcttgggatttcctgcacacgccccaccctcagccttgcttacctggccaggccctggtgctcaggtgcagacaggcagaggccccagcaggtcaggaggctccagcaggccaggagcttgcagctgccttgctctgacctctgtcttgtggggaacacacactttagcctgtagctagcctctgagggatgtatgggaatccattagctggcactggggttttgcaggggtgggactggcagggagtcacaggctcttgagcctgggagggctctgaatccctccattctggcttccctggggagagtcagcacccaggctgggagcacagagagggtcaggttgtaggtctcctgactctgtgtggaaggggaaagtgggtctaggatggtgcatttgtcctaggtgttttgtttgagtgtggagtagtgtctggagaggaaaggaagtttcccctcagtgatgattcctgcatagagggcattgatgggggcaggtggggaggggaagtgttgatgaggcaccctactcccctcatggtcactccagtcccaatttaggagctatgagcagcccctgatctgtggctcatgccaggctttctatgtactcttttccccttactgacagctttccctggaagtgactttctcccctctgccaactgactccccactgcctctggggaaggagaccagtatttatggttgtcttgttcctggtgatttttttttttttaaagtaggtcccttccactctcgtagaagcccctggcaggtgtatt

SEQ ID NO: 80200 - DNA, 1101 bp, Homo sapiens
ggagattcctgaagttgattcctcaggctggatgtccaagggggttggagtttctgatgtctttctgtctccctctcttttctttctctccctaccaggtccacttctttcagaggggcctgcggtgctctaaaagttctcctgttaaagtttagagcaaattggttattattttaaaatcaataaaacttttaaaagtactaagacaacttctaagaggggagtggacagagggcctggtggcagctcacagtttcttttctgacctttggtctcacccaccaagtgtcccacctgagtgcccaccttgcccacctgaggtaatgccctggggctccaccagtccagatccacagggcgcagccatgtgggagtggcggctgattgttacccagtagtgttgatagcacattattcataacagccaaagagaggaagcaacccaaatgtccattagctgataaatggataaatgaaatatggtacgtccgaagaatggaatatcattcacccatgaaaaagaacgaagtccagcaccaaaacgtgctacaacatggatgaacttcgatgactttgtgccacatgaaagaagaagccagccacaaaaggccatatattgtatgaaatgaaatgtccagaatgggcaaacccatagagacacaaagtaagttagtggttgcccagggttttggggttggggtctagaaagtgactgccaatggggatggtgtttctttttgcgataaaaaaaatgtcttgtgtttagatggtggttgatggttgcacaacactgtgaatatactcaaaaaccactgaatggtatatttttaaaaaggatgaatcttagggtatgtgaattatatctcaatttttggaaagggtcacctgatattggtctgtaactggcctcccctgtaacacctgcagctaccttcatgtgtggccttgggcaggtccttcagcaagtgggaccttagtttcatatcagtgaaaagaaggaattgagttgggtgaaccccaaggcctcttctgtctttgacactctaaatccttgtgttgtggggtggagtctaaagccttcatacttttttagttgcctac

SEQ ID NO: 80201 - DNA, 1053 bp, Homo sapiens
gtaagttgcttgaggtcacacagccaaaggtggcagagctgggattgagcccatatctgtctgtgccccaagcctgcggctttaactgttgaggggatttgggcagcagaggaggtgggacaaagggagggcttcctggaggctgagtttattatttgggaaaccagtaattaaaagcatgtagaacctgaggtgtgagctccccaaccctggcagtgacatgctgtctcctgtcttccagaatctccgccacctccctactctcggctgtctcctcgcgacgagtacaagccactgggtaagtgtgccctccttcctacccttgcagaggtgtgtcccgaactgggtcctcttcagcccagtgtctgtccagcctcagggctggagggctggagggctggaggggaggggtgaaagccggactggttgctgtgaaatggggtgaagttgtacaaacactcccacagttgggccaaagcagacccagcttctgcagcaggctatttacatctcgaaattccgcggctcatcattaacctctctgtgacctttttaaacatgggcctgtcgaagatgaatgggttttgacttatgcatctcaccggaggtgggttggcatttctgtgtctctttcctctctcttgggccccccagccttgggttattctcctttagagtgtattaattagtagtatgacaaataggttgggcatgaagtctttgttgagaggagctgtacattttccccctttttaagccaagatgttcacttgagcagaaacaacaattggagtgttaaaaaggaatgtatattggtacacaaagcccctggcatggactgtcccctaggtgagcttagtggagttggtaattttagacaactcccattcagaggcagaacatgttttctgtaaaaccttgagcctagatgatcagcccatattctggggtagatgtaagtggtttcaaaagtagagattgttggctcacgcctgtaatcccagcactttgggaggccaaggaggacagatcacttgaggttaggaggttgag

SEQ ID NO: 80202 - DNA, 1042 bp, Homo sapiens
tgacttgttaaaacagtttccccagccctagcgggagggaggaaggaaggaaggaagaaaggaaggaaggaagcaagaaggaacaacttcaagaattttaatggttgtaattaagtacagcaactatgaattgtttaggggcttaatttaaccttacccacggaggctccaagttgctacttgctcggtcccctgaacttgggttatttctgtggtcagggcaatggcagcgttttcaggtaccagcttcaccacagtcagcactttccagaagagttcctgggctggctggtctggtctggggtgatcctgagatggggttacagggtgacatcagaaagttgggagggacatgctgccctttgcaagcacacacatccacacacgtgcacatgtacagagatgcatgagaaagaagaaaaaagagagcgctgccccacggccaactaagttctctttttctttcctcccacagatctgtccgattccacattgtcttacactgaaacggaggctaccaactccctcatcactgctccgggtgaattctcaggtcagcattttttcttgtgcattgctgttgtgttgaaatttatcgaaggggacagctgcggagggggcttggtggaagactttttgacttcccctcttctttttgtttcccttttcctccaatccttggatgggaaggttgccaatgtttcagtccctggtgtttttggggttaagaacagtctgtatgagtgaaacctgaagataacttttaaagcacctgtctaccacgttttaaccagttgtctctctcttgtctcacttggaaatgataaaagctcagcacagctctccctttcgtgtttagaaagagatcctcttcccccagctgcgagaggcagcaaagtggatgtggtatacatttgtcttcctcctgtcctcactccaggggagggaccaatgtgaagggtcagaagattgggggaattggagccggttgaatgagcttgcagggaggatctggcaagtgaggagtttggcaaagccagtg

SEQ ID NO: 80203 - DNA, 1068 bp, Homo sapiens
agggggcaagtggcttcaccaaggtcactggggaggggggtggtggagggaggctagaatgcagagctttaagcagatctggagaccttacacctggagtctttgatgggatttgggaagaatggaaagcctagaacttttggggtaccttcagaactttggcactctggtttcctcgcctaattcagggcgtggggtgctgtcacctgactgtccaaggcccctgtcaggctgtcctcttctctgctgtatttcctttcctcttccatttgcttgatttcagtttagtttggggaggaaaggaagagaagctagttaaataaattcatactaaggtgtgagtggctggtaggcaaacttttttttttttttcaactttaaagtagaacatgccataattctcagaattgcaggatgaagaaatggcagttccgagaaaggctggtggcagagggcagggttctctcagcatctctgactccagcctagaaaaacaatgaacatgtcataaggagctttaagccctgggtgagggaaggagccctggccaggccgggctgggtgagctctgagtcacttagcgggagcctgaagtggcagggctgcttaagcacccgggcctgcctgactccatgctgtggggctggaggcggcacactgggcaagcttctttaggaccagtagctcccctctgctgtcttattctagtgcctgtaagataaccattcaagtgctttattaagcatcctgtccctccattttctcacttgtaaaatgaggatgataataacaacaaacatatccttaatggtgagggttaaatgagatactttacccctgccagggtctagcacggggaaggggatggggacgcttgttatggaacactgggcagggccctcagggtgggagctgggcagtcactgtccagctatgtgtaaggcatggtctaagctgcccatcactgggatcgcgcagtccttgctggaaccttggccctctgtgcctggtatctcagtcctcacagcatgtgggtttctttagagctgtgttagtgagagcaggccc

SEQ ID NO: 80204 - DNA, 1009 bp, Homo sapiens
tgcctggctctgggtgtcactgcctggggaatgggcaggctcttcctgtgctgcagaagactggaccgagctttgcggtattcaggggttcatacttgcatcttctaaacagcctcctccgaccaccttccacttgcacgtggacatacactgttcacccaggtcccttgtgtgaattacagccagtggtaccgggcaggagctcagtgaatgcgtgtgcccattttattttctgtccctcagcattgatactatgcggtggataggattcatttattctcattttcataccatttagtgatttctctgagtgccttctatgctgggctttgtagggttatgcagaatgaatgcctactagctgttcagcacagagttgggcattttacgtagagtgtctcccagaatccttataaccatcctgaggatgggatatgattaattataatccccattttacagatggattcactgcagctcagaggaaagttaccccaacagggtgggagctaaaagtccatttaaggcaacagtgaaaaggacagaatgaggctttgtggctcctagcagaggtagcagaggggtgctaggtaaggggaggctgtgtgggctgggggtgctaatgtgtctcagctcaccaagcagataagattccagtaggggctgagggataggctgctttattcttatctgtaatcccctcctctactgcttatttgctgtgtgaccttaggcaaacaccttaccttctctgggcctgtaaattactgcacactctcatacggtccatatttgttttttttctagaaactagcagcagatcagttgtgtgcagaaaaaaagctgtttattggttccagtgctgtctttacccttcaaagccttcctaagggtatgggggtgatggggaggagtcatggcccactacgaagggccactgccgtgttgaagaatcaccaccagtttgaggatccagcagaaatttctgtttgttcacaggacggtgcca

SEQ ID NO: 80205 - DNA, 1039 bp, Homo sapiens
atgcattctcctgcatctgggaggaggctggctggccagaaaggggatttaactacattaattctgtgactttcagttcacagcccctccttggcatgatcccatccctattccagctgtccccaggatgctgggtctgtaatggcagggagagaattccctggctctgctcactcacgggatgggagaatgtcccagcagctgcctccatacccgagaccagacatgccatattcagggcatctgacaggaatgtggctgcctgggagaaacaggccctgacccaacaccccgggcctgtgtgtattggctgaggttcacaaagacgctggccttcagtccggcagattgaaaatatttttcaatgaagccccagtatttgactggagaaacaataatattccttctctggatgtcaaacatccggataaacagaagccctttttttccgcctcctctcttccccaagtgttacaaaggatgctctgacatagggttttggaagagaattcacccagccagggtgagggccaacctgagccacaaagagtgcttatttttttaaaaaagggggaaatatgtggcccattgcaggtttgctcaaatggcctggtttcttcaggagcaagagtgcgagacctgcctcttgagatcggatgactcagagtggtgtggtggctgccactgccacttgtggcctgggggtccaagccctatccccagcagaaggctgggacgtgggagaggttatcttacccagaggtagggttgtggtgcagccagaggcagggtgcgtatggggtcaggagtagagagggaggtggaaggcagacattaattgaagaactcctattatttgcattgagctggaacccaaggattaccaagccacagaaagtcaatctcacccaacagatggacaaatccagtggatgcggctaagcccagaggttaaatgaaggcattcctaacaagtcctttacgaaatagaacacattcaggagatccattggagaatttctgggaaagaaaggagagg

SEQ ID NO: 80206 - DNA, 1059 bp, Homo sapiens
tctgagatcaaccacattctagctgcgtgacattgggccaataacttaacctcactaagcctcagtttcctcatctataaaatagtaattataagactttcctcactaggtgattttgaaaattaaaggtaatgtatattgacagtcagacccaatgcctggcactaaatagatctcttcatttatgctaaaaacacatattgaaagcatccatgggctggacctgagctggggtctaggggccacacaggacctgcactcaaggaggataccagttagaggctctgtaaattgcagctattcatagtaatggaactactagtagtattaataaacaaaatgttaggaaattctctagccagagtgaatgagccaagccctgtggaagcccgcctgggaaaaccaaggacatgagaaaagggaacacagtgtgaagcaaaatacaggagcaagggtgtgttttactataaattgtcctttgatctttttttcatgggtggcttcgattttccatttaaccgaattcaagaatcctctgacgaaagttttcattcatagaatggatatttacgtgtaggttgctttcagcagaaggaggttcagaggtgactgcaacatgctctctgccctcaagaaacttataggggaacaagacacacacaaaaatccaatcacaagtcaaacctaaaagacacacaggtgaaggggatggagattcagaggtgggagccacaggcttcatggcatgtggcatttgagtagactgtaggacacacaggaagagagagtgtggcaatgggagaggtttgggatatggaatcggatgacctagcttaaaatttacccttagaaaatccacagtttctctgagccttggttttctcacctgtaaaatgtgaataataatagtaataaaacttctctgcattgttatgattattttatgtcatcatcatcatacacacacacacacacacacacacacacactcacacactaagatttcctgagaaatgtcagagccatgggactgagaaacatctcttgagattctggtga

SEQ ID NO: 80207 - DNA, 1973 bp, Homo sapiens
ctccatccttggccacctgcttggggcagttgtacaggggctgccaggcgagtcaggcaggcacaaagcaacatctgtccacgggaaccgagggcaggcctcccctggaaataaatgccacatatggtgggagtgcggacttaaattttttttaactgggtggatccagtcaataaagggggagggaaggcggtgtgctgtctggggaagtctctgggcgtgtgatcgggagccagaattgacttcagaggaggtggtgtgatgtgatggtcagagagacctgggatttggttccagctctggttgttaattcttctgtattccttccgtgggggtggctagggtagagtgggtgagtatgctacttctctttctggggaggggtctgccaaacctaccttctccttatctgcctgggtgcattgaagacaagtgctttatgtattgaaacagaagaaaaaaagtggtatcaattgtaaaacaggcagctgtgaaaagtgtttcacagtttacaaagcactttcacatggttttctgaggtcctcaaaaaaagacagaaagcaagcaagcaaccagccatggaaagtagataaggttgttaggcttaagattatcacatttttaaagcagaggaaaccttaaaagagagaggtgaaaaggcttgagtcatagacatggggttctgcctgaatgtgctctttctgctgccccatgctgctttatactttgaagatcctgaatacattctttgctgaatgctaaagctgtgttagcttggggagggccctgtggatctttgtatgtgcggttgcttctttaatctttgggctggtgatagcttggcagagaggccttgctttcccttgccttggtaggagtttgtcctctgtggggccatacctttggcctgccttttcctcttccaaagtcctgctgagactttggaagcctaagacgtgtgaacgctttggatgattctgagagttcaagccaacctgccctgtggccttctcgtgactttgttaggactgaggcatcttctgcctgcctggataggactgaatacaaaagtagattttttttttcatcttttttttcagttagggaaacccagttgcttgggtggatccagacaaaatggattttcatccttggattttgtgcccacgcctctgggtcaccttgtgtcccttggcaacagctgctgctgttttggtcgtgggcagaaaactaaaggccacgtcttggggaggtggctggtttggccctgtgctggtgatatcaatgtgtctgctaagccccatagattgcagtgttgcttgtcaaattgtctgctttcaccacaactgccttttagtttggaaagtagagaaaggaaaatgtttaacttagtcattccccctgtgtgtggggggttggtcactgggtgcttaaaaacactctgcaagatctggactccggggtttaaggagccctcagtctaaggagattaagccaagtgtgttttggctaatatataatcatgagcagcaacagcaacatttggcaattagagctgtatactagggacttccagaccacaggcttgcttctctgtgacaccagctctgacttgtttcaattatcaggggagctggcgtgatacacacttatcgacataaagaaggtgaaagagattggtgccaaggaagtggtaagagcttcatttagatacaccaacaaaggggctgtcaggatactctgaggtctggcaggattggcagaatttacacaagttttataacagcctctcatgcctcacctgcttgagtacctgagtaaagctgcaggtatcttccttgccagtttataagaatggaatcaaagcatttgccgctgaatgagagttggtgtgtgagcgttatatgaggaataaggagctcggcacacttaaaacttagttttctggtagacactggtagcttgtacttcca

SEQ ID NO: 80208 - DNA, 1610 bp, Homo sapiens
aaaacttaaagactccattccctcccccaaatccccatctcatagtgttggttggctggcaagagaactgcccaagaaggctgctcatgatggcagcctgctgaatgtgcagggggtggaagttcaccagccatgtgcagacgtgaatggctggtgcagtgttggatgggactaactcctccctaaggaggggtatgaccttctgttggcctctgacaagtccctgagccatggagccttcagtcttcccatcttcaagcacaatggttcctggaaacagtgggaagttgccatcctaagcccaccctacagaagtttggtttctaattttactgtgttctaagctttagaaccgagacaattccaagagaacttgtccagttcatttttatgccttcctttaatgccgtaccaggtgctaatttctgtgccagataatgcggacaaaatagtgaataaggcagatactgtccctggtgccttctgtagcttctagtccactggctgtgaaacacaggttctttggagttgtaagaatgctgtatgtgttcactctttagctaatttgtaaatactgtttttttggtgccaaaccacatcccccaagctctgcagtttattgacttgacaaggatctctctctctctttctctttctctctgtataacataatcctttgtttcgacttaacagtttgagaaataaacaaatctatagcatactatccactgttggttatctaagacccttcctataaacagcagcctgccacagtggcaactgctgtagaatgttttggcagagactcagtttaaaatgaaaacacagtagaagcctattaattaagaagtttggctaattctggactaggcaaaagtttgtttagcaggcctttttgccccataaatgctgtcaaagaaaaattaataaacaagagtttggggattattttggaggtaggagtcagcagaccttggtaggttctagacgtggctctgtttctgattagctgtgtgacctgggacaagtcaccttctttgggcctcgaatgttctcaactggaaaataggctagataaactctattggagggcctttctaacttggaattggtattcatacaagcattttattttattttattttattttttgagatggagtttcgctcttgttgcccaggctaaagtgcaatggcgcggtcttgcctcactgcaacctccgcttcccaggttcaagtgattgtcctgcctcagccttctgagtagctgggattacaggcatgtgccaccacacccggctaattttgtatttttatcagagaccagtttcgccatgttggccaggctggtctccaactcctggcctcaagtgatctgcccgcctcggcctcccaaagtgctgggattccaggcctgagccaccgcgcccggccacatacaaacattttaaaagctcccagttgcacgcatctagttgatcagtgaatgacagatctttcttaattattgatgttccaagactctatcagcctggtgtcaattaatttacataagtaaaaataataaaattgtaattcagcctttaattttggtgatttccctccctcttc

SEQ ID NO: 80209 - DNA, 1012 bp, Homo sapiens
accatgcccagctaatttttgtatttttagtagagatggggtaggactccagtattaagaaacactgtgtatggctttgcctttgaaacctacagagttatgaatctggtcccttttgctgctaagtgttgcatcacaaactgccaagccaagttgtaactctgaggtgtcaccattttttttttcttttcaactggacatttgaaaatagtaatgctttttgggtgtgtgttttttaaaggtctgtttttacgctgtcactgctcaaaaatgccaaaaggcattttttccttaaaaaatcacctctgggctaagcccaaatgtggagtaatgaatccagaaaggactttttgagtagttacaagtggctgaaagcaggcactggtgatggaaattgggtttttccttttgcttcaaatcttcctggttgtaaactttttcttacccttattgaagtcagactcaaggtgggtctaatttctcccagcccatgggaaggcagagtgaattactgcttgttgtgccaaccctttacattttgtgtgtggctgtttgtctctacccagacaggttcttcacatattacctggggagcaggagagggggaggacaggaagagcacagttgggcagaaagagcaaagcctctcaagtctgatgggtttgggtttgagtctgacagttattagctatgtggtgaccttgggtactttgcttcaacttattgagccccagtttctgcatctgtaaaatgaggatgaaactacctacttcatagaaatcaacccaagtggccgggcacggtggctcatgcctataatcccagcactttgggaggccaaggtggatggatcacctgaggtcaagagtttgagaccagcctgaccaatatggtgaaacctcggctctactaaaaatataaaaattagccgggcatggtagcgggcgcctgtaatttcagctactcaggaggctgagacaggagaattgcttgaacctgggagccagagctt

SEQ ID NO: 80210 - DNA, 1012 bp, Homo sapiens
tgtaatcccagcactttgggagccgaggtgggcgaatcacgaggtcaggagttcgagaccagcccgaccaatatggtgaaaccctgcctctactaaaaatacaaaaatgagccaggtgtggtggcgggtgcctgtagtcccagctactcaggaggctgaggcaggagaatcacttgaacccaggaggcagaggttgcagtgagctgagatcacgccactgcacttgagcctgggcaacagagccagactctgtcttaaaaaaaagggggtgctggagagcatgtggggtggatagggctgactagagacctttgtcagggtgacctttctccagagagcccagtaggctcagaaggaaggtccctcagcaccctggcccacacagttccagggagaccccaaataaagcatttgcacaaacagtcctgagtggagcacacctagccgccttctcttgcaaagtgggcctttaaaaaaggggtgtatggctgcttagttctgaagaggccaggctaggagaccccagagggacacccagaaatcccagatatacctcctccatctgctctgcctgccagatgacccttgctactttactgttttttctttgagcctcttggtgatcttgaatagcagaaaaatgagccaaatttccttcaatctatgccagtcttcgtcctcagcctcccggtggggtgatgagtcacaccagtgggaaagtgcactgtatacttggtcatgtgcagagcaccttcccattggtttatctttacaactgccctgggtggagacatggcaaggtggtcctatccctattttgcaggtgatcaggcacaacttacagttagcgcaggaacagggactgaggccagccctcagttctttgacagagttctttgtctacactgtgttgcctcagaaaaaaatgcccatggggagtgtgtgtgcgtgggcatgtgtgctctcctcgtgtccctcagaaaagaatgaattcttttccaactgatgtcac

SEQ ID NO: 80211 - DNA, 1118 bp, Homo sapiens
gataggacctgcctccacggtaacaaatggctgaaggcggtttggggtgttgccagtagcctgcccttccgcagtggctaaggatccggtgttgcggtgatacatgatgtgacctcttcaaccagtgagtcactcacccccagataaccacccggtactttcaggggaaaccgttgtatcattgtggctgtggccatggtttctccaaaataaggtgtttttagaaatgaaagtacagggattggtttccttagattcattgtcatggattcatagttccccaacctttttcacgtaaagactcacctctgtttcctcttaaattgtacatttggtgtctgttttatatattaataataactgacactcttctaaagttttttggggaaagaaaacataagtttaccaagctctcaattctagaaggtaatagccttctagaattgtccatttgcataagcatttttatgcttattgctgtaatcagtgtgtcagtcaaacgggaaggaggaactacatcaggtatttagcacaaagggaatttaatacgggaccttggttacacaggtgataaagcagctgagaagccacaatgggaaggtgaggtgacccagaacttggaggaagccgctgcctttaggctggagggacaaagggaacaggtggtgttcccagagcccagggttggggtcaccagtgggcctgtctagagcagttgcagctgcttctaaaattgccgacccaaggtagaaaaggagagaggggagaaacactgtggcctctccctccctcctacccactacttgctgtgagagcctcctattatttaaaccctgctggaggcctcctgatctggagcctggaaagtcagggctcagccccagggaggacacagcagagcacaggaagatgagggatggatcagagggcaaactggacttggaccagcacagggtgcaagcctgatgctctaattttatattttatcagcattttcttatatgtggctttcataattacacatattttatcaagtagatgaaccgcatttaaccattccccagctgttaggtgaacactttaaattactataaatcagcagttctcaaagtgtggcc

SEQ ID NO: 80212 - DNA, 2357 bp, Homo sapiens
aacaattcctgtgggtgctaggaccaaaagtagtatcctctaggaatcctggccttcaaggtctaacttccaagattctgtgagtacgattctagggagcctctgcctcagacttctaagtagttcttcaggctgtgctctagaagttactggaatgaaagaaaaattgtagtgtttgaaggtcttcaaggatcctggtcctctcacactgtcactcttagtcacatgacctttgactgtccattccctactaagccttggtttacgcatctgtcaaatggagcattcgtgggtgtgcctgccttagaggatgagacccagctgagatgacatatggagaaatcgtttataaacttaagtactggtgttaggaagagctaacacggtgagtcttcagtgtttctttaagtgctgctcactactgtcctgagagactccaagaagcagttactttgtttgggcctcagttcatcatctgtgagatgagaggattgggctttgtgcctaaactgcccccccaccccaccacccaagacagattaaaaaagaaggaaggagggagggagggagggagggagggagagagcgagcgagcaagcaagcaagcaagccagcaggatttggaatcgtcccctaattggaaccacaatcgcaggtttcagggactcaggaaagggtgcagcccagcttgtggttgagaaatgaatgtcagatgttaggaagaaaaaggcctatctcaacatagcaggggtttcttactgcccctgcctcctcagccccggtagcctgtcactccctggcgaacagcttggcagcacagaggcaaaccacagagtacatttgaggcccagatctgcttatttcgagggtggggccgcgtttttctcctgccacagtgagctaattaaagaaaacaagcttcgggagttgggagagaactgtccacaggacacttggggaggcttgctttggttgtggaggcctccacagcccccggaaggcaggtggaagtgggcatggagggtcctacgcatccccagcgggggtctgagggcccactgttgctcagctgggggatttggggacggtgggagggcatacatggatgggagggtggactccgttcctgagggggccagtgtggaggagggtcaggcagcccatggagatgggacagtgttctgaaatgcttcacaaatgtggacttttgccccaaactgtggacagagcgtatgtcctgagcgaggatcaactctgtgagtacccatgataattctcctttctgtggttgccgccctgttgattcatgtgtcagccttagagaaagtggctgtgacttctgcattcctgggaatacactgacatgagaagaagtagccgctcttgttcacagtcacagggctggaaagtgggataaggactaaggacttctgtctctggattcagcatgctgattatggggaaaagcagacatcaattcctcatgtcttgtaagcatcactgtcctccaaagttggagcccagctcagacagctgcatagtattttatagagaaggtgtgttgttgaaatgttgattatgcaaattgaattgtgttttaagactactgggaaaaccatttaaaggaatcctgttgtaagtcattttgaaaaatggagaattacaccacctccccaaggattttctgttttggtaaatttcatgtggcaagattacttgaagaagggttccagtgttttgctagcttataatggttactgcataaggaaggtttactcgccagaggtccgcatacattggagaactgggggaatatgtaatacttgtgcagaaatgttttgattcatgtactcagaagatgggatctggatgacacctccagcctattgattcccaagtaaggtgtgatgacaccaccaccagcgaggtgtgctatgaggaatttttgttgatgatgaaaagtgaatgctaactgattgcacaccacgtgccccataccttacatagattatcttatttaattgttgctaataatagtactacagtctgtgaatgatttacttagcaattaattcaaaagcatattccactctacaatggaatattttttgagccaagaaatgaagtacgtggccgggcgcagtggcttgcgcctgtaatcccagcactttgggagaccaaggtgggtgggtcatttgaggtcaggagttcaagaccatcctgaccaacatggtgaaaccccatctctactaaaaatacaaaattagccgggcatggtgccacatgcctgtaatcccagctacttgggaggctgaggcaggagaattgcttgaacccaggaggcagaggttgcagtg

SEQ ID NO: 80213 - DNA, 1121 bp, Homo sapiens
gaggcacctgatctgtttaaggctgtgtgagtagaaccaggtcctgccttccggaagttcatggttaaattgtgttttcatgggtcacctggaaggcgagcttgttcagaatgaggataattgacccagtgaatccttcctgcctcgaggcccaccatgttattcagatcagtcttgggggaaatgctgtgaaagtgtgtgtgtgtgtgtgtgtgcggtgtgtgtgtgcatgctcgcgtgcatgagtttgtgttgagagaaagaaaaaagccaggagagtaggatgagtcagatttaaccactgttttttcccttttgaaacttgttatgttcatacacatacagcagtcatgcacttgctcagaaatgtgtgaaaaccacttaaaatgtgtgaaatgcagccctttagaaagtgtgccttccaccacattcttttgagcagtggagtggatttgtgagtgttcatatctgtcctcatctgtgggaattgtatgtccaaggtgctaattcagggccatactgggatgacctgtgtgtatagacttgtcctgggtgagatgggagcaagaccatccaatgtatgatggggaattctgttaaacaggtagaattctgaacctcttggtggtcctggctggtcagttgcagggagtgacgttgaatggactgggaagatctggatataccatgtttctgtaggcatgatacgtggtcccttagcttggtatttaaagttctttggaagtgaccgctttctggatttacctctgtgcagcccctctgctcctcccaggtgaggctcatcatagctcctcttcaatgtgctttgtccacaactgctgccatgttttagctccccattacgtttcctgggatgctctcctagactcctctgtacctttcttctttcaaacccaaaacaggtcccatctccttagtcttaactgtctatgaatggtctgttgcctcacttcccagctctggtatgtagtacgtgctcagtacacatttttgaatgcattaatttggctcttttctgtgaaggcagcttgtctgtgtgtcattcatctgcccaaatttgattgtcaacttcctttgtatggagctgtactgttcttttt

SEQ ID NO: 80214 - DNA, 1042 bp, Homo sapiens
gtagccactgagcactggctcttcctggcttcactctctggcatcaaaacttatcagtcctacatctcagtcttttgcaaggtgacacttatctgattacctaattcacacgaaggtgttaatggtggtaatggcatagtatttattaccccaggggacccagaacggtggtatcaaaacatatcattccccagtggtttaaaactctggtagctttccagggagtccaagtggagtccagtctccttagctgagttcacagggccccgtctgcacgacttggcttctgtcggcttccctagccctgacttcccaagccttagtcatcaccctctctcccacccagggctcagcacagtacctggaacagtcaagccctcaataaatgtttactgagtgcattaaaaaaaaaaaaaagattttaatgagtcatgctttaactgaagattttagtgtagtcagtcattgggccttggatgccaaaggaatgacaaatggtgggaatttcaggcacagtgactgtgatagccccaaggaaaccaagagagaagtagctttatctgggtggaggggagtgggcctttcagagcctcgaaatcttcccacctgctgcgccactcccaccacataagcaccccacccttcttcccagggtgagatttctcagctctgctttctggggtgccagacaaggggagagccttgttgccatgccctcctgccctcctgccctcctgatgcagtctgtggtcacctgcaggcagagacagatgaagtccgtcattcggctgcgagtaatttctgatgggagaggggcttcccccggcccttcccgcctctctgagccttgccacggtcacttggtttgcccagcctaagtcactgcctgtcgctgtggttattgcatggacagggcctccctctgtccctccacttcccttccctgccccatactgttgccctcacccaccccaaagcctcacccttcccttccatagggatatggcctgatagaggaggagccatttgattttgactattg

SEQ ID NO: 80215 - DNA, 1281 bp, Homo sapiens
gattacgggcatagccaccgcacctggccttccatttgtatatcttgtttggaggaacatctacaaatcctttagccatttctttttttttctttccttttttttttttgagacagagttttgctcttgttgcccaggctggagtgcaatggcgccatctcagctcactgcaacctccgccacctaggttcaagcaattctcctgccttagcctcccaagtagctgggattacaggcgcccgccaccactcctggctaattttttgtatttttttttttttttagtagagatgaggtttcaccgtgttggtcaagctggtcttgaactcctgacctcaggtgatccacacgccttggcctcccaaagtgctgggatgataggcgtgagccaccacacccggctagccatttctaattgggttgtctttctactgttgaattataagagttccttatatattctggatataaattcctttatcagatacatggtttgcaaatattttcttccattttatttctttcaattctgtgggttgttttttcactctcttgatggtgttttttgaagcacaaaagtttttaattctgatgaagctaaatttgttttactttcgtcacttttgctttttgtgttgtatctaagaaactgttgcttaatccagggtcacaaaaatttactcccttgcattcttctaagagttttataattttagctcttatatttaggtctttgatccatcttgacctgatttttgtataagatgtgaggtaggggttcaacttcattcttttgcatgtgaatatccagatgtccatgcactgtttgttgagaagaatgtgctttccccagtgaattgtcttggcacccttgtagaaaatcatttgactgtaaatgtaaaggtttctttttggactcttaagattctcttttattgatccatacatctatcctcatgacagtcttgactactatagctttgtagtattaatcaacttttaaaatatatatatatgtgtatatatatatatatatatttttttgagacagagtcttgctctgtcacccaggctggagtgcagtagtgcgatcttggctcactgcaaactctgcctcccgggttcacgtcattctcctgcctcagcagcctcccgagtagctgggactacaggcgcctgccaccacgcccggccaattttttttttgtatttttagtagagacgaggtttcaccgtgttagccaggatggtctcgatctcttgacctcgtgatccacccat

SEQ ID NO: 80216 - DNA, 1002 bp, Homo sapiens
cctttagagcaagcttgtccaccctctggcccgtgggccgcatgtagcccaggagagctttgaatgcagcccaacacaaattcataaactttctgaaaacattgtaagattttttttttgcgattattttttagctcatcagctatcgttagttagcgtattttatgtgtggcccaagatgacgactcttccatcgtggcccagggaagccaaaacaccggacacccctgcttagagaaagtgcgttttctgttataaaaggaccttgaatccccatctcatatgttgggactttgtcttgcatgttttcaggcagggcatgattgtatctgtaacataataatatgtaagaatgtgtacttcttagcctttgcagagaggcgggaggcctgtttcctgcagcccccgccctgtcctggctgaggggtgggaggcagcttgctggccagccccgctgagtcaccctccggcgtggagcccagtggggatttccacgcggccccagtgttctcttctcctcgtttcctgttgggctgtgacgcaggctggctgccagcgggtgccggtgggcactcctgacacaggccactgccagccggccttgtgggtcctgagggcatcgtgggtggctctccccccacgagtgactgtgcctggcagggtgtgccccacatgtcagttgcactccgttctgggtgggcagctcccagaggccccggggagggctgcagatgggcggggggtggctgcctgggaggacgggaggttttgttgaagagagagcttgctcttggggcagtttgtactgggcgtttagggttataaaaacctagatttgctgaaaacggctctcttttatcttctgacaagaacatttgtgaagaaaacaaaacagaccttcagccatttagtctatacaccgagagaatggtttctacagtatgcctgatttctctgggtctttctaacacatccatgtatgtgcttgtcagcttctagtgc

SEQ ID NO: 80217 - DNA, 1075 bp, Homo sapiens
ttcatcagtcttggagtcagggctcctgtctcttagcaaaaagctaaagcatacatcaagcatatttattgacaagcgtaaccactgtgaggttataaccagggtgctctgtctgcttatgggcaccccacccgaccagccaaatggtcagagagctgggtgggtcggggaaagggagggagggagtcatgggaagcagttgtgttgaatggctacaggccctggtggctgggtgcatccccgtatgccatccaggcccacccactgctgggccggaccttcccctctggacagttcttgcttgggcactgactgggtttgctgctgaacctcctggcctggcagctctggttgctgatccacccgcttctttctttatagagattaagagcggctccagtgtgtgtacggagagcctctttgaagcgctgttgcctttctgtggctagatccacgatcttctctctgggatcaccccataggacatttgctttccaccttctccagtcccagtgaatgcatggacctctgtcctcattgttactggctgagccagatgtcagtcctgtgacctggcctcaggaccactcttgtagcccaccgtgggtggatgaagccggtgggaacagaatgataggagttaaccactttttaggcgttattgggccttttcactttaatagcttaacagagacatctgtgatggcttgcatccagagtgcgtggtgtttatttttgatttgaaatatgaaaagcatttttttaagacaactgactcctctgagtcatgcccaggggagcaaacggcctgaaatatgagcttgtgcttgctggaggaggatgacagaggagcctgctgctgagttcactggtgctggggttaggtcactgctgggctgaagcgcactgaccataagagcaacatgtgggcaagagccgcggcactggggtaatttattgccgccgctcgcttcaccaggaaccccacacgctgggttcccacaggatgcgacattcccacaggatgggacaactgcatggaaacccacactcgggcctgtgttgagcaaccacg

SEQ ID NO: 80218 - DNA, 1089 bp, Homo sapiens
tgaagctagggatttcagtcccagcctctctctcgagagccctaacttagccactatacctcactgcctctctgtgaccagggttgagtcctggtcctcaaatgaagcccgatttgccagaaccttcttttgaggccttacctggtcttcagttttaccacgtgttaattgggggcagggcagccagtccatcctcttctgcagaaatcaccctgtccaggagatgggtgcttcttcaggacactacctggctaagaacactgcattaacaggagatagagatccagtgtgtgtgaaccttgtgaaaacatctctgtctgttcctccaatctcccccttctgtcttatcatgcagggcaagctcaggttgttgtcctgtctctgttgggaggacccttgagtggtatctcctatgcccaagcagacctgcagagaaccctgtccaaactgatggtcatctgagacatggaacttcatgataggaaggtgtcttggaggataactagcaagtctttcactttatagagggggaaactgagtcctcagcgatcagccacatagattctgtgttgtagagacctgaggatgtgtctcatctccttatctgaacagcaagttcccatgctgcgaacgtctcaccctgaccctcaccgtattttttaggaagtgaatggggctttgagaaggacaacctcactgttttgcccatttctgagatggaaaatcaaggaacattgccccatctccaccccgggaatctatatgcccctcccataggcaagatggaagctagaccagaatgtgcagcttgtgcttcttgcgggaatggtgaggacagatgagggcagggagacagcattcctaaacccagccttttgacccaagaggcagggactccaaggctgtagaatgggaggaattgtgggaggaaaagcactgggcagaaggtctcagtcaaatgcacctgcagttattagctatgtgacttgggcataatgccacctgtgagcccccattttcctcactaggacagtgaactcaccaataggtttgagttgttgccctcccagaactgttgcatgaattgaa

SEQ ID NO: 80219 - DNA, 1053 bp, Homo sapiens
ggagagaagaatgagccttttccttctgttagagcctgtagctgcctcttcagggtcagactttaaggtgtatggggacaaagttgggtcagtgtttgtagaaaaaaggctctttctccatttctccctcctgcttaatccaaggagcagagaacaccagggaaactcggaagtagcggggttgatttgggagctagatggggcctgacatatgaagctgctacctggttacagccaggcagagttgaaagggtgtcctttggcggggtgagaagagagcagcctccaaagattcccctgcaccccgccaggccctgccaggggcccctcccacagttctttgctccttccacggagcctgtttgagaattcagtgattcacttcccgtcgtcaactcttgtttaacgttcccctccattgttaccaaacaatccaggccccagtgatgtgtggtgttctgagagtagaggagggaagagagagagagagccagaactgtttacagagcccgggagatgggcccaggcttgacagccgggccgacttgaaagacaggctgcagtggactgtggccccaacagctgggtgtgtgcagggtgggaaatgccaggcacagccgctcctccacagaaaccactctgttctttctgctcttgatggaagctcctgccctttattgtggtgttagcttctttgttcagttacaccgacagctgagttttctatttggggccatagttttggggtcatgattcctggagtagaaaaaaaacaacataggagctcactcagaaggatccctgggtaaatgccatcctttcctgggccccagtttcctcacgtgttcagggggaaaagaaggtggtggtgaaatgccccccaccagctccaaagtcctgtggttctgaggctggaatattctgcaaaaggacatttgcacaccacccttccactgcccccgccccagtgtcgtgtccaggtccagttctaccagccacagatgtgagcatgtctggaacctgtctacctgtctcattcattccatgacctct

SEQ ID NO: 80220 - DNA, 1041 bp, Homo sapiens
gttgcagggctgtttggataagggctcagatctgcttgggagggcctctcggcctatgaccccaggcctgtctttgattctgagggtccttgaagcccacccttccccagagcatggttctagcaccatgcgacacaatgggtggcctgccagctttttctttttttgaatggtgggctgggttgccgttcctgggagcctagctctttctcttctgcctggactaaacccagagaatgctgggcagggctttatgattttggggtgaggaccctgttctgttctacacattgctgagtaagtcagggccagtcaaagctatatgttcaagctgacccgtgccagagaatgatctaggtggtcagctttattgtagctttattgtcttctagtgtaccacagtgattgtacggactacaaaactgaggttacagaaggaggtcatgtccccaaggtcacacagcaggatcagcagagcctgcgcttgggcagtggtggccagcagcactgatacattgcttgaccactctgaatgcttgggttgcacttggattttttttttttaagtttccaaatcaacatagctcacattttagtgaccacattgtttagaatatagcttatctcattggaatgttgaagcatcaagcaaagccagagccagacgtggctgacgtggctcagcctcacctcaggggccagggcacaagccgcagctgctcctggccctgtcattcctcccttccccattaagtacttttgatgccttcatccttatcttcctttgctccaccccaggaagagagaaaacgacaagaatgctttgcctctccatcttgatggtgatcaagataggaccaggctattttcaagttcacagaatcgggctattatcattgttgttaacaccatgtgctgagtgtttgatgcgcgccctgcacctcacatgagttatctctgtctgtccagaaacagcgccgagagtaaagaggatgaggcccacagagtgtagctggtttgctcgcagttgcatgtctagtc

SEQ ID NO: 80221 - DNA, 1029 bp, Homo sapiens
gtaaaaaacacccctcaatcagacagacacacgtcatcgtcgcctgctggggctgggcccagatttcgagataggggagcggcacgtgcccgtttggtacagatgggagccaggaagccctttgctcaggatggaggtctcctctattagggggcctgttacagtaactggtgggcctctggggtaccctgcaattgactttacatatttaactctttgccattgactttacatgtttaactctttaaagtcgacttccttccccctcaagagaacttaatttactcaaagtcctccctgggtagaggagtttggccgggtagtttcagcaagttactggtaccgcttctaggacagcgtctaacagcatctttgggaagatgactgtcaccaaagcagaaaaagctttctgacttgtgtaaccccctggagattttttaagtcccccaccccacccctttccctatttcttacaggagacagactgtgaccagtaccccctgctggattgagctgcacctgaatgggcctttgcagtggcttgacaaggtcctcacccagatgggctccccaagcatccgctgttccagtgtgtcttagagacatcaagtatggtaggggagggcaggcttggggaaaatggccatgcaggaggtggagaaaattggaactctactcaacccattgttgtcaaggaagaagaaatctttctccctcaactgaaggggtgcacccacctgttttctgaaacacacgagcaaacccagaggtggatgttatgaacagctgtgtctgccaaacacatttaccctttggccccactttgaagggcaagaaatggcgtctgctctggtggcttaagtgagcagaacaggtagtattacaccaccggccccctccccccagactctttttttgagtgacagctttctgggatgtcacagtccaaccagaaacacccctctgtctaggactgcagtgtggagttcaccttggaagggcgttctaggtaggaagagcccgcagggc

SEQ ID NO: 80222 - DNA, 1033 bp, Homo sapiens
gtcttcagcaccttccaaggagccaacttttattccctttcctctctcccctccccacctcgcttcttcccaatttagtaacttagatgcttccagcacatacgtaggtagctaccccagccggtttggattacaggcctgtgctggaacatcatctcagttggccaccttcctggcaggctgtagacctgacattttgagacaagcctagaggagtcaggagcagggactttgactcttaggaagagcacacatgagggcaaggctgctggcagacgtctccattgtccttatgttgtctgtgttgtatttttttttttttattgaccatggtgattatttttttaaaccatcgttaatatactgaagtgagctatagcacatatcatgtgcttagtttgtttatttttctccatctccccttggcttcctagagtttggacatattccaggctaaatgcttttactcaagactacagaaaggtttgaagtagtgtgtgcatggcatgcacgtatgtaagtaatctggggaagaagcaaagatctgtttcattcttagcctcaggcctcatgagggtctccacagggccggagctcaggttacaccactccttcgtccttacaggagatgtagggagaagaatctgcaggctgcttgtaggactgttcaccaagggggataccagcagcaagagagtgcacccgtttagccctggaccctgtttcttactgtgtgacttggctagagttgggagttcccccaaaataaacgtgtccccattttaccagaaccaaacctcaacacagcgaagctgtactgtctttgtgtggcaaagatgttcccttgtaggcccctttcaggtaaccgtcttcacaatgtattttcatcacagtttaaggagcatcagccgcttctcaagtgggtagggaaagcagaaaaacgtacgcaagaggacatggatccaaaatgatgatgaagcatctcccatggggaggtgatggtggggagatgatgggctaaacaggcaacttt

SEQ ID NO: 80223 - DNA, 1061 bp, Homo sapiens
attagcagtttttctgtctaaccaattagctgtgttgagaaagagtctgaggctgaggatggacccaacccggtgacgagtggtttttgccatggatagaaatagagaagaggggaattttgccatatatttgctatccctggactgcagagacacagattagaattttggaatagctgtgatagcaggtaatcaggaactatattccttcagtcatatataaggacttgctgtaagcactgtggaaatgtatataaaatatactgctaagatagaatttactagatatggacactgattcatttactcggcaaaaatatgtggtggccaaaaagaagccagggataagagaataaaatgtaaactctgctctcaaggaactcacagcctagagaggggactgtggcaacagagatagatgtttatgagaggcttcctggaggagatgtctgaatggaggcacaaagcattagtaaaagttagccaggcgaactggtggtgtgctggggagcaggggctgggccagggagaagttgatgttctaagcacaagcagccatgaagacaaggatgatccatgaggactgcaagttgccggattgtagaggttaaggcagggagcagtgaatgctaggtaagggcaaaggagggccaaatgctccagggcaaagaccttagaatgtgtgcagtggactaggggaagcatctatggtcagattggttactgggggcagtatgaagggtgcctttataggaaagccatctggaggctaggagacctgttatgatgctggtgcagttgtccaggcactagaagacctgcagtttagggcggtgcaagtgggactagagcagagagattggagaagcgggactgtgtggaggtggggagcagaggactggtggactgctgtggcttctgtggatgtaggttgggtcaatggtcatgtctaaaacagggctgaaggccagaggatggttttaagagaaaccatgaattctgtttatttgattgtgagtttgaggtacttgtggcccctccgtgtgccagcagccagcagt

SEQ ID NO: 80224 - DNA, 2001 bp, Homo sapiens
aaatccttatttgtttttgtagactttgtaatgcatatcattagccctcactgtgatcattactgctgtggctctgaactggcacatagtacagtggatggaaggtgcccgcacaccagctgagaactggttctggcctaggtgggctctagaaccatttacacagcatgaaagaaacaggttgggttaggagcagaaagaaataaggctcacacccctccagacactaccttataagcactgcagaacctgaaacagatggcagaaggaatggaatgctacaggggccagcaggagtgaccacagggaggggacagctcagtgactggagcattcaggaagaggctttccagggaacactggacattgcttagtgaccttttgttcctttttttttttttttcttttactgttctgaaagactttgagtctgtggttcaccaccagcccatcagtgtttctttgaggtgattgcattagggaagttggctctgggattgcaaaaaaaaaaaaaaggtggaacatgttttccttaaaagatggaaggttttagaaaatatactaggccatctggttagaaaaaacagaccagactagaaaaagctgtgaatttgattttgtagattaaacaaagccagatgattaaaatgtgatttatttataaactgtgctaatgtctattattatgattttgtggttttttattagggggtatgagtgagggaagccctatatccttcattggattagacatatatagtgaatagtggaagagtctgtcaagctcactattttagaatttaccctgcatatgtaatgtcatgtttttaagacctcagctatgcagggatattggcctcttctagggacatatgggatgaaggtctctagtgaaatctactaaaagcccatgttagaatagtgatcatgagctaacactacagtaatagctgcagtctatctaaagtgacctatgttcatgctaccacaagttgttacagaattgccagctggaatttaaaataagagacttggtttttggttgttttttccttaaacatttcttgatttgcataacatagtgtttggcacatagtgtttggcacatagtaggcccttagttttggttgtaaagtatggtttgtgtttgatgaatatgatcacaaagtttgaaggtccatacataagtgctggaaggtaagggaagacaagaataaacatttttcccctgagaaaatcatgtgttatgtaataattttagagtgatgaagacatagatatttttataattttaaaatatgccatcttgccagagtatgagaagattgacagaaccagtttgcttgctctctatttatagaacttggccacgtctaattcagagaagctagagattcagggaagctagacttagatggttgagtaatatgggatgtggttcaaggaccatagagcatgttaggccattcctgcaaactacttctaacacgtgaaatgtgatatatggctaatttcctggtcccactgtggagaggtcgggatcaacatttttgccatggcttgtcagattcatttaaccttgggccagtctcttaacaatgggcgttgagagagcatgtggaatgccccttgccttgccttggcctgccatggaaaagcagtcttagaagaatcactgtctaagggtaagatgagagctctgtaaactattctgagcttcagcgtttgccgatacaaagctaaatttagcaaacgtgtccagtgtggtcagaggttctgattcattaggggttctgattcattgaacgttctgattgatggagacaagagtttcagtgaatgttctaatgcattagatttgctcttcactctctgctgcccctgttaattttacaatagacaatttagctacagcattatgtcattaagtaccaaatcttattagaggactataggtggagtaagtgtaaaaaaatctggtcatgtgtactgaacccagta

SEQ ID NO: 80225 - DNA, 1037 bp, Homo sapiens
agtcactgagctgtcccctccctgtggtcactcctgctggcccctgtagcattccattccttctgccatctgtttcaggttctgcagtgcttataaggtagtgtctggaggggtgtgagccttatttctttctgctcctaacccaacctgtttctttcatgctgtgtaaatggttctagagcccacctaggccagaaccagttctcagctggtgtgcgggcaccttccatccactgtactatgtgccagttcagagccacagcagtaatgatcacagtgagggctaatgatatgcattacaaagtctacaaaaacaaataaggatttttatttgcagtactttccactcttcctttaaaaacttgccatttgcttatcagttcctctggggctgacccactcaaacaagacaaaggataaagaacaaaagatagtcctccgaggttacaggcttggaagggcagagaggagctacgaaccttggaagaaaaacaaggtgctcaggaattcatcgcctaacatttcacttccccacccaccccttagtgctcccactttggcagtgatctctctttggctttaaagagaaagggggaaatgtgccttgttttgcaggtgtgcaacaacacagctctggcatctcaagcagcaggggagaactctaagacagaagaatttcttcatgaaaatcacggtatgttatcacatactgtctccatggcccatacaaggactccttaaggttctctctaacatacaacatatcccccacaactcagtagagaggttttcttcccactggaatagaaatcctttgcctcatttattacagtctaaaaatccacactggctttttgattctttctagcatgagctcagacactatacttcaaaagaatgcccagaggcattttcttaggtagagacttagctgcgggctgagacttcggccccacatagctcacatcaattctgcagctgcctcctttcctcccaataaaagcatcatagctcagagctacaagctccttgaatgg

SEQ ID NO: 80226 - DNA, 1016 bp, Homo sapiens
gcaatcgggggagacagagatgaaattgaaggcctttcatctgatgaagagcactgaattattcatactagggtttgaccaacaaagatgctagctgtctctgagatacctctctactcagcccagtcatattttgccaaaattgcccttatcatgttggctgcctgacttgtttatagggtccccttaattttagtttttagtaggaggttaaggagaaatcttttttttcctcagtatattgtaagagagtgaggaatacagtgatagtaatgagtgaggatttcttaaatatactttttttttgttctaggaatgagggtaggataaatctcagaggtctgtgtgatttactcaagttgaagacaacctccaggccattcctggtcaaccttttaagtagcatttccagcattcacacttgatactgcacatcaggagttgtgtcacctttcctgggtgatttgggttttctccattcaaggagcttgtagctctgagctatgatgcttttattgggaggaaaggaggcagctgcagaattgatgtgagctatgtggggccgaagtctcagcccgcagctaagtctctacctaagaaaatgcctctgggcattcttttgaagtatagtgtctgagctcatgctagaaagaatcaaaaagccagtgtggatttttagactgtaataaatgaggcaaaggatttctattccagtgggaagaaaacctctctactgagttgtgggggatatgttgtatgttagagagaaccttaaggagtccttgtatgggccatggagacagtatgtgataacataccgtgattttcatgaagaaattcttctgtcttagagttctcccctgctgcttgagatgccagagctgtgttgttgcacacctgcaaaacaaggcacatttccccctttctctttaaagccaaagagagatcactgccaaagtgggagcactaaggggtgggtggggaagtgaaatgttaggcgatgaattcctgagcac

SEQ ID NO: 80227 - DNA, 3256 bp, Homo sapiens
acattatacaaaataactgacatacaagtgttaaagtcgtgaaagactgaggaactgtcacaaattggagaagactaaggagatttgacaactaaattccatgtaggatcttggaacagaaaaaggatattagtggaaaaaccgatgaagtctatggcatggttaatggcattataccaatattaacttcttgatttttataattgtaccatggtcataaacgatgttaacactaggggaaagtgggtgaagagcatatagaaactctgtgtactatttttgcaagtttttttttaagagtaaattaagaaaaagatttaaggcaaaaccaaatcaacaaaaaccaaacatttccacatcttcctccttatctctttactaaacttgtttccattcctcacctcccatttgctcctcacctcactcatgtctgtcttttgcccctggtatgccactacaacagctctgtgcaaaggccagcaatgacctccatgccgctaaatcgggtagatattttccagtcctcatcttgacctcgtggcagcattcagtgttacagatcaattcctctttgaaacattttcttcccatgcctcacccaacacggtgtcgcctggttttcttcctacttctctgattattccttctctttctttggtagatacccttctttacccagcctttaaatattgtcattcttcattgctgcatttaaactcttccaaatctatatttaggcatggagtgattctgtctacattaacagctcaattactatgtatacacagataaatcacaaacttttatcttcagccctatataccaacttcctacatgacatgtccattgaacgaaagcaaatatattaaccaagatgcgtttttaacaccaaattgtctatatggcattgtgatagatgcaaataattataagtcatcatcctatcttcatggagcttagtctaaaaatatagagataggacctataatgtaatggttaaggtcatagtcattggagtcctgtacagctgggttcaaatcatggctttatcgctagtaatggccttaccttgaataaattaacctctgttggcattagtttcctcttctgtaaaataacggtgataaatctttcctcatagggctgttgcaaagatgcagtggaaccatgtaagttaaagcattcagtggtgcagatccaaagcaaattctctcttatggtagtagtacttattaaagtagtggtggagaaatgttagaatacaaggtaatatatgcaagtgctaagacagttctggaaacaataagtgtagaaagaattctaaggaaggagacctgtgaaagtgggatgggcagggaagacattctaaacatagtgggcctggagtggagaaggagttaaaattctgattaaaaacaaactttaataaagaagcagtgtgccaaggtagaaacagtaaaagatttgtagtaagaaaatatgaatttaaatcagctctacctctgaatagctgtaattttagatgagttcatttttagatacaggtttttttttcatatcatttctgttattctcagataatgttatctgttctaatcaccttttatagtggttgtcggtaatagatgtgaaaatatttgttgtacagtaaaatatggcataaactttagtcattattggtgaatcagtgtaccttagtggagtgagtatgctttccgagttggaaacacctgcgtctgaatcaacttactagctgtcacctcggcaagtcacttcaactctgagatgtggttttctcatctttaaaatggaaatagtactccttacctcatgacgatgttgtgaggataaaatagttactcttcatttgtgagggcccactagcagccaagcagggtgagccatgagctgtaaagctggtatacactgggccttcgatcattggtgacttcatcaaggttagcatttgccttaggattctctgagtgtagcacatatgcaaataacgtgacagataatgtgacaaatccctatttcagatcccatgttagatctggatattcaagaattagccagtcttaccactggaggaggagatgtggagaattttgaaagactcttttcaaagttaaaggaaatgaaaggtaatcagatccattgtgtctaatatgttcccatgttgatgcttgtctgttttacgtagtagcattttattttgttaactgctggattggattccttgttctggtctcagctgtcttgagaaacttagctactcctgggacttggtaaaaaaaaaaaattccctggggaaaatttttccatcttcgttctctttctttttacttttcctgcttttgccttgtttctttcaatgtgttacataaggtggaaactgtaagatccctaccaatttactcacatcattcccatctggaaaatttggaagacttaaaaacttcctaatacatgtaatgactacatcataaacatgtctttgaaacccgtctcccatcttctagtgttattcatatactccaggttatcctgtgctattagacaaatttcttaagatatattttccccctagacaaggctgcgacgcttcctcatgagcaaagaaaagtgcatgcagaaaaggtgagacaatcagccaggtatttattgaatacctataaaaggtccagtgctattattataattatatatcacacttgtgtatttctgaagggtcttagtgtgagcttttcattgaatattaacttctaactaattaaatatttatacagtaatagtatagttgctgcagtcaaaccaagatttttcacctggatggtgagtgatgtggaacctttattgagactcaggatgtttgcctttctaactattgggccagaaaactcttagttgttttgttttattattaccaacacaacacatgctattggcaggaaacttgtatggttgatggtgttccctgatatgtgtcataatttatcctgttcccttttggacatttaggtcatgtgcattttttgcttctataaataacaaagctgtgcatgtctttacacatcatctttgtatacaactctaaatatatccttggtataaatttctagatgtggcgatcatgggtcaaatggtattcaagggttctgatatgtgttgccagaggactggagggcaaagtgcagaattttaggtctcagtcagtttaaggtatgacatatgaaacaagctgaaatgtagctgt

SEQ ID NO: 80228 - DNA, 1024 bp, Homo sapiens
tttcatatatttcaagtttttttaacttcttattgttaaaaaaaatcatcccaaggcttaagaatttccaatttaaaatctttattctagaggctatagttttgtttctgacactttctggaagaatctatgctaatgaccagcaccgccagattttttcatgatattttcatttttatccatgcatccactggtgtcaacttactagagtactaaaactgaatcagatgtttttaggaccacagtttaacatactaattgtgccttccagaataatttattttacatcacttaacagctgcccctttctgcatccctgaagttccataagaatcagctgaggaggtgaattttatttattctttcctagtctagagttttgtggcatcaataaaaccatagatgctagagccagtttcagcaactacctgctaaaggcataaatccttcttaatagggatgacatttccatgccctgaatcctggggagaaaaatctagcaagcacgaaaagatttatgtaattcttttctatgagaagaatagttgtacagtgagtgcatgtggatggaattttaataaacattgaaccaggcagaacagaatttttttaaaagccataggtatataaaatatcatctaagttttttgagcaatgttaatatgcgagcagtctactttgggtaaacaaaaatgaattgtttttctcgttgtgtcaatttgtatgtttctaagttccttaaaatataagcagcggaacataatgaactctcttgttagttgactaaattcttcattgtttataatatgagcaaaagtccttctggcttattataattagcctgaaacctgattgtaaactcttagtcaattgtgaacctgattaatttgtctaaggtcatacaggtaggcagagccaggaatgaaagacaagttttctgaccactagttcagttttcttcctactattttgactttttcataattttatccattctaattggggcattaatttttttttcaaa

SEQ ID NO: 80229 - DNA, 1021 bp, Homo sapiens
cttcatgtttctggaccccagtttcctaacctctaggatgggtagaactctaggataatgtagaattatattaacattactttctatgaaattgagttccttgagtcagacttacttgcttctctttttaacccaggacctaatattgtagagccaaaaaaatggatactctgacagttgtctaaatgtgaatgttgtggtcaaaaattaaataaatatgtgttgatctctatctgtgtgtgtgggtgtatgtgtgtatagaaggcataatttgatggaggagattgtcttgtaagagaaaaaggggaagaggaaaaaaataaggaataagagtatgagaaaaatgatgagactttgttttaaaagttcacccttaaaattaactgtaagcaaatgaatcatgggaaatctcttcaaattagttaccctggaggcactgctcttctgccatcttgccatcttgaaaaaacttttttagtactttctttggaattatttttagacctgggtatgaaccacttaagtcatctttatttttttttttcatggtaaagtcttgtactggttctgaacgatttttgatttgattctgaacattccttttaggattttcaagagtgtgcttaaggttctggagataggactttacaatggaactattattggaattagaataaagctttcctttacaacattggagaggatagcactcactctgatgtttagttcagtttattaagaatttgtgtgtatgtgtgcatagggaaaaaaaaaaacaacaactaggaagacaaaataccagagtattgattcgtatctttggtgatttaattttcttcttgttttttttttttttttttttttttttcaagagtgagtcttgctctgtcacccaggctggagtacagtggcatgatcttggctcactgcaacctccacctcccgggttcaagcagttctcctgcgtcagcctccccagtagctgggactacaggcacacgccaccacgcccagctaattt

SEQ ID NO: 80230 - DNA, 1332 bp, Homo sapiens
gtctgttattttgaaaagcaatcatgtttttcttcccagtatttatctatataatatttttactaggtcctctactagttaggttcacccagattacatgttcttgtgttttatgaaacttaataaggagcattattttgtttggcatgatagtgtatgtgattagcctgatgaaagcatttagaacatagaatctccatgcatgcatctggtttggcttcttccttttacaggtggggaaaaacaggacccaaagaggaagagtaacatgctcatattcacacagtgagtttgtagccaacgtgagaccacatgataggtctcctgattaagactgttatatgtttttccatgacagtgtgttggtttatattactgggcagttggagaaatgagcacagagtgttaatttacctaagttgcatgggaaatcactggccaagccagatgagttcattggctacagaactcccttagcctaggtgctctctgacgtgagtaagattttaatgagactgtgtggaaatgatgatgatagctgagattttgggctttctggcttatttcttttaaatagatctttttaaataatttagatcatctggaatgatggagatgctttatcccacggtctttgcacttaacaaagtacagctaaggatagatagttaatttaaaactcgtgcattccttataaatgaaagataatttatatttatttttaattattttccttggagtcacaacaggttattattctcttcggtttgaattttaattcttatttgtaagaatagtaggtgctgttaatgtctttttgttacttaatatcagatttaaggcaaacaggttaaattacagtactataactatagtataggcaaattattattctagaaagagatttttaaattttcctgatagatataacttctatattaacttagaacttagttttatatccttggctccaccagtgtcttgtttcattaagccaaagtgtgcatttaaaaaaatttttatttttattttagaattgggggtacatgtacaggaagtctaattattccattgccccatagatcgtttttcaatccttgcccccctccctcccactttgaagtctcagtgtctactgttccaatctttttgtccatgtgcactcagtgtttagctcccacttgtgagaacatatcgtgtttggttttctgttcctgccttaattcacttaggataatggcctccagctgcacccatgctgctgtaaaggacatgattttgttcttttttatggctgtgtagtattccatggtgtacatgtaccatgttttc

SEQ ID NO: 80231 - DNA, 1053 bp, Homo sapiens
acttcacacttactaggatggctagggtcagaaagataataacaaatgttggtgaggatatggagaaattagaaaccttgtgcactgatggtgggaatataaaatggtgctgcagccactttagagagtttagtagttgctcaaaaagttaaacatagaattaccatatgacccagcagttccactcctagctatataccgaagagaactggaaacatgggcacacaaaatagtgtgtataagtgttcatagcagtattattcataaatgccaaaaagtgagaaaaactgctgaaaacaaaatgtggtatatccatacaatggactgttattcaatcataaaaatgaagcatgaatatatgctacaatgtggatcaacttcaaaaacattatgctaagtgaaaaaagcccgacacgagaggctacatattataggatttcattcatatgaaatatccagaatagttaaattcataaagatagaaagtagattagtggttcccagggtatgggaggagaggttgctcatgggtatggtatttctttctggggtggtgaaaatgttctggaattaaatggtgatgatggttgcacaactttgtgaatatactaaaaaccactgaatcatacatttttaaaaggctggattttatgatatgtaaattaaatctcaataaaaagaaagaaaagaaggaaatgataccaccaatgatgataataatggtaatagtagaaaaggtggtggtgatgatagaaaagggagaagtggcagtgatactaatagcagctgatagtatacgtgcaaaatcttatttaatcctcacaaaagccatatgagttaggctcagtggagccaagtaatttgcccaaggtcatatagctcatcagttctcaaacgtgtttgcacattggaatcacctgggaactttagtcacctgggaagcttttaaaacctatgctacctgagcctcacccaagggagtgtcagctacagtattttttaagtgcctccgggattcaaatatacagccatggttgacaaccactgacataa

SEQ ID NO: 80232 - DNA, 1109 bp, Homo sapiens
aggggagaacggcaagtggagaaggaagcatgacatagagaataacagttctatgttctgaccagcctggacaacatggtaagagcccatctccataaaaattagctgggcatggtggtatgtgcctgtggtccctgctacttgggaaactgaggagggagaattgcttgagcccaagaagtcaaggctgcagtgagctgtggtcatgccactgcacaccagcctgggcaacagagaaagaccctgtctcaaaaaaaaaagttgtgtattctagggtcactaagagaatatcacctagcatttggagctagcttagagagaggcctgaatgccagtcaggagagttttggctttttcctgtaaaaattggtgagtcactggagatttttaaataaggggttgatgcaaagaaggtggtgtgcagggaggtttggcaattgaagaaagtcaacatagagtctgaagttaagggagaccagagcttttgcagcagttcaagagtgaggtgctggggcccggggtaatgtagtggcagtggccatgagacaaaaggctggatctggagtgcaatctgaagagggtagtgcacactggcctcttactgtctgtattggttccctagggctatggtaacaaagtaccacaaaccatatgacatagaacagcatgaatgcattgtctcatagttctgaaagccagaagtccaaaatcagggtgttggcagggccatggtccctctgaaggtgccggggaaggatctgtttcaggcctctcttctagcttctggtagttccttagcttgtggcagcataactccatccttcacatgaagttttccctgggtgcctgtctgtgtccacattttcccctttttataagcacaacagtcacattgaagtagggatctacctactgcagtatgacctcatcttaatatatctgcagtcaacctgtctccaaatagggtcacattctaagatactggaggttaggacttcagcatacgaatttggtgggggatacaattcagtccattaacacagtcttttaggaattgcttcctgtatagggtttttctgtcttacatctcttggctgcctcaacaagta

SEQ ID NO: 80233 - DNA, 1032 bp, Homo sapiens
attcttattgagagctccaagctctgtatttgatttttttccttgtatgatgtgaactaacaactaaataaacaagataacaaaaccacagtcatttgaaaatatggcttggaggatatatacgtaactttttttttttttttttgagatggagttttgctcctgttgcccaggctggaatggtgccatctcggctcaccacaacctctacctcctgggttcaagcagttctcctgcctcagcctcccgagtagctggaattacatgcatgcgccaccacgcctggctaattttgtattttttagtagagatggggtttctctatgttggtcaggctggtcttgaactcccgacctcaggtaatctgccctccttggcctcccaaagtgctgggattacaggcatgagccaccgtgcctggccacatttttgtgaatgtatatgtatatctgtgtgagtgttgcatataaatatatatatttcccctccctgattagatgacttcccagaatctacaggagtaaagcgaattgtccaagccctgaatgccaatgtgtggtccaatgtagtgatgaagaatggtaagtaacttgggactcaagtcatttttttcctcttgttccttgtaagttttaaattattgagatatatgtggaaccattagtgctatatgaaatctgtagatttgttccaatttcagttcgctgattgaaggaagcgccaaaagtagcatttctaggaatttttcatatacgtttaatagttaattcagtaagaatttagaggttgcttgtaatacacccagcattgtctttggctttgagaagtacctccaaaattataagacgtagaccctattattaaggagctcctagtccagctgtgaaattcaagcctgtacttttcaaatgccagggaactatgcaaggcaatctgtgatgagtacagatgactgatgcaggcagtaaagtgcataaaatcagaaacatggctgttgtgttaggcttaagtatagagagagagcttcaagga

SEQ ID NO: 80234 - DNA, 1239 bp, Homo sapiens
gtttatattttttgttccctctagaaatcgggccttgatagtgtctcctcatggcttccactggcaaaagcatggttacctgaggtgatgatcttggtctgcgatagagtgtctgaagatggtaaggcctgtggatgggacagtagttggtacatgcatttgccattccttgataaacagagtacatctgtttctttaacttaggacatacatcccatgtgactttatggctttatgaaaatattttcagctatttttctttggaatcttgtaatacttactttttttttaagaatggatacttcggggctgagaagtcattttctttttattattttagatgcctttagaataacattgacattaagggaaacacattgagatttgtgaagaatattgcaggaatagtcatgttttattttctttttacttatgaagattcttttgcatattattttaggtataaaccgacaaaaagctcaagaatggtgcatcaaacatggctttgaattggtagaacttagtccagaggagttgcctgaggaggatggtaagtgtttatgtgttaggagaaaatatggcacttagatatgagagattattttaattcagggaagaagaatcacagcaaaattcaagaaacttttttccccagctgtttcaaggatttaagcaaaatccattgatgtaatcttataatcttacacttagtgtaataattcatttttttggttttaccacctgttttagaacttttgaaaatgtgtgtttttcttatggataaaggtatagggctgctttctaaaatctttgtcatttccataatcctttttcctttccctactgctgaagaaggagagttagaccttcgtagtagttaaagttgatgtttcttattttgaattcatagtaacctaaggctgaattcccaagaatcgcaggggacatttcaaatccatttgaatgtcttttggacatttgaagccaaaagatagaccccaaatttaatcccccacctccaccccaggtagctctgcaatcgctgtcctccgctattgctggaccttctatttcttcccctcttctactccccttccccatttcttttctcatcttttctcctttgaagtacacctgttttggtatctaccaggataagagggtttttggttcaccaaaaccttataatctggtacaagagatgaaacttacagataattgaattaccaagtggaatgt

SEQ ID NO: 80235 - DNA, 1050 bp, Homo sapiens
gcactactactgatattaaaagtgtacttaattaccctactactgaaggagacacaaaaaatccataacagtatcaacatgcctagtttagaatgcatttgtcttttttggctgaggtggataggtgaggacataaggtaagggttgtgtgtgtgcatgtttatatatagataaaatgtgtgtgtgtgtgtgtgtgtgtgtgtgtgtaggagaacagatatttgtggtgtttggggaattcaccttgaacttcatgttgccttctaattcatgctaaagagagtatcacctgttattgattctgaaccatagaaagccagctgcctcttttctttcatttgattggttaccacatttgtactttctctgagggaaggatcattattaggatatgcagggaacagtagaaagctgattaaaaagaggaagatgttggattactgaactgaaatgttgccttggcacatggcttccttcaaagctcttgaatcttatttcctgtaacttaccatatgagattatagggaaaagaagttgaccaaggatgtgagaaagtaaatgggagttactggagaattgatggctttgtaaaaagtttctcaaatcgggatagaggtttatacttgcacttaatactgaaggaaaggtttatgtttgctactagaactgggttggcatctaacttcctttgtaaaagcactacaaattaactattgtaagctgtgaaatggagtttgtagtaacagacctggcaagtaaacacctagtgtttgtctcttaaaaaatgatgtattacagctccaccaggtggctgccaacagtgtgaatgagacaggctggcatcgaccaggaggaggggaaagctgctcttgattttctttgtgcatatcggagtctacaacataataatttagtgaaggacaaagaagggagcccactgcaggtttttctaggaagtctggcaaaaaacaaaaaaacaacaacaaaaaaacctcaagatcactgtgactcatctttgacatataaatacctgaatgtcatagacagttt

SEQ ID NO: 80236 - DNA, 1140 bp, Homo sapiens
tgtttattaaaagagggaggttgtcatcaatctaaagaggaggagaagcataaatgttcatactttctccagacccaaagggacttaaaaaaaacatgtccacattacattccagtatgtgtgtatgtgaagttaaagttcagtaaagctgtggtttcccaaagttgttcagttcccaaaagctggggagctaagattcaattccagttctatacatgtaaaatatggtcaacttagcaactagactgtgtggattcagagtgcaggtagcaagcagtaggagaaattgcagtaggtgattttactattaaaatgaaaactatggctctcaaaatcagtttacaattagtttattttttgatggtagttgaagccttagtagataaagtgtgataagttaaataataaatgaaaatgactctattggtatacagtttgtttccttacttgtagagtagagaatttgacttttcgtgcgaagttttagactagtcttttagatattgttgatgtgtgaaatgattataaggtgtcctttcattaaatggcataccgtaaatgagggggtggcggagagtaggaggagaaataccagtggaaaagtattacacatcagcccatattgtacaaaaccacttatgatacagaaaatattttatcatcctggagggttctgagcatgtttagaatcagacttttatttctggaccatttaactgctttgtttttgtatggcaaaaggtaaaaatctagaaagtatgcagtggtcatttggtttaaacaacttactgccttttctctttaggaatatgccccagtaattcctcaacaaataatgatactcaacaaataatgcaatctgatataaaatcattttttgtaaggtcaaggtgtgtctggaattggttccttccagtgggttcttggtctcattgacttcaagaatgaagccgtgaaccctcgttgtgagtgtccggagtttcttccttctggtgggttcgtggtctcgctgacttcaggagtgaagctgcagaccttcgccgtgagtgttacagctcttaaaggtggtgtgtccggagttgtttgttcctcccagtgggttcttggtcttgctgacttcaggaatgaagctgcagaccc

SEQ ID NO: 80237 - DNA, 1054 bp, Homo sapiens
cggaagggggtctaggggcggggtcaggccagcctggtcattccgagaacgccctctccggcctgtctccccctcgcgccggcggccgtggtgcagcccaaggcggaagcggctgcctgacggaaccggctcgcgagcgcagctatggctgctggcgtaccctgtgcgttagtcaccagctgctcctccgtcttctcaggagaccagctggtccaacgtgagtagataggcgcctgggccgacctccaaggcccctgagcctcagcgggcgacggacccagcaccacggcctctctgggccttgtccccgcagcgggccctgcgttcttcctccagtcagtggaggcgcccagtctccccaggtggctgcccctatctcttaatctcgtgcttttctgcccactcggccttcttcggcgttcctttcggcttcctgtgtaaagtgagactgatttcccgctctgctcagcccaggccacaggtttttgcgaggatccgttgagatgaacctgaaggctctccggaaattgcgctaggttacaggagtgtaaggtgctggaattgttgatatcgtgatgttgttatccttgctgctccgggagagagtgtttactctgaattctgaagtttattctgcgtatttactctgaagtttattctgcttcttaatgtgtacattataagacttgttagctttgtccgctccactctagttattcacgcctttcatctgaggcatgggctctccgccaacatgagtttttgggtatgattgggctagtgcttttgcttgtagaccctcataatggctgtcagacttactaactcttaaaagagagaacatgggactggataataagccaactctactaaagggctctgtgaagttgaattataggtaactcaagacttctgttttaagtgtatggcttagaatcagagcagtgacttagctgtatgatctcgagcaagtcacctaacctacctacattccttccttcttttctttttttttttttaaagagacgggaacttgctctgtcgcccgggctgg

SEQ ID NO: 80238 - DNA, 1052 bp, Homo sapiens
cctcctcctcctctcgccgctaccgccgtcgccgccgccgcagccgccgccagtccgcgcggcctcgggtggccggagctcagcctgcgcgcgccgcgccctgtgtctccgggtggggcagaagactcgccccttgaacctcccgcggggactctccgtggtgtggcggccctggggctctttcttaatagccccggactgagtcccctccagtcgaggaccctctcctagtccactgacgagcggtggacacctgccgctgtatctcccccaaaccgagtccttgccctgctgcctcctcatacccacacggcggcagagaccttcaccatagcgttcgctcaactccagaaccttccgacctccgctagttcctgcgggcctttgcccgcttcccggtgcaccctccccgggagacacctcagacccccgacagcctgggcaggctcggtgcctgcgggtgcgttcctgatcacccctcccctcttccctccccctcatcctccattcccttgttttcaccctctgtcctctgcccgtcactccccttgtcacctcttggagccccctcctaaccagcggccagtgggtttcccataccccaggatgtgagcctctttaacctgtaatgctgtggctagcccttggcccctttcctgccatggagaaccaggtgctggtaattcgcatcaagatcccaaatagtggcgcggtggactggacagtgcactccgggccgcagttactcttcagggatgtgctggtgagtggtaatctcagtgtccggatgccagcaagggggactcagggacttgagtagtcagcaccttgaccactggtgacctgagccagtggcaatggctactgctggcttcctgtggaggcagttttattgcttcaggcacagcattgataaattgcaaccactaaaacctggcaaatgtctaggaccctggggagatagatcaatctgactgaacccctgccctcagagagctcatggcccgggctgggacacacatatagacacaaccacgcaaatgcaaactgct

SEQ ID NO: 80239 - DNA, 1037 bp, Homo sapiens
aaatagctacacatttgttgaatgcccatcaaacaaagtgttcattgtgagatcatgatgataattattgttatttttagagacaggatcttgccttggtgcctagactggaatgctgtggcatgatagctcactgtaaccttgaactcctgggcttacacaatcctcccacctcagcctcccaagtaactgggactacacgcatgcaccactatgcttggctaatttttaaattttatgtggagatggggtcttgctatgttgtccaggctagtcttgaactccttgcctcaagtgagcctcctgccttgacctccctaagtgttgggattatagatgtcagccactgtgcctggcccactgtgggattatttatttattttggagatagggtctcactcttttgcccaagctggagtgcagtagtgagatcacagcttgctgtagccttgacctcctggctcaggcttgtgggattattttcaatagcaaaaaattagaggtaaactaaatgcctattataatggattaataaattactatttgtctataattcaaagcattcaacagtgactaaaaagaatgagttaggattttttacatttgtacggaaagatatctgtgaaatattgttgaataaacaaataatgcatatagtatgatcccattttgtaaaatatccaaccacgcttccccaactttatgtgtgtattgaaagataggatctgaagagtgcctactacagtactttccagtgacttaccctgtaaagtggacttggggcctgaggcttgggttggtgggggcgggagggggtggatgaatgatcacactttttactttgtatgtttctctattgtttgaacatttttcaacaatcattgcctgtttttaaaagctataatgagtagaactcaatgtaattagtattttattagtcacattgaactctgtactatagaaaaatagtacatctgtctgaaatacatactagtgttgcaagctttattcagactctttgcagtaactccttgcag

SEQ ID NO: 80240 - DNA, 1069 bp, Homo sapiens
cacattgtagtctcctcatgacaggagcaatgagttattgaggagtcagagcctgaagccaggtaagtaaatgtagctattaatttgatattcaaaatagattggcttcatatgttatttttgaccactggggcagttgtgtgctctgtgagaggtcagcatcataaaggaaaagcctcttaatgtaaagtatgagaaataattgaaagaaggtgtaactaatgacacatctgagtagcgttataattgaatttgtagccatttgatagagttaagattgttgagttcttcactgggaaaactaacaaattaactatggactgcaaatagttggttagtttattgattattgctgtaattactgactgagctacatataatagggtatgcttgcagtattgacaacaggaatttgaaaattttatcattagtatgaaaaaaacagcatgagtattccttataagtgaaatactgtaccaattatgttgtctgttaggcatgctaaggagagatttgagaaactctcctgttacagatgtatggaagaataataagtaggcctggtatctcctctgtacgtgagacttgctgctgaataagttggaaggtatgaccaatgagagtcgttactatgtctatatcagttcctctctggattcttcctgtaaacatttgtgccctgtctgtaatgtgctaggcactatatggcagtgatttctcaggtttttgaaggcatagtcctttttgaaaatctgtaggaagttgtttatttttttcccccagaaaattcacataatgcagcatttcaccagcttcaaggatctcctaaagcccatatagatcccaggttaatacctctggcataagaggaaataaaatatacaaggcatggttcctgcccttgttgagcttccaaaagagaaacagtgttccccacaatacctgtttactttattatttatagtactgtagtaattgaggggaagggaggggatactgactcaacctcaataaaccagttaaattctaccactgtactttgtccagatatctcagtcgccttgtttta

SEQ ID NO: 80241 - DNA, 1060 bp, Homo sapiens
ctcaaaatttgaataatggtgaacaagaacagtttaattatataaaccattaagtctttcacccgttatacattgccccacttggaatccatgttttctaactaatggaacagataaggaaattctctaagtaacccttctagaaataacttaattgaaataattaaaagttaaacttaccttcgttaactgatactgtacaaataatcatggtatgagttttccaattaaacattctagactttcattacctgtaactctctgaagtttgaatggctcaattaaccagtaggctcctatttgcactgataaagtctccaaaggcagctgtcttggccaacccacaagaagatctgggttcaagaataatactgctcttccagcatatgtgtgggcagcagaatcaggagtgcttagtatattactagtaacttattgaagtgctaagtaagtacagttgggctatttaaggccagtgatagtccaaaacaaggattgtgattaatccacttctgttgtacttgaagattaagcaccaaaacagaaaaaaagaaatgttgctatttctgtttattagtccaatgattaggatgtagatgatttcttttttttttttttttttttcgagacagagtctcgctctgccaccaggctggagtgcagtggtgcaatctcagctcaccgcaacctctgactccctggttcaagtgattctcctgcctcagcctcctgagtagctgggattacaggctcgtgtcaccacacccagctaatttttgtatttttagcagagacagggttttaccatgttggccaggatggtcttgatctcctgacctcatgatccactcccctcggcctcccaaagtgctgggattacaggcgtgagccaccacgcccagccaggaggcagattatttcttaatgtttgcagtgactggagaatttgggcaagtttcaaaattctttcttcacaaggagtagtattttacaaactgaaaatttccattaatttctctattgacattatagctctgccatagaaaaccctaattgcagt

SEQ ID NO: 80242 - DNA, 1387 bp, Homo sapiens
aagattctttctttacttataggtgaatactcgggccggaccctctcaacacagcagcccagcagtctcagattcacttccaagcaataggtgcgagcgagcaagtaaagtgtgcccttgatgtgatttatctacagagttggggtggggtggggaagaagctagaaagaaatttgaccagttagataacctagctacgtattgaccaaagagaaaggacctcatatggaaagatgaatgtttagatttagactgggtgctgagaaggctctctggggagagtgacgtttctgttttgacctgaagaagcagagaagggcgtttcagacggagggaagagggtaggtgaaggccctgaggtggagaaggagctcagcatgtttgtgagtaggccagtttggcacagggaggggtgctgggttggggaagggatttggagagaggagatgagagagcaataggagtgataggagctaaggaggtagacaggacttatcatgcggggcctcgtaggccctgtaatgtttgaattttccttttggtgcactggctagcagttagagggcttttagtaggagagggacatggccagccctgtgtttttaaaagatcctctgcctgtggtgtggcgaatgagcagaagctcccatctaatcctgccctcctttaatgtttgacttcctactccttgccaaatggtcatcaaatctcttactgaacatccctgtcggaggaatgcactttatcagccaacgcagctccttcccttttttacttggctacatctcagaaggctcttttttgtgagctgagatttgtctttctatagcgcccactcataacgttttagttaagccctcagaacgtggttgttccctcttccaggtcaacagctcttccagttgtcttccctccaaacacagttctagattttctgtctcagtaaattctcccacatccagtccattgctaactccagataacttgtcagtcctccttcactgcttcctaggcctccctcagtgccacaccctgtcagtccccacacttgtgggttctaccttctgagtagctctgcgtctttctactcgccagcatccctgctgctgtgtgggtggttccagctctccagatcactgccacagcctcctgagagtctactccctccgttcttggcccattcagcccctcctccaccctgcagctggagccatcttgccagtgtacagtcctgagctgcagtcattccctgctttaaaaccttcactgctcttcatgctttcaagatgaagtgtaacctccatagcaggtgagcagtgaagagcccttcacatatgggtgctctgtgtactccagcttgctggcccacctctgtaccccatcccac

SEQ ID NO: 80243 - DNA, 1049 bp, Homo sapiens
ctttaaatgtttttaaaagtgatttttggatagcttaggtcaccgtgaacatgcagatgaatgaaatattgagtaaagtgagtcacagagaaattgccaggatacaattttttcttttttttttctttttaaccagacaaagttgatagccagatactagcataatgaatgaaacagtattttcctctattactctcaaagcatgggttgttttttcttttgccttaggtgaataactgtttattaaactgggtttactaatgcacatggtgttcctaggccataattactgaattcaagtcccattgccaaggcaaggcctttcctaaactacttagctttctccttctgtaaattaggatgattaaactttccatctatctactgctggtgttagaaagattgatgaagctgtattaggaatcacgttttatttcttggatgaaaggcattctataaatgcaatgaatcaaaatgttattaattcaagtttataacataatggaatatctatgtagaaaccttgcctgggctttgtttggttatttgcatctttacaataattggaactatcaactgggagtcatttgtgggaaaactaggatctgaatgtttcccagaaaaaaatgtgtgtgtgtgtatgtgtgtgtgtgtgtgtgtgtgtgtgtgtgtgtataagagatagatggacttcgagcaagatctgtaccttagaggtctgtattttagtatcctttataaattagggataataactatacctaaagtatagttattataaggattaaattaggataataagcatttagcacaatgcctagcacatggtcatcacttgataaatagcagctgctattattatgttaactggactgattttaggcagctgtgtattttttccatatatgtttcagctttcatcctattctacaaaattgttaattgccactttagtgcatcgattcttagatgtggtgggacattaaagtcaagaacccttggatgaagacatgctttataaaatctaggaaaatagggactcagtctcc

SEQ ID NO: 80244 - DNA, 1037 bp, Homo sapiens
aaacactttaatacttcctaaataactctgggagctgagtctcatacccataggaaaggaaaaccagctaaaatttattaattttatttgtaaaaacacacctgctatggacaagacacagtgctagattttttgtaatatttaatttttctggttaccctataaaattggtattttccccattttacagaaagaggaaattgaggttcagagaggataagtaacttgtcccagatcacacagctagtgaataccaggatttatttgtactacatatttgcttcccaggaagctgaattataacttttaactgtgtaagagaccaggacttaaattatctattttgtcttttgaagttctataatctttatttgctgtgaatattagtgcttagcagatgacattgtccacatgaaattgcctctgaaaggctatctaaaggcagtagaactaatgaccataaaaatgtcactgaagtagttcataagatattgtagcttcatcttgactgtaggcttctttattgcttttgattactaacagggttttagtctctttatttgataccttttgcatttggccagttacttttgaaaaaaatttacattgggagaaggatgtgaagaatatgctcaatccctatatgtaaaagcaaaggtgtatttcagtctggaattttcagtggtgttcagaggtgttgatgatcttgccactaaaaattatctttccttttcagcttaaagaagtcttctgctgaactgaaaaaaatactagccaatggccaggtaggtattattatatattaagattttcacataataataacatattaccgtccagtttttgtatccataagcttattaaacagataaagagtctgtgagtttcctgtcataaatgaataacatggcttaatttgattggcagaacaatttgcagcccgtttttcaaactgtgctaatgggtttcactcccagcagattgaagtaccatgcacacaccctgctgccatctcagtttttaaaaagttaatcagt

SEQ ID NO: 80245 - DNA, 1123 bp, Homo sapiens
ttcaggccagttatttcttactaattttgattcaagtaaatggacacatctgaaatagtagagtgcttttaaacatacactggtaaattaagctacctacagggtcctcgattcttcagtagcaacataaatgcgttttaatgtttgttatagtggaagccctttgatagccttggaggcaggcgcctgtccattgcgatcaagcctgcctattaggctgtattgactgagacatctgtgtcactgcaaataaaagactcttattgattttcttaactgctgttcacttcccgtccatgtttcgaaggctgaaatcttaattatctcagatgcttattcagtgccttcacacactgacctctccaagcctcactggcatttcatgaatcaagtacttgtagtggagcatgtcaagaagacaaagccaggtcctcatgcctgtcctttaatatcacctgtaacattgtggcctaatagatgtgcatgccttaaaacagtgctgtatggtagtgcttctggaggccttgcttatttagcacacaattccttgaatacagttagaagaaatgaagttgatctgcttctgacatctgattgccatccagagtatgtgaattctagtccttaaatatcctatatacagctaaggagaatctagtgtggtgtatgtataatctttgtagtctcaacattttagatagtatttatcgaatacctttaactttcagcagccaaaggtttgtttagattgaggtccacatctgtatcacctcagtgccttatattttgttagaaccagcatatataaacaaaatctgactaaaagcaaaaatattgagcctaggatatttatgtatcttcaacatgcttgcattctagttactaattgtaatttatgtatgagtcactgtgttcttcagctggaaaatatatttcaaaattgacataaattaagaagctttaactacatttgtccagcccagacaatggaaaataacctgtcatagactcttctttcaaaaatgaaaaacagttttttccactgcaaaaaataagcattttcataatgttttgacaaaaataagcagtctcataatgttttgacagtaagcctagtaccata

SEQ ID NO: 80246 - DNA, 1044 bp, Homo sapiens
agctttctgcctgggttcattgatataggttatgtgatataaatatttatttcttttctgtcactcagagtaaatgccaccaattgattcagcattgatatagtgtcaacagttcataagaaacatttgactggcctgtgttttccgattagtctctgctctataaagtgggatttactaaatctctccaattgtctgctcatagagtgtgactgctttctgaaaccattattgcttcgatttgtgaagcaaaggtctagtgatgggactagtttctgtcagacctttacatataaaataaggattaattgagcatttttattttaatgatttataagcgataggtactgattcttcttaacacagacaataaacaaagaatattttctgtgttgatccataattgaattccatttcattttttccattaatttcattaatatattaaatcaagcactttaaaaaaagtttaacacttagtctttggaatggagacattgttttcctgttatcactttatgttggagtaattccatttttccagcttaaaaaaataaatcagaagatatttttggcaagttttattgagagctataaatcagtctcactgatgtgttttctggatttgtttttcctacttcagttatagtgtggcatcatctgtttaacattggcccttgatttgaaactcattagaaatagcccaaagtgtcaatttgaagaatttaaaaagtgcacagttactccaaagatatgtgagtttggcctttgcatctctaaagttattttttctttttttttttttgttttttagattttataggagagggtggcagtattttcctattcctgataaatcaagtataaatctactcagatcagatctagaactaattctggtccagctgcatcttttggctgttattttgataacttcaaaaagcctctagaaaaactttttgtatttggctgggcgtggtggctcatgcctgtaatcccagcactttaggaggcccacttgaggccaggagtttgagaccagcc

SEQ ID NO: 80247 - DNA, 1080 bp, Homo sapiens
attcctggtaaataattacattttggctctaagaggagctagaataaacagaatatatgcaaacctaagaatttctgccagcaatctctagcagatatacttcagctgtactttgaatttttattttgtgcaccaggcacatgtatcttgtagatgaccaatatgaacaaacagctgtctcccttcctccctccttccttggaacgtgtaatctctgaataactgattagctcaatgtcagaaatgtttgtgctgatctctgaacctcagtcagttcaacacatgactccctggaaattttatctttggttttcttttttttttttttttttcactgccatgattttgtgagttagtttatgagtgtatttaaatcatttctggaatctaaatattttggacttgctggtctttataaggaagttagtttccctcctctcacatagacctctttctgctttctcctatctatcatattttaagagtatatgtgacaccgttaagttttaatcttctaaatggattggagaataacaccttcccttgactaacctcaaaggatttttaaaaacagaatgttgcctaatttttgagggagaatgttctaacacagtttatatatttttgtaactcaacaaaggtatctcataaagaacattggtggaattgggttttaaagtccaaatactttccttctgttgtccagaacatagctcctcaacctagaggcatagtgtcatgtgcagtgaagtcactcaaattccttcttattattggtttgaagatgactgtccctggatggtataagatatgatggtagtttgtgtcgttcagtttttacgttaaaggaaaaagtctctcctggtttcttttgaccctagtcatgatatgcccatttcatgaagtcttttatgcacaaaagtgcacaaaatgaagataaagtgcctctctccagcctgacaaaagccatttctttgcagaatggtagctgcagcgaaagtaaataaatgaatggacagcaatcacagcctagttgatgaaactgttcaattaaagcacaggcatttacatggtgtaatt

SEQ ID NO: 80248 - DNA, 1066 bp, Homo sapiens
ggattatagaagagagatttttgctcctcttcagctccctagggaagcttctccatactcattttatctagtgtggacaatttcttgagtttttaatggaaacgggttaatatttttgtcataggggacatattacatctgatattacggggaagaagggaagaaatggctcacttttcagaggtgcatttactctttgacccactagggtactatttagtgttctagaagaggtaatttagtaaattgtaccccagtggcctgaaaaagttaatgcaactctgaaaagtgagccattcaatcgattttccctattgcttttaaaaaatcaacactgaccatatccagagaatgttgaagacaactgaaattagaggatctagaagcaaccagtttattttcacacaaagcttgttgggacatgcactggatttggcttcagaggacccagatctacttcccactccagtacttacagataggaatcgtgaagcattcagtaacctcaccaagccttggtttccttgtctataaagtggtgataataataatatttacctcacaaatttttgtggaaatcaaatagctttactatatgtaaaatgttttataaactataaagcacaatagaatattaattattagaataaggaggttttctgaagtagccatttatgtatctgattttggaaagtaatttattgttagttttcccagaaactgtgagcaaagattagatggttatcacgttgtttcaagagagagtttcctagctagtcaatcctcagggtatttctattttcccccacatatattgcctaacaattccagttctttcattccttctcatcattaggctttatatctcttgcttctctgtttgcccactacattatttcagaatccttgatcaagagatcagaatgactgtagtttccttgatctcagaggtatttagaccatatattaaaagacattactctagttgatgtggagagtgttaaaagcttgaatcaggccacatcaacttgtggaagaaatatggaggtagtgatgaccacattaa

SEQ ID NO: 80249 - DNA, 1044 bp, Homo sapiens
attggcttcagagttgttcagccttataatcttttgggaaaatgtaatacaatcaactctcagattccttgttttaagtaggagacttatagtctcatgtgggtatctcctaatagtttaaccccctcgatttctaccatcttctttctttttgttttagttttcctttgtgccaatgctataaagtctttgaaatggaaacttctaagttgaggaaagacttgtatcttgttattctaaatttacataaaagcaggggcttttttggttaataaataaaatgtcacacagagcaaagaagcatcatctgtaagaatagaagcatcatctgtaagtatagaaactgatgatcctacagtatattagctttaaccaatgccatgttttaataaggaagtagatttaataattgaacctgagtgagaccaactcttaactttctgtgccaatgaggagaattaagaattgcgttttagacaatgatttatttgtcttgtctcgatcaaactttttcataatgaatcagatctcagagagctttcttttcctttgtctttttacctctgccatgtctctgatggacgtcctataaatccctagggcattcagagaatagagaatcagggaatacaggatatctcacaagctgtgaaatctttgcatggaaaacaaagaactgatgttattatttgagagagtgaactatctctgcaatgagctaataacaaatacatttgtaacttttatttattttaaaatagcctttgttcaccgtttttcttgtcttctacctgttctctgagagacatagggagcaaaataaccatcactttctttcttgcttacctagaataagaccatctctttttaattactggttatttcttgagccaaatcctaaccattgctttcactattttagtgactggattattttcttaggtttcctatccatttggagaacctttcaacaattgataacactctataaataattcacagagtaattgtgtccctcttttcactaaccttctttgaagtacg

SEQ ID NO: 80250 - DNA, 1077 bp, Homo sapiens
tccctgtagtccctacagggggactatagaggactacaggcacgcaccacgatgccaggtaattattttattttttttaaaagacagtgtctccctatgttgcccaggctggtcttgatctcctgggttcaagtgatcctcctgcgttggcttcccaaagtgctgagattacaggaatgagccactgtgcccaacctgattaaagttttataagtagtatttagaaataaccaatgaggttgttatttgagaatatctttagacactttcaaaggttaaataattctttggtaaagtaaacagttgtcacccggtttttgtaatcttgctttttctttaaatgaaatatacttgaatttctgtataattaattgatataataaaagttaagtttaccttccatgactggcttgacctttgtccactcaagtaggaaaagcaaaatgagtaagttcttataacactcatatatttggataagtatatacatatgctttatatatgtagtttcctagtcttgcctgaatttgtaacattttacttgtaaacgatattacaaatacctatatgctcttaataactaaatcatttctataagtcagtcaccttcaaaaaactcttgtcagtgattgttcaactctgtaaatttactaaaaagtagaatgtacccttaaaacaagtgaatgttatcatatgtaaattatatctcaataaagctgttaaaaaattttgtcagtcctttctgctcgtggacgccacagaggaaacatcattaaagtctctgttctccctgctgtcatgtctaagtcagagtctcctaaagagcctgaacagctgaggaagctcttcattggagggctgaactttgaaacaaccgatgagagcctgaggagccattttaagcaatggggaacactcacagactgtggtaatgagagatccaagcaccaagtgctcctggggctttgggtttgtcacatatgcccctgtggaggcagtggatgcagccatgaatgcaaggccacgcaaggtggacggaagagctgtgggaacaaagagagctgtctcaagaggaga

SEQ ID NO: 80251 - DNA, 1065 bp, Homo sapiens
acgagaccagcctgggaaacgtggcaaaaccctgtctctacaaaaaataaaaaataaaaaataaattagctgggcatggtggtgtgtgcctgtagtcccagctacttgggaggctaaggtgggaggatcgctgagctgaggaagttgagacttcagtgagccatgattgcaccactgcattctagtctgggtgacagagtaagacctcatctcaaaaaaaaaaaaaaaaaaaaaaaaaaaaaaaaaaaaaaaaaagaatgtataatccactgtatagggtattgtataatgtcaattagatcaagttggctgatagtgttattcagatatttgttattagatatttgatttttatctagtactatcaattactgaaagaggggtgttgaaatactcaacaataattgtggcctacagttctgttattttttacttaatgttttttgaagatatattcttaggtgcatttatgtttgttatgtcctcttgataaatcggcctcattgacattatgaagtaaccttctttgtctgtgatcatattctttgctctgaaatttatagtctgatattaaattctaggcttcattttgacaagtgttagcatgatatttttttttttacttttaacctattgtgtcattatttttgaaatgtatttcatgtaggcagcatacagttgggtcttattttttaatccagttggatgatctctgctttttaagtgagagtattgagactatttacatttcatatgattattgatatgtttggattcaaatctgtcattttgctctttgttttctatttgttctgcctgtatgcccccttttttaagtgattgctttagaattcataacttaacatagtcttcctatgtaaatagtattgtaccactttatagtctacaaatcttacagtggtgtattttcatttccctcatcccagcctttgttttattatcatccattttacatcatcatatgcgataaaccccaaaatgcattgtcactacttttgctttagatatttatctttttttttttttttgagacagagtctcgct

SEQ ID NO: 80252 - DNA, 1058 bp, Homo sapiens
ggggctttcaggccttcagctacagactgaaggctgcactgttggcttccctacttttgaggttttcagacttggactggcttccttgctcctcagcttgcagatggcctattgtgggacttcaccttgtcatcctgtgagtcaatactccttaataaattccccttcatatatacatctatcctattagttctgtccctctagagaaccctgactaatacagagatggtatttagttacttttgaataatttgattctttcaaggcttgcttttaagttttattagacagtaccagcccagtggttagtctagaactaattttccccgtgcagcagaggtagtactcttctgagtactctacctggtgccttgcaaattgcaaggtttttccacactgactggtgggaatacaaacttttcttgcccagtattaatctggagatcgtttcttctgagcctttctagtggttctctccctggcctcaggtgatctcctgacatctatgtacagatcattcattactcagctgaagactccaggaccccctcggcagacctctggagctctctccctcaggtcctctgccagctctctgccctctgcttctctagcttccttggcctcctcagactctcagttttgtcttctcatcttagggagatggcttatctctgcctggtttcccctccctgcactgaggcctgggaactctctggtcagcaagctgggcaatcatagggctcatctcatttgttttccatctttcagggatcactgccccattctggctaatgtccaatgtctggaagcctgttgatgtgtgtgtgagtgtgtgtgtatgtgtgttttagtacctcttcctttcttttttttaatttaacttttaacttttttaacttttaatttaactttttttaacttttttttacttttaattttttaaaaattaaaaaagttaatttttttaacttttaatttaacttttttaatttaacttttaaggggtacatgtgcaggtttgttatataagtatacttgtgccatgggggtttgtt

SEQ ID NO: 80253 - DNA, 1020 bp, Homo sapiens
accaccatctcagctaaaattaaattctgtcaatttgcatcatagtagtatcacattgcatgagactttttaaactgcaaaaagttcacatgtgattctcaagccatatatgtcacgtcatggggaaaccttttaattttttttttttttttgagacagggtcttactctgtcacccaggatgtagtgcagtggcgcagtctctgctcactgcaaccttcacctcccgggttcaagcaattctcctgcctcagcctcctgagtagccgggactacagagtagtgtacaccactttgcccatctaatttttatatttttggtagagatggggttttgccgtgtctcctaggctggtctcaaactcctgacctcaagtgatcctccctccttggcctcccaaagtgctgggattacaggtgtgagccatcgtgcctggccaccttttaaatctttaacttctgaaacttcaaaggttcaggtcctctctgagctctgccatcagctgactcatggctttagctagaacattcacatcactgggactgtttttcccacctgtcaagtaaagttgctggactgatctttaatgtcctttcctgccctaatgtttgataggtctaacagttgccatttttgatagatctgtagaatagaaatgataataaaagagaaaaattaaaccaaccccttctgccatttttaacctgataagaattactgaattgcagaaaaagaactcatcaaacttaacaggaactcttaatcctgagtggatctgctacatcattttttcacctatgacgtttatctctaacggacatgaaaaggacaaaatgaatcagtgatggcacagagccagctgtgtaaagatttagccatatggatagttaaggaaagcgggtctaactgaggttaaaaaccagtgaaccacctcaaaattagattcctttttggcttcttctactgataatggtggtaaggtaatctttgttttttaggtttagcttgttgaaaccattg

SEQ ID NO: 80254 - DNA, 1067 bp, Homo sapiens
tgtctagtaacagaacacatgagagaataatcagatgagtgttgaatattgcaaaaggaatctccttttgtttttttaatgttcccaaaatatctgaattcatttggagcaaattattaagtgagaaagagactataacaaagcaacttcaaggcctagtgttactaacagtgctgtttaattttacacatctgctcatcttagctgtatgtacatttggggaatggaacagcatacacattagatgtgactaaaggaaagttttttcttttaaggatataaactgtgagatggagaaaacaactgatattttcaactgtgatgtcatatctgtcactaagggttgttttcttttgtggtggttttaatatcctagtgattccacatttcttctgaaatcctcctttttaatgagggtatctagattttgacaaatcaaatagtcaggtttttgaaggtatttaactgactaaatggaatcataaactagatttatttttaaagccagtccactccatttctagagtatagttggtgcgaaaggtaggtgtagggagagtgagttttgttagtgttactttctctgagtataaataagtgtgtaaacaaatttggtggatgaaaaaaaattgaacatttttgactaccaagagtaagagataacagtattcaacatgatataacttatattgtttctattccctgtactcctacctccgcacacccagctaccggtaaagtggtgatagccattttaataagaattaacccaatggtcagttctcaaaattttattgattctttaaaaaatggacatctatccatttgacaaaagaactaaaggaaaaacatccattcttaatagtaaagctttctttaaaagggcagtgccatggaaattcgagtgttgttagaaagtgagtgttaggatcatcctgtctctgggcatacaggttaattctggcttgtaatgaaatccctctctagctataactttgtgcaaggaatcttagtagcacaaagaactatagtggatagggaaatatgttttagttattctgccatta

SEQ ID NO: 80255 - DNA, 1084 bp, Homo sapiens
actctgactctaggttgttggtttttctccagctctgacactatccacacaaatgaacatctcgagaaattaagcctctttccccatattggtcattcattctatttaccttgggtgatcacagggtatttctgtatttgcagtatgttgtgattttcaagagatcagaaacgctacatgtcttaaaagtattcttttaaaagaatatgtgcctagaatatataaagaactctcaaaactcaatggtagaaaaacaaacaatccaattagaaaatgggcaaagacatgaagagacattccactgaagagtatacacagatggcaaataagcacatgaaaaagatgttcaatatcattaggctttagggaaatgcaaattaaaaccaccatgagatattactatatacctatcagaatggctaaaataaaaaatagtaacaatagcaaatgaggatgcagaaaattggatcactaatacattgctggtaggaatgtaaaatgatacagccccactgctgacatttaaaaaaaagagaaagaaagctagacatgccactaccgtatgacccagcaattgcattcctgggcatttatcccagagaaatgaagacttctgttcacacaaaaacctgtacgcaagtgtttattgcagctctattcatcatagccaaaaactggaaacaactcagatgtccttcaacaggtgaatggttaagcaagctgtgggcattcataccatggattactgctcagcaatagaaaggagcgaactgttgatgcccacaacctagatgaacctccagatcattatactgagtgaaaaagccagtcacaaaggttacatagtgtatgattccatttgtataatattcttgagatgacaaaattatagaaatggagagagcacattagtggttaccaggggctgagaggatgggagacagagggaatgtttacaatggagcaagatgaggaatcctcatggtgatggaaatgttctccatcttgactatcagtgtcaataccctggttgtgatactatactacagttttataagatgttaccattaggggaaactgggtg

SEQ ID NO: 80256 - DNA, 1045 bp, Homo sapiens
atttgcatgccataaaattcatctactcaattcagtgatttttagtaagtttataaagttgtgcaaccataaccataatccagttttagaacattttcatcaccccaaaaaagtgtcctcatgttcattggcaatcactccctgctcctgtcctcagccccagggaaccactgatttactttctgacttttacagatttgccttttctggacattttatataagcagaaacataccacatgaaatctttgtgcctgacttctttcacttagcatgatgtttttgagatgtgtctgtattatagcatgtgtctatagttcattcctttttattgttgaatagtattccattgtatggatatatcacattttgtctgcttatttactagtagagggatatttggcattgtatccactttgggacgattatgaataatactacttttcatacacaagtctttatgtggttctgtattttcatttctcttgagtaaatacctaggagtggaattggtatatttctttagatatttgtaaatcatagtttatcaggccatctagcacatatcagatttgagaagaaataattattttaccattggtatatattatatgattagtataatgaaccaatgtttcatactttgttaaagagtgaccacatagtgactacaaaggtcatatgatagctttatgtttaagttttaaagacactttgaggctgatttttatttacctaaaaccacctactattatccttagcatgacagaaggctcttttagtaaactcttccattctttctgctcactgatatttttctaataatcttctaagcatttcaagttattggatggaactgcatcataaccacctattatctacttgggctgtcactgctgcaactcaaagatttattgcatcatcgttaaaaagcccagcttactgtgaaatctcactgaaggagtgagacagtattgtgacaggagacacatgttgtgattggataatgttaactcgtctgtgatcccagctgaacacacttgcta

SEQ ID NO: 80257 - DNA, 1248 bp, Homo sapiens
caattcttttgttaactataacagcagccaaaaataatgtaagggaagagaaggataaatgaaacaaagactaataagcacatgcatgtacacatatatacacatcttttagataaatttctaagtattatctgaagtagcatttgccttgtaaaacatgtgaaatagcagtactacattaatttcctcatcggtttcattcaaatatgacctgttacccgtagcatatgaatgctttttccttgttgcctccctttggcattactattacttagataggaggactagcttgataattacacatatagagcaaaactcatcctttttgtgcaaattctttgcaagaagattacattttcttatctacctacttttcctgaaaaactagggataggatgatgggtgtatttactgttgttgtaagccaaggtttgatttcactgtcacttaaaataaactctttcttctgtagaaaccagaaatcgttgaacgtggaggagttaagaccttacattttaccttcggttaaaaaaaaatgcttttcattaaatttgtgatttgaatttcggattgagcagatgatgtcatttctgcaacttggtgtggtgtgcatgtgtgcttttaaagaacaaacgctgtagatacatggaattagttacatggccttttctggtccctttttagacgtgaagccctccaatatgctagtaaacacaagaggacaggttaagctgtgtgattttggagttagcactcaggtatgtctcttttcctcccagtgtactgttttctctgcaacaacccctttatattttcattctgttctctggattgaaaaatcacctagctgccagacaaacagaaactctgcatcttttcctcatctgggagtgtgttattcatttttaatctctgagcgagtttccttcatcagaatatgattgttcattgtttaatgacagtaaaaactgctgatattgtaattactacttacgaatagcaaacttcattgatatgcagctttgatatgaaagcgttttggccagacaaaagggagggcagagtgggagctgtgcctggggagcccaactggcccacaataaaaattaatattgggagcaacaatggtggagggccattacaatgtgcagcacaaattttaattaatttccattttggacctcccctgagaaacccagtgatagtgacccatgagcatgctgtgatgttgatttgaattgcagccac

SEQ ID NO: 80258 - DNA, 1004 bp, Homo sapiens
atgaatctgggtaaaggaaataggaatgtgtattgctctgatctcattttttcaaatttcctataagtttgaaattattttcaaataaaaaattaaaagaaaccctcctgttccagaccaatctatcaaaatgcaaataagtgataatatcatataatgttgtgtaatttgttactccacaacaaagaccactggatttggagggagaggatctgggttcaagtctcagctcattcactacttaggacctggcctaaattacctcactactctgagcctccattttcttcatctgtgaaatgacttccaaagtcttcctcacagggacttggtgaggattcagtaagaatatatctatatataatttctatagatcatctatatactgtatgcacaaatacatatatacacacatgtaaaattgttttgtcatccgtaaaatactatgcagatgttggtggctcctcaccttagctgagcttattttggtgtatgtgttttcctgagtagcatccgtccactcacaggctcccttctgatttcttgcagcctgaaaggatttcaggggagcagtatggaattcattctgatgtctggagcttaggaatctcttttatggaggtacgttgtttgcacatagacgcttctgtgcatatctgtactaatatattcaatcaggaaaagtgaagattttgaaagaataagctaaaataaaccttcagcatgttatatagatgtatacagagtttgaccataaagtctttgattccttgtgtggcttgtgaactgactctggaggttattttaaagcactgtttattacagatcacctgtgtaagacctgcctggagcgcttgttaaaaatacagattcttcaaccccgttcaagaccaattaaatccacacctctaagaatctgcattgttaacctgttccctgggtgattcttatacatactaaatctggagaacccgtgatgtaaaatagggactccagaaaaattc

SEQ ID NO: 80259 - DNA, 1075 bp, Homo sapiens
atattagaaggacatatggctcagtttgaattatggtagtatagaacctgtatactgaccagtgcttcaaaaattctcatttaaattgattcagataaagaaggacttgtattttctttattttttcttaatagagatagggtcttgccatattgcctgggctggtcttgaactcttgggctcaagcagtcctcctgcctggacttcccaaagtgctgggattgtaggcaggagccactgtgcctggccaggactttttataatagaaaagtagaaaggactctttaaataatatcatagatagagttgcaatcatgattttgtaacctttttttttagtcaaatactttttctgtgagttttgtaatgcatgaatgcaattgtatttgtaaggaaataatcttcaaactcaattcacctgcacagtagaaagaaagcaaaaataaagtgttgaacgtttattaaatcatattcttctgcttcttcttaaaagggaatctaagaggaaatacaatatgtatgcatcagctgagaggttagcgataatggtggtcagatctcagaactgagtctcccaacagaatccacaagggcttattctattagcctgtttcaggggaaactagtgtttttgatttgtgggactcagtattgctgttatacaatttccttttgcatattttaaattgttatcatttattttataaatgactggatatagtgtaagacaattgagaagttacatggtgtagagataagaatcctagattgggaatggaagacctggattacagttccaggtttgctactagttttttaggtgaccctgtggaagccactgttcttcactgggcctcagtttcttcatttgtaaaatattgatctctaagcccctttccagactaacattctatgactgtgctactgctcatggtgttgttttctttccttagctttcacacagcaactctagagttgtgtgactgagacagtgataaaatgacataaaatgcagaggcatggcactactataagagagcataactattagatttaagatttagagcacatataa

SEQ ID NO: 80260 - DNA, 1011 bp, Homo sapiens
ctgacctcaggtgatccacccgccttggcctcccaaagtgctgggattacaggcatgagccacggcacctggccatcttctgaagattttttgggctctattattttgacaaaaagaattgtgagttttagaattacctttaccaagttaaaaataaacccatggaataataaatacgctgttctctgtacatgtaatatcatttttcttcatctccccaagatacagtttaaataaccatccttcatgataccaactctgatatctccagctgaaggtaatatcttcttcttctgaccttcacctgcatcttccttgtggcatgtaaattgtccactttgtattacagtaatttataggcatgtcatagttccttatgacaggattcaaatatgattctctcataatcttctatgctgtttagtacaattccattgccctagtgggcactcagtaaatctttttgactcaaatttttcctacttttgtaatggtttttttaaagcagtttcagaaaataaagatcagagtttaaagtgtgatggagtctttaatataaatgcccgtaagtgtttggagaatagatcacagtgttgtgcttgtgaagaagagctttcagtttaccaaggtatcagatccagatttgaattccacttcagccagcctaagctatagaaccttcggtaaattacttaacttctctgagcctcagtttcctcctctttagatgggagatctatttcagagcttttggacaaagttcacaagggaaaaaagccattatcccctctctttaaaaggaattaccgtttgaaatgtttacatttgaatcagactgctaatttggttaaagatggtgcaagctttagcttacagtttcacctcaacctccactaaaaatagccataacgtgatttacacacgcacacacaggcgtgcacgcacacacacacacacacacacaaaaggataataccataaagagaaagggaaaagagacaacagcactca

SEQ ID NO: 80261 - DNA, 1011 bp, Homo sapiens
agaatgaagaaagacagtgtccagctgtagcagtagtttggtagcaggagaattagacgtaaaggtactaatgcctgaggggtgggtcatgaattaataattgctatgtggcggatgagccccgtcagaagagctgaaaatgaggaagttgccttgcagagcgctatcaatcactcagtgaccataacttccagtaattagtgtattttatgggcctttgcttcagtggctcgaaagcacatatgctccagtcacagctaaactttgctggagtaatattccaggatgatttatcctcctgctgcactgggatataaccctatattaggtgaagattgtgaactaagctgcaataaagtgtaagtttaggtacagtttgcccaggttgagacctcaatgtatcacgcttttcagcattcatggttaggctatagcaggcaatcatttttaacagtgaaacaaataaagcaattaaaggaacagcattaggatattgtacttgtgaattactgttgccctcttcctgtttaagtgtctactgtaataagcccatttctttttatttttttaaaaacgtactctgttagaaacatttgttcgttttttgttttttttaagttccagggtacatgtgcaggatgtgcaggtttgttaagaagtatttatctgtaatgctgtcttttctcccttattattaataatctgggacagaatgcagaaccttctgaatggtagataagtgcttgatttatttatttgtgctactgtttgggctccttaagtaagtttatatcagtggactttggtgaggacaagtagttgttgttttttgttttggttttaatattggcacccgttaaggcgcactcctgatgggaccctcacatttaggctctttctacacaaagaaaaaacattagttacaagctctcagactacttggcacttttcgtataggcataatgagttatttgctgtggctcacccactgcactagaagtctatgaggtc

SEQ ID NO: 80262 - DNA, 1030 bp, Homo sapiens
gcacaggcacacatacaaatatatttgttatttaaattataaaatccaacatattcaaatgctgctaactgaagagcattttatagattgtggttggccaagtcaaaggtcaataagatgacactaaggaacgtcctgtttttagagtgagatgttagttgtttactgctatttaagtgtatccccaactggtaacacttcagaccattctttttcagccttttacataataaacgtcccgcaagagagtcttcagcagtttgctaaatcttaagtatttggaattaaagtgtactttttaatttaacattaaatagaatcccttatctctacctccaccccctggccccaaataaataaagcttttccaaatcttttacgatgtgagctgctcccctcctgggaatgaaaaggatatgagacccatttgatgaattgctggcacttatatgtgtctacatttttcagtacactttttaaaaaaaaaaactagacttaagctgcctatattacatgcttcttttgtaaagatgataaagagagcaaagatttctattggcataggcctaatctatttgctttgttgtgattctttttttttctttcctttaactgttaacctatttataaatctaaatctacatacaaaggtcattggttggctgaacttaaaccattttactcagtaaatttaattaagaaaatacagtgcaactcataagcaaatgagttttttcctagttttaaaccaaaccaccctcttgagtgctgattgccttgcccgacccctagtgatacagaaacaggcaaaattaaaaaggacattaaagcttcattaaatctgaaacacatttagtacagtgacatatctgcaggccatttcagagaagattacatactctcttttgtaagtttcctaatttataataccttgacaataaaaactagggaaatgcaagtagattaatagaccagtaggggtaaaagatacagaatggccccaggtctgcctgtgtgtgaaatattcact

SEQ ID NO: 80263 - DNA, 1024 bp, Homo sapiens
aaactcctgattttttcttcttgttaaaggttgagagtgatcattgtgcttttcctttgtgtgacattcgggattgttttttttcctggtccaataccatgtactcattttgaggttggaggagagagccagctttttcttgatacactttttaagctcttaaattcacttaaaattttttgagttaaaagattaagacaaagggtgaaagcatctaatctaggtcattatttttgctaggcaaatatataggcccccaattttatgagtgtaattttgaacatattatttaaaaatattttgctccctcctgtctacatttgtaaggaaacaaaacagtccattatagtagcattgctgactctaatctttattaaaatttctttaagatttttattatagaagggtaccagcactaaaatagaaagctattttgtggtttgaaaatgattccccagtttgtgggggaaataagtgaaatgtctagagggatgaaaaatgaatggtttgactgttttcctctggttgatgttcactgtttttctggcatcttggtctgtacaggccaaagtgcctagaggcatgtctgatttaaaggtggtgttggtctctgctctttaagcatctattaacttgctattattatgcaaataagtgttgtattacacatactaatttatgcatggttagattatgcagatgcatcacaaacatggttattgaataataggatggggctcattctctctaccatctttataagcagttttaagcaaattctcctggtaccaatgtggacatttaaagaccctttactcaatgaaatgtctctttcgtattcttttgctttcatagttaaagccatcagataagtggaagagaaatcgtccaagttgttaggttcaagagtgttagtctcacttttcaaattcatagacttttttgtttaaatgtaatcttttccttatagagaaaatctaaaatgcagttgcttggcatgaatgctggcatttagtgagatttt

SEQ ID NO: 80264 - DNA, 1007 bp, Homo sapiens
ctgtggtcaaatttgagaagaggctatttacctttgcagtatggttttcctgaatgtctaaatatatctttacttgatcagtcaagtggaagttggaaaattctaatactatgctgaactccctagttagcaacaacctttataccagagttggggcgggaaacaactgtattccttgaatcatgatagaatgttgtcaccaaattgttacttctatctgaaataatagaagcagctttgatgccgttaggcctatttcctaagtttttcaacagaagttggggtgcgtcgttgctagaaccactaatgacttttggtggagttggcatttattttacaggctttgtactataagctgaagattgggaaaggatactttataaatgcctttcctacccctcccttatgccctcaaaaaaagcacatgaagaaaaatgtgtatttttatagtgtcactgaggctgagttatggaataacaccttctctttggcccacgttatgtcatttgaactcctaccactctgtgaaatagcctcccctcataaattggacaaacagaatggctgatttgctcactgttaaaactgtgactggtttggtttctttgaatcccaagtgcagtaggcaggagtgaatcatagactcttagagttggaagggatcttagacatcatcaaatcaaacttctctacaatgtctctgaaaagcaaacatccacactgcttgaacacttccagtgacaagaaactcactatcttacaaagcatccacagggtcaaagcagtgttctatttatcaagctgagaactatctcatcctaagtgtcactcactagtctgatcctagaacacatgagagcctttcatatatccttaagatcacattggtttgattgttcctaggactagggacagtgccagggaattgctgctgtgaacctaaagtctaatcagggcaccagacctgagttgtcttcactagtggcaaattgagaggagtggcctat

SEQ ID NO: 80265 - DNA, 1051 bp, Homo sapiens
ttagaattagaattaggtgctaccacagtctcactgcaggtcttaattgttgctttgtaactctgaggtgtcagtttcctcatctctaaaatgaggattctaatgcctacctcttctatctgattaaaggaggtatgctgatcaaatgagactatggatatgaaaccactctgaaaagtacaaagggccacccatctggatcagatgttgggctgcagcacaaaacagaatttcccagctatcaatcataggttgtaaaaggatgttcttagcaacatgccagccacaattggagcagagtataaaatgagcagagggtaaagtggggaggaggggccggcttcaagacttgtctttcccccagctcagtgtcagtgctgctgacagcatcattagcagcccctcttcctgctggtgacacagtgtgtacccagtgaggtcgcagagagggaggagtgttgggaagatactagggacagtcagtgccctgggagcaacataaaggttaaagggctgggtttttgttgagatagccattctgtatgagtttcattgttttgtgggttgggtctttgttatttgaaagcactgttttagtttcctttaggcctttgggttgcataacttccttggcatgcagtttagggttctaaagaaaaaaaacatgaggagcacagtcttattactactgcctataacaggaaaaacaatagtgtcttggcttcacctggcacctttcccacatagggttccagtctcaggctgttacctgactcaggctgtgcattctacctgcagggacttatttccagcctctaggtgagccaactcaggctcagagaggcaaagtaccttgctttaggcaggaatgggtacagttaggtctaggacttgcagacaaataagccaactccctggctctttaacttcttaattcgtttggctattcatacccctgttctcctttccactctgccccacaacccttcttctagtttgccctctctgccctagggaggcctcttgtatagatgagaaatgctgagcattg

SEQ ID NO: 80266 - DNA, 1056 bp, Homo sapiens
atagctctgtggggagggggggcttaacagcgactgtgggcgaatctgtactcacaccttacatttggggctttgcaagggaagtgcaaacatcctaggcagtctgagtgcagagagagtaacaaatatttcatcctgccttgtcattgattagaaaagagcctttaatttcatttcaccccatgttgtgattaatttgcattctttgtcagaagttaatggagttttttatggttcactctgaaatccttgaagacatcagacttgatctgatgtttatacaaccgccagcggaattttttcgtttgattgatggcaagcttgatgttattccaaacggctttttaagctgtttttaagaattatttgaataaaatgcaagcaagatattcttgtaacgatccagtttatctgttaaaaatctgtttcaaataagatgataagtagtaaaaaaggatcaaaaagataagagaaatagtgaatagtgatgttatttgttaaaaacacataagaatggcattcaaataaattattgcagtatatggagaagatcacttttattgggaaaaaaaaataccatcatctggccaaatagaataatttggactagggtaaaaggaaggtctgaatctttgggatcagaaacttttactaccaattggctaattctcatttattctgccagcttttgccaccagtgtacaaaatagagatctactttacttaactcaaggagacagggctgtcaggcctgttagctgaacaaaatgatgacatattgcttgtctcaaagaggcattcttaaatcccaatacaagttaaacataggtagataataagtgaaaaatatgcattcttaatgatataacgactggcaccttccatagatagttcagaaatgaaaatatcctgttgttaaaaccaagatacttctgtcatccttgggtaagagaaatgtgtgttcaacccctatatactacatatcaaagtatgagaggagctgtaggtggcatttgcttcagaacctcctgctattaaccaaggaaatacgttttg

SEQ ID NO: 80267 - DNA, 1020 bp, Homo sapiens
cagattcttgctgtgctgtgactgctgctagtgagacttactcataggtcaaaaagctacttatctgagcactttcatttaaaaccgattaatttatttgctgcatctgaaagtttgctaaataattgggtagttttaattgaaattactgctttctgatccttgtattaacatgatctaaggtcctttttattatatgcaatccatattattgaccagatttgccctgttttcatttaaatgtaagcagcttgtcaaggagaaaatattttgtttaacttggcttggaaacgtgctattttaatgtgttttgtttttttcaattgacagactgtcttttaaacattcatttattttgtagtaataaattgtgctctggatagagtatgtgtttcagaatagagtagaaagcatatgttcttaaaactatttaaaaacattgagcacttttcaaatgctaatgttgaagtactagagtttttacacttaattttatttgtgttttaaaagcctttgactagtatattgttactaattctaatgttgattgtttactgatgtcttatattctatgttaaatttagaccacagatatcattatcttatttatgtttactgatcactcctggaattgcaaaatacctaaaaagtttgcactctttgaaaagaggtattagaatctatcctttgttgcataaactttttgaagtttggaacatgaaggatttaagtaaatttttaaatatacagttttttgtatgtgaggtctttaatcaaggaaaaaatagcaatgagtaatcaccccaaacttcaagtactcacctttaatttgcaagagtttaaaggggcactatgcatgcaattttttttctaaacagatgtctagcctatatgttttaattcattttacttttgtcctcactatttaggatatagacatttaaaatatcctgatatttcaagcataaaatcagatttatattccataaaatgcagagacgaaatttaagtgacatgaag

SEQ ID NO: 80268 - DNA, 1059 bp, Homo sapiens
caattcaacattatttgtcactgagcacctactctgtgcctgactaagcactaggagcacaaaaatgaaacagatgtggtctctgctctcaaaagagtgcagtccagttggaagaaaaacataaaaccaatggcagttgatataaaaggaatcctccaggagatgggatgctctgacctcaagaggaaaagggagtggtcagctcacttcaggaaaccaagagggtttcacagagtagatagctgacgcttgagccgaggctctgaggcaagaaggatgggaccatgattcctttgtaatttttaaataatcagtttagcccagaaatagaatagaaggttaaagtaatgaacttggacaccaagtcataataataaacttggtgtccagtctggctttcacgtggcagctttgctattatctctccctcctaggctctgtggtccaggaggccttctacttctctccctttgcaagaagcatgggaaaggatgtgctaggtactcaagtccaaaggaggttcatctggtaaaagataaaggtctaaaacagcatattatatttggtgttgttccggtactttaacagtactaccattgttactttcatttccctaacagcttagcaattctcctaggtaacttttaaagtcaccgtgggaaggaagtaagaaaagggaggggagcatggtagaggagggaggtaatgtgtcaggatggagatggcaagtgtagcagggaccagataaagaaattgggtttgagaattttgtacatccccttgacatgactggggctgatctgaggttggaagtcattgcattttaaggtctctgcccttgaggacagttggcacatgcccctgaggggttccctgccaccctttatgaatttggcttggtatatcacggcattttctagactgctggggaggaattgtcatgatcaaatggactaatgcctaagagagcactttgaaaaatataaggtggtaaacaagagctaggtaatattagtattatttatatttccagaaagttcttcagggatttacctatgt

SEQ ID NO: 80269 - DNA, 1980 bp, Homo sapiens
cacataaatcttccagacaagagctgcagggcaagccataatttcagagagtaaaagagaaaatgaaagctatagctggtgtcttctctaagttacataggtagattcattttagttttctgattgtgcctctgaatataatgtaaaaggggctggtagcaagatctgttttaccacttatgtaaaaagctcctctacagagagcaaagcataaagtgagacttccaaaattgctttttatcaccagagccattggctaaatagttgaggacccacaagcaaacttctacattggcaatttcctttctagcatcatttttcacagtcataagtcatgttataagaattttctaattgctaatgatggtccttgtaaggaaatatatgataaatgttactataataataccaagacctaactggtacttgtggctgccttctatgaagtcattcttccccatttaaacacataagagtctgccttacatcagaatgagacgtaactatcccctgttagtgtggttttaaatcttgaatctaacagctaatgaaagaaaaaaaaaaatctatgcccagaaaagggaagaggttcatctatcaaaatgcaactagttctagagactgattaacaaagtgtgtgactggaacaattactgttctctcattgtcccaaagtactagttagacatagaaaacactcaacacacgcaaaatgtataagcaggaatgagggcttggacaagttagttataaacagcatttcatatgttgtgaggtgcaggcagtacatcagccctaacaatattattgcgttcctctgaactctgctctcacagctaagcatttggaaggcagacccagaataaagataggcattcacaaagccaacattttatattgaggacccttggttccacttttaatgtgctataaactaggggcttcactttttcatgaactgtgtgcaaaagcagaggcaatgactggaggttgactgtttggatctgttttatggttgctgtgcctatacagtaatgtgatcttgaaaaaggtaaacaacaaagagtttagcagtgaaaaatatgcctaatataaatacagccgagtacatggcagttcagaattttaaaaatatgactgtggcattaaattttctggtggaattaacagaggaacataatacagcctttatggcaatatatctgagacagaaaaaggagataatacatctaactctatggtctatgtggcattcatataaagaaaagcacagtagctttatttaattgagaaaatgaatcaattacaatgatgttgcatcatcaaattcttgtgaaatagaagatataagtcactgcattgtgtaactgttaaaaagtaattgagtatcttaagcattttgaatcaatttcaggtactggcactgttaccttaatacaaaatttatgaagatgatttcatataatatgttgctatcaaaactgtataataaaacctgataacgtctctctttaaaaacctgggcaaaacagtatagttataagattataaaaaaagactttgatattgctgtttttctctttcttttaatgaagagcaagcataaatagtacagttttaagttgacttagactaagcttttaacctgcaaaatagggcaaactagagactttaagacctcagttcatgaggaagtttcctcccctcagttaatctgattcacacaactcatatgtttctggggacagtgtttcataatccatttctgaattcatttcaaaacctctcacttagaatgtttgctgcatgttctcctcagagaatgttgtcatccccctgactcttggaaatttgtgaaacacattctctttgatgtcagaaatggatttctgattctttattcattacaaataactccgttgttgaagcagatatatcttactaggaatgtaggggtggggggagtatcagtgtgtgctt

SEQ ID NO: 80270 - DNA, 1391 bp, Homo sapiens
gcagctcttgagaaactcacagtctaggtgagaggaaccaacatgtcaaaatggataatttatcaacaataccataccaagtataaatgtatacaaatacagttgttttcaaataactctatgatcataggcaagtgtaatacagatgctggaaggaaaggagctctggaggagccccagcaccaccacaccctggcgctgaggcctcaggcccggacactgtcctctgataggcccagctttcccatcatagaataaagatgatcatccctgccaaactcagggtggttgtacagatcaaatgagtttgtatatgggaaagaattttttaaaacacctttaaaaacatataagggattattactagtttccctgtattttaccggctggttggagcccagttatctcagaaaacagttgacccatcagtatttggttcctgaaaagttctctgttagaaaatgtagtacctggagtttcattttcattgagtttataataactgtaagctttatttttcctggatggggaggcactgaagtgtttagtactttaatgactaagtggatgttttattaatttttatgtcacgttttagtagctttgtaagaaatgcagtttatcagtgttaaatgtgtgagcagcctgccttcagaatgttgatcagaaatgcgctcttactggactctgcatttattccctaaaaatcagtgtgaaacttccatgaatttgattttcccagagagcattgctgccctggaaacaggcagaaggaactttggaaaaggtggagttgttaccccactcctaagttaggtgcaaatacttcaactacataattaaagttttcctcacaaaataggggattgtgagcagacactggcaggaatccaaaattctaatttctgactatgatttaatttcaattttaaataaatcggtttttaatttaaaaagagtgagcttcgtaacattagcaatgattgcaacattaagcccagtgttcacaatctagcaatataaaacattatttatatctgaatcgtaaacagccttttgaaatggattatggtttttctccctattctaatacaacctggagggtactaaaaagtgttgtgtgaaattaacattctgctgactttcgcctataaatgagaagcgagctattaacatttgtgtattttcattatgtaaattgtgttaacacatgcccacaaattgccaccagcaatgcaataattttctctcagtgatcataatgtgtccaagtgagtcattttgattatgacatgctaattacatattgccttttttcagattcagaaaaaccagggatctttaatggtaagctttatgagttcagaaaaaaattcacttttctttttcct

SEQ ID NO: 80271 - DNA, 1603 bp, Homo sapiens
tttgaatgttttctgcatcaaatagatattttcattccttatttaaagtaacagttattgctgttcaatttaaaatatcttacttgtttaatttgggcaaaatcatgagacttttgaaattaccatggggagatgttctatttaagggatgaagattgatgaagaacaataatgtgtaacttaaatgatatatttttcttcatagcatttctttcttagtcaagagaaaaatgtaacttagacatatattcctgtttactctaaaaccatcttccttgtggaaacttgggaaatgaacattgcctttgctaaaaccaggttgatcttggaactgagctgatattctgcaataaaagtattaggaaaggattggccagatgacctgccttagacaagatgaatcatagcatctcggaaaggaaggattggtggggtcctgtacttactgcacttgtcctatgtgtctgtcagagttctcattgctgtgatgcagtgttcctcatagggtggaccaaggactgattgcatcagaattacctaaggctcttgttgtaatgcaaattcctgagcccagatcgctgaattagactttctagggatcgtgcctagaatctactagtttctcgggtaactctctgcacattataagtttgaaaaccacttctcaaacttccctaactgcttgccagggctaagtcttcccctttagttcccacagggcaattagctagctatcttcatttgcatctgacttttagaccttttatttgtgaatgaatatgcccagttgggatttgagccgttttactgcttgggagtgggatttaccccgttgtgaagtgggtatctgttgctagtatatactatttcctgttagagaaaagtcagatcaaaaattacttcccctgagggaagttcagacaagatgggtatatttggcgtcacatacaaaatagctatcgcaaagcccagtgtaacatattttcttattatgtggattcagcttaacctgttatggcctggcaaagagtgaagatgtagtaaaacaccactaaggtgggcaagagccagtcctggaatggccaaagatgaatgttagagccactctgggagtcaggaggtggaatcatggaacaaagccagagttagctaccagatgtccaaacagaagacaccaaaaactaaataggaataagaaccatgaccatgaaactcagaccacagatcaggacctgggagggtggccaaagtaacaggagaattgagctccaatcagaaatcttggtggtccaagtaaattttggtgggtggcatttctctgaattgtcgctggctagctcaggtataagtgacagcttgaagacatcatctggtgcctcagagttgcttctcaacagaacttcttaccttaaggtccttatgtaatcaggtcctccctaagtccctgaatacctgcgttgtaaagtgctttggttctttataagtgatgtgtgtctatgtgtacctgaagccttagccatctgatatctttggggaataagtcggcccctattgtctagataactgaaatttatgactgtaagctctgacagctatgagaaat

SEQ ID NO: 80272 - DNA, 1068 bp, Homo sapiens
gaaagaggacaataacgggttttacttttgtaaatgaaatcccttcggtatgagacaagtatgttttttgctgctctgcctaagccactgaaaagggagatgtatgtggatgttagtgtgtgagtatgtgtgtactgttcatgtaggcacatctaaaaactgctgtgcactatggctgatgaccaacaagagacctaaaataaaaagagaaaaaagatgctcattggctttggaaaggaagcaattataaatacagtttaaaagattaacctattttccatttctccactcacctattttcaagaaatgtaataaaacaccaagctctttaccatatgtttacaacatttctaagtaaatataagtcttttaaatgacagacaaaaaaaaaaaaaaaaacaagcagactaaatgaagaatccattttgacattaatgacaaagatcatttctattctcttttatcccaatactgaagaacttccaaaacacttttaggagaaaaagaaaataggaaaaaaaatctctataatctcaaacttcagttacccagagacagattcctttagacctgtttgtttatattttgttttttataagccatctggtagtgatgttcacttggctaacagctggttctccttgattaaagggtttatgggtaggatgggcctttcagtggcaaaaattcaggcctttaccccgtggttccaggcccatctgagacaagttaaatgagctgctactgtcagcccagacccagtggacagaacgtcacaccaaaatgcccacacatgtaatttgtcacgcctggcagcccagagcatggggtgagccagtgtggaaattgaatcatctttcactttctctgctcaagacttgatgtggagtaggatgagtaaaaggcgggctttctgttctgcagctgagcggagttagaggctttcttctctggtatgtcatctgccagccttcctaagttcaaagcctcgctttcaccctgatgttttcccttgtaacacaccgagaagtaggtcagttctatctgcatcatgaaatcaaaaataaa

SEQ ID NO: 80273 - DNA, 1037 bp, Homo sapiens
tcccagcactttgggaggctgaagccagtggatcacgaggtcaagagatggggatcattctggccaacatggtgaaaccccgtttctattaaaaattcaaaaattagctgggtgtggtggcgcacgcctgtagtcccagctactcgggaggctaaggcaggagaatcacttgaacccagaaggcagaggttgcagtgagccaagatcgtgccactgcactccagcctggtgacagagcgagactccatctaataaaatttttttaaaaagtatagtacaatatctatactgtagatagaaaattgtcatagatacaagacacaaaccactgatcttattcagattttaccagttttacatgcacttgtatgggggcggggagttgcagggtggagggtagattaatgacacagattattctaaagccaagatacattatagtttcaaaaaaagaatattccttgaatattaaaagcatttttctcattgatgctttctgtctttggagtgtccagcttacctgcctgctctcaaggtcactaaacgtatttattggcacacttactctgtaagtgaactagtagcagctgtggttggaattggacctcttcctgccttgtctcctccaccagctctttgagtgtgcaggtacagacacacacacacattttctgctacttgcctttttttatgcctgagtaccttgctgacaagtgctaataacaaaatacccagagagagtccagttgaagttaacatacattaagcattctgaacttgtccttttgctcatagattgtgcataattaataattaaacagtttcagttgtaatgggttgaccttcttgaaccgttcattattcacaaggcaaaggcatcactcaaactttttcctattgtccttcactgttctctagcatgctgcgtgcttgtgttccagttgtttagcaaaaggggctgaccaggtagttactgaaacctctgaggcttggaaactgtcctcctcgatgaccagaattgcctactaaaatggttt

SEQ ID NO: 80274 - DNA, 1048 bp, Homo sapiens
agggggcttttagctgttaggttgtttttttttttttaacttacagaagatggaggttatgaaagtgtttgtaaactatgaagtgcgagacatacatggggcacgaggtcattcagcctctttgggtcatgattttctcatctgtctgatgttcctgggtatttccagcttgttgcctcttggaagatacatgtgtttagggaagtttaatgtgacttagaataaattatatgtatgtcggatgtttgcaattggtgtacactgaattggtagtctcttggggtggtctctgtggttgaaaatccaaacaagatgaagcacattcctccccactcactggaagccataacttttcatgtctgtcctttattattggtaaaatgtaatgagcatcttgttggagggaattattgtaaaccagttaatcaacaagtatttgttgtccaggtctgtgaggtgccatgatgggttcagaaagaatataagaaagacctatgtctcaggagcagactagacatgcccattggcaacatttagagaaggtagatgagtgccaagctgctggcttgggtggtgcgggagctcggaacagtggccgaggggccgtagtagtcagtgaggatgcctggctcgggcctgagtacagaacttggaaagtggtggtacaacagaaagccagcttctcccctccctctcccttcctctcctagctgtccatcctgcaacatgttactgaacgctctccacctctagttgcttatctacaaaaatagagtatcgcaaagcatgaaatttaagtgagataaaaatgttagacacttagcacagtgtctggcataaaataagtgttcaataaatggtaaccatttttatcgtcattgtcatcatcatcactgctaataacaagagggaagacattccagggagagaaaatggcacaggctgagaccggagggaacaaggacagtgaagaacccaccctagccaaagcaaaaaagacccttggaaatgatggggtaaagttagctgcatggggccagtgtgatct

SEQ ID NO: 80275 - DNA, 1090 bp, Homo sapiens
ttgggagctgacatccagtgcaaatcccagctctaccttggccaaatccacaaattgagggaagtaacagtaatgccatccagctgctttatggggttgttgtgacactgaaataagataatgagcttgaaagccggttgtagaatgaaaaccactactcaaatgctggtatcagtaaatataagcatttctctctccaaatcaacatattcaaactgggttgtctttaaataaatatccttacagcaaaggcagtaggagcagctattaggaagattcactgatctgttcccctcaccaccagggagaatgtcatggctgcaacaaagacttaaaatagcacaaagcatataaaagtcagggcaattcttacctcctacctcttcataacgacagagcaccaggcagaggaggggcagggccaggtctctgctcacctgcattggtgagaagagagccaatacctgctcaatgtggacagtattgcttagaacagtggtgggaggtcaggtttgcaaaaggaggttaagatcaaaggaactgtgttgaagggttgagttggtctggtggaaagaaaaaaactaggacgttgctaagaccctcctgcaaaagactggaccttctggctctaggcaaagtccccttaattgttatgagaagagtatttaaatttcaaggataattagtttttctcttaaggggtatagggttagactaaaccttttatttttagatgtgaggtctttgaaacacttggatacacctctcaggggttaaatctgtctttggggctaccaggacttgaaaaatgttgctctgtatcaagaaaaccagaagtgacaagttcatttaaaaagcctggtttgtcattgtttatctaattttcggggttgacacagaaaattaaaccagctgacactcactctctgaccgtctctctggctcatttccctggtcctttcctacctgaccttgcaactacaaaatgctccagaccctaaaatataaaacttcccactgagtttctgagtcaccctgcagtcattccaagattatgtcattggatgtcatccctaatggtattaaaaat

SEQ ID NO: 80276 - DNA, 1814 bp, Homo sapiens
tctttatcccctgtaggaattgtgcaagctgcaacacttcaagatattgccaataaaaattagattgtgagtcatacatatcaaaatgaattctctatgcacatttgtttatgaaaggtttaatttttcattaggggagtacccataaatgtcatttttaagaatgtggagggtattttgtcatctttaggaacttagaagcaggagggtgtgatggccagatgatcttggtagttaataagctgacagcttcatgaaactcctcttaaagtaatttaaaaaaaaatatgtgtttttttggagtaaaactcaaaccaagttatagtgccattttaatttacaggaagaagagtgggagagaagaagtccatcagcattttagtggagtaaataatgaaattaaatgggaagagaaaccataattataaaagttactatgagtgtgtcagtgaattctattgttattttctgcctctttattttcaagaaatagctacttaattttgatccttacgctgtaatttgtctgcttttatttcagatagagtcaagtacatctgatagtttattcatggatttgatttgaatctctataacttgcttttgtcaagtgccacatttagatggcttttgttttatgtcattatttttatcaacagtattttaaaaactctacagtatagtttataaaatactacgtatagtttctaagtatttcatatgattgttttgaaatacctccttcttttcatccaccgttttctcctgggcgatcccattgtctttttcttcaaagagtttcttgtaatccctgttgattgcggtagtgcttagtggcgagtccatagctgattaaccttgggtgtctcctggtgaactccatcagcatgctgctccagggttcttgctgaggcttttgagtttagtgtaatttgtacccttttttgctggtaaccagggataagaaaataaaatggccaatggttgtagcgggaactgggaaaaagtatccaagtctcagaaaaactgggtgtttatgatgagatgtagcctttcaaaacaacaaccaaaaacggattcattacttcatagaattgattgtggtgttttctgaagtgtttgactctggcatgaagcatcttgcttttttaatgtttgaataataatatcttacttatatagtactttgcagttcataatatattgcattatctcttttgatctttccaacagttctttgaggtaggaaaggcaagtaataactaaatcctttttatagatagagaaagtgagcccagaaagggtacgtgactattgcaaggtcatacaaataaaagtggcagggacttgagcctaggtcttgtgtagtcctccttaaaggtcctacagcagacctggagtcctctagggtgcccagttcacagatttctacttatgttgttgctgatactttcccttttggaaaagctctatgctagggtatttttggatattctagggcattttgcaagcttccttgcaaaaagtttggagtttgttagttggaatcatacacattaatttttgtaagtatcattttgcttgagaaaatttcagagaatctgagaagtaagcagaaaaataaacagtacctgtaatcccaacactcagagatatcatggttaacatctgggtatttatccacttaagactttctctctgtgagcatatgtatatgtatattcatcataaaaagatacaacactgttttttatttataatctgctattttcatgtctatccaggttagtaaatacaggtctatatgatcattt

SEQ ID NO: 80277 - DNA, 1392 bp, Homo sapiens
ctttgaaaacttgatcttttttaaaatttaaaatttacagtacagcagtgcctaatttaaaatgggacgatccctttcaccttcccactcatggtattttttataacttaaaaggaaaaataaggctgggggcagtggctcacacctgtaattccagtgctttgggggagacctaggcaggcagagtgcttaagctcaggggttccagaccagcctggacaacatggcaaaaccacatctctaccaaaaatacaaaaaattagctgggcatgttgatgcgcacctgtggttccagctgcttgggaggctgaagtggtaggattttttgatcctgggagacagaggtagcagtgaactgagatccactgcactccaactgggtgacagagtgagaccctgtctcgagaaaaaaaaaaaaaaagaaaaaatttatttctagtgatctcttacaaggcagtttgctaagcagagttatttaattaaatcctgcatctctgtaagtaatgctaaacggtagtagcttgcattgcactgaacgaatgtgcttgaagtactttttttttttttttttttttggagacagggtctccctctcttgcccaggctggagtgcagtggtatgatcatggctcactgcagcttcgaactcctgggctcaaatgatccttccacctcagcctcctgagtagctaggacttcaggtgcttgccaccatgctcagctgactaaaagcttttttttttttttttttttttttttttggagatagggtcttgctgtgttgcccaggctgctctcagactcatgtgatcctcatgcctcagcctcctaaaagtgttggaattcaaggtgttgagccactgcacctggcttgaagtacttgtaatcagtaatggtgtgggaaatatataacttaattttttcaaggttatgttttttcttttttcttttttttgagacagagtctcgctctgttgcccaggttggagtgcagtgacatgatctcggctcaccacaacctccgcctcctggattcaagcaattcttctgcttcagcctcccgagtaggatgcgcaccactgtgcccagctaatatttgtgtttttagtagagatgggctttcaccatgttggccaggctggtcttgaactgctgacctcagatcatccacctgcctcagcctcccaaagtgctgggattacaggtgtgagccaccatgcctggcctgattgctttttctgtagtaaaatataagaatcatatgaataaatgaaaaattccctaacttaatattagccaagaacttcctctccagcagagcttagctcttaccaaatatatatgattgatttgcattctacctattttgtttttttcctttcccttttgtgg

SEQ ID NO: 80278 - DNA, 1050 bp, Homo sapiens
tacagaatgtaagtaacacttgataatagctattgatatcctgcctacatctggtgtttgagatggactgtttgttgtttcatatatacttataattcttccccaagaaaacaaaatattcttgagagcacatcattacgttttgccatctacatagcactcgacattctcctggagactcagtaagtgcttgataaatacctgacagtttcatcaaaacagtggaataaagtgaggtgtggttttccctggtgtatactttatcctatatttcttataaccaagggtagaagtcaatgaatttatgaatattaattttaaatttctttggttacttaacgttaaatgattaaatttgaagtttgaaataataggattataagtgagctggcctttatttgcttaagtaaaccataagaagggggttataataaagtgtcatttaatagtgtaaattatattattggaatactaatgttttacattttgttttttctctaagcaaatggttatgagccttagagtttctgaactccaagtactgttgggctacgccgggagaaacaagcacggacgcaaacacgaacttctcacaaaagccctgcatttgctaaaggctggctgtagtcctgctgtgcaaatgaaaattaaggaactctataggcggcggttcccacagaaaatcatgacgcctgcagacttgtccatccccaacgtacattcaagtcctatgccagcaactttgtctccatctaccattccacaactcacttacgatggtcaccctgcatcatcgccattactccctgtttctcttctgggacctaaacatgaactggaactcccacatcttacatcagctcttcacccagtccatccggatataaaacttcaaaaattaccattttatgatttactggatgaactgataaaacccaccagtctaggtaagattattgtatgatagtatttggttacttttgcaggatgaattttcgttttaggcttttactttgacccagtttattattcataatgaaattttcattt

SEQ ID NO: 80279 - DNA, 1054 bp, Homo sapiens
aataaaactcaactgttgtgacctctgatgcctttggtataatatatttaaaatatcagacttctaaatgctggtttgttggcatactacggctggcaagctaagtccagtctgtggcctgtttttatgtggttctgagctaagaaatctgaaaaatattcccaaagagttattaacaaaaaaggaaagaaacaaaaacaaagaatgtgtaacggagaccatgtgtgcctgtaaagcacaaaatatttacccgtatagtaaaagcttgtgaatccctgttacagatcattgaacatttcagtttgggggactggcaagtgttgagaacattttttgcgaatttttgagaacattttgaaaatgtttactgaaattctatctttgaaatatgaagtgtttgtttttaattatatttagcagaaattatctgaatacacgaagattataggagtcattttcaaacaacgtgagttttgtatcacattattttattttttaagtggccataataagaaaacattttttgagaatctactgtatgcttataaaactgacacatgctcattgtaaaaaatggaattgccaaagttccttccttgttagctgtttagtgtgtatgcatatatagtataagcaaattgtttcttgttttttacagaaggaatcatatacatagtattgtataacttcccttttttccccttaataatatatcatatgcatcttttcttgtctgtctgattatgtgtgtgtatatatatatatatatatatatatcccattttaaattaaaggccatatctgtatctatccatatctctgtatatggtctgtgtacatgtatgtatgtgtacatatgtgttatgtattgatcagttgatgaaaacgttgtgaccaggggcttgcaggaacctaaccctatacttcccctggtagcagtgattatatattcgcaaattcagtgtttgtggtgattttatgaacataaatgtcacaaatagcaataattgactatatttgaagtatgatttgaatgccagttttcatgaataaa

SEQ ID NO: 80280 - DNA, 1004 bp, Homo sapiens
tactctcgtcactcaggctgggtgactatatatgtatatatatttcttttttttttttttactcttcaaagttccttgagctttttattttgaaatttggtggttgggctttttacccttttttatagacttaagaaatttagcactttgtgatataagttgtgactactttttccattgtgattgtcttttgagttttttttatgattggtgttgcacattagccatcagttcttttttattgctaagtaatgattcatggtatggatatatcacaatttctctaactattcgaattatttaagagcattttggttgtttacagtttctggctatcataaataatgttatcctgagtattcatgtacaggtgcttgtatggacataagttttcttttctccaaatacatgcccaggaatggaattgctgggtcatatgtgtaagtatatgggtttttgggggttttttttttgggagaaaataccaagttgtcttcctgagtggctgtaccactttctgtttcttctggtattgtatgagaggtccagtttttctctgtctttgccagcatatttgttattgtcactttttttatttttagatgtttaagtatgtatgtagcgataactcattttggttttaatttacattttcctaatgactaatgatgttgaacatctttccacatacttatttgccatctgtcgacatacttatactctttggtgaaatgtctgtgcatatttttctcattctttaattgaattacttgtttttatattattgacttttgagagttcctttgcatattgtagatactagttttagtcagagatgtagtttgcaaatgttttcttccagtctgtagcttgtatttcttcgggaaaaaaaaaaaaaaaacaccttttgatcttgaaataattacagatttgtaggaagttgagaaatgtataggaacatcctgtgtactcttaacctagccttctccattgttaacatcttt

SEQ ID NO: 80281 - DNA, 2432 bp, Homo sapiens
ctatttacatatacttattaatagggtgaaaagtccagtttttatagttttcccttttggttgtttttaaatttaccatcttttaaatttatctatttaacaataatactaatgaagtcatcctttaataaaggaaattaaacttgtcctttattgtttaggttttgtttatcagaaaccagttgtccacaagaagatcacttcccacccaatctttgtgtgaaagtgaatacaaaaccttgcagccttccagtaagtcctaagagctgttttttaaaattcattgccaacataactatcaaataagtcatcacaactgttgttaaatcatagtttttccttaagaaaacatttttattttggatatatattcattgactgggtgaaacacttgtaccaactatgtacagttagcagcagtgacattagctttggggacataggatttggagttgggtatggtagctttagtgttgtactggattttggggcgaagttttttcaacaaaatctcagctgtgttcatgtgagtctataagcctatggtagaatggagatttgaagaatgctatgtcttaaacaggaggtaagggtgaggactgtttttggtgcccttgaaatactactactcatgtacctatctaagcttgttatgaattcatcctgatttttaaatttaagagattttgaattttcatcactaatagttttctcaggtttactataaggagagtataaggttgtttggaaaaataataacacaagaaacttgtaaatgtttgcttctctactttttaatgaaaacattcatattttctagtatgcagtttgtagggggttttttcttaaggaatggaagtcaaaatgattgtggaaataataagtataaataaattacatttcatttttagggttaccttccacctacaaaaaatggcgtggaaccaaagcgacccagccgaccaattaatatcacctcacttgtccgactgtccacaacagtaccaaacacgattgttgtttcttggactgcagaaattggaagagtaagtaaatttttgtttctaccagatttttgtattataaggaggggttaatcaccatgcctatctgaatttatatgtaaattatgtaaaatgagctgcaaaaggatttatttttgtctcacaatgaattttcaacatgtttccatttgaaaaatgggattatgaagtatccagtgttttataacctggcccttttactccacaattgatcataaatgtcctcctgtatcatcacatgttcttctgcattattttaagtgatgatatcatattccaatatgagtatgccataaatttgcctgttccctactattgagcgtgttacttgatttattgattgattcattggtatgtcaaagaacattttgaagaccatcttagtagctataactttgcatgcatatgataatttccttagggtaaattctcagaagtgggattgctgagtcaaagagcctacagaattttaagaaattttgtgtacattgacagattaccttctccaaaggtgttgtacaaatttattctctgactttcagtgttatttgcgtgctcgttaacactattatcttctttgaaatttttaccaattctgttaggtaaataatgccaccactgtgttttaattagtacttttttcattattactgagattgaatatgttttatatttgtgattacattttaaaactgtatccgtgtctgtttctctattgctgtttttgttattgattatgagatcttcatatagtaaaacttaactctgtttcatgttacaaatatttgtttccagtttgttggccttttatttttatgttatttaatatgcagaatattattaatattatttatattggctacacaaagttttcgtatagccaaaacttaaccagttatttcctttatatagtcttttctcgtctccatcatgctttgcctatctgcccttcccaagctatggaattatttgtttattttcttctagacttccaaggtttcatattttacctttaaatatttagttcatattaaatatatgtgtgatgtgaggtaaaaattgctttctttcactttttaaatagctggttctaacactgttaactaaataaatgttgattctgaagccaccattgttatatatttaacttttacatatcctgagtgtgtttctgatctttttctatgttgtttcttagtctaacattcttttttgggacaattttcatgatatgaactcatatgtatccaccagttcatttgaaatttattgaatgcttaccatgtgtcatctactatactcaaaactggcagtaccatagggagggaaaaaagttcattttcatgaggcctgtgatgtaggggcctggtggacacatacaaagaatgt

SEQ ID NO: 80282 - DNA, 1555 bp, Homo sapiens
ctagaggggtaagataggactaaaccattcagggcattgtaggtaatgttaaagttaaggattttctttttctttttctttttttgagacagagtctcactcttggccaggctggagtacagtggcacaatctcggctcattgtaacctccatcccctgggttcaagcgattctcctgccacagcctcccgagtagctgggattacaggcacctgccactgcacctggctaatttttgtatttttagtagagatggggtttcaccatcttggccaggctggtcttgaactcctgaccttgtgatccacctgccgtggcctccccaagtgtgggattacaggcatgagccactgtgcctggccaggattttctctttttaagcagaaagtttatagtgctgtatttctttttagaaaagatcactccttggagtggtaaatagtttaaatggaggccagaatcgtgcagaaggacatctcttaggagccagctcttgtggaagtattagtgaaatggtatctttgtctagagtggtggcgatagaaatggaggtaagtaggggcatctgcaggattgagtgatgaattgaaagtcgagggctaagagaaagggagatgtgactgatgagtccttggtttctgggtggggggctaggcaaatgatattgctgctgagatagaggaaacactggaaaaggactgagtgtgggtgtgttttgttttgtttttgttttgttttgttttactttgaagaatgggcattggaggacaagatggagaaaattatgaatttacttttgaaacttttgagtttgaaatgcctgtgagacatcctgaataggcagtggggcagataggcttaaaggatacatttgggctagagggaaaaaatgtgtgagtcatctgcatattggtggttattggaaccacactggcagggctgacattgattctcctgcattactttttttttttttttttttaaacattctttcttccagataaagtagaattactttatcatatttcttttcctcgctcctgtaccccatttgcacatctttctgagaatttggatgagatttctttaaagttatagattaagttagggagaatttatttacaatatttaatataaccattctaggaactgtattttcaaatcttcttttatgttcctcagcaatttaatgggtttcctacaattcctgcatattttttgctaattcccatgttggttgttattattactgctattataaaaagagatctttttttctgttatattttcaaagtatttattgttggtttacttaaaaactagttatttttaatatttatttcatagctaaattcatatattggttctattagctttttagatgatttattggtatttctatgttgacagttttgagttttaggtatgtcatataaattatattaccctaatacttttgtcatttatttcttgttctactacctagaactttgtaaacagcgttaaacaatgcaggcactagtggacatatttgacttgctccttatgttaatga

SEQ ID NO: 80283 - DNA, 1039 bp, Homo sapiens
aataagtacttctagcaaagttttagtagtcaagccagacactcttatgttcttgaaagaataaagttggtattatttagacttttcacagagaactccattctctgaatcatttgatttagtaggattttgtcttgcagtttctgcctttgtgtagagttgtcccctcacaactatgaaaaacagtcttttaccaactcttaatcaagtttctttctcctcttccttctcccttcagcagttatttcaagccttagccataatctaatcaaacactatccccctctctcagcactctgccaatgcatgaaaattggggctacaagacatgaattacctaaaccacccatttcttccttaatctcagtgccaccataattacttttttagcttatctacatttgtgcccagtcctcgctttattttgttcagtgtcaagaggaaatctccctttccctgcttattcatttattcttttcattcaagaaattgtgttaagagtctactgtgttccaggaacaggagaatataacattaaacaagacacataccatctctgcatcccccagaagtttgcagtctggtaagaaagacaggcattaaataattgcacaagtcattaatgagttaaagttttgacatgtgccttgaagaagatagacagggaactctgtagaggtacaataggggaacgtagtcctctctgatactgtgatacttaaggcaagattataagtatgaggagaagttaagctccaagatgggaacagagtatgccaggagaaaaggccagtgcagctggaatagagagagccaagaagggctgggtgcagtggctcacccttgtaatcccagcacattggaaggccgaggcgggtagatcacttgagtgaggtcaggagttcagaccagcctgaccaacatggtgaaaccctgtctctactaaaaatacaaaaaaattatcctggcatggtggcatgtgcctgtagtcccagctactcggaaggctgaggcacgagaatcgcttgaacccgggagg

SEQ ID NO: 80284 - DNA, 1004 bp, Homo sapiens
gtcacaaatgatgatctgattgctaaatttaaagtgtatattttcagttttcatcctgaatacttctgctgcatttgatatgaaccactttctccttgaaattctctcctttcttctctgaccatatcttctcaatcacctgccttcaatggattctcttaagggaagcattctaaatgtggctgttcttggagttttatcttgggtgcacttttctacgcacccttatggtttaaaactaacacccaccccaaaatacatgtcttcatctcagacctctcccctgcgtttcagacttatatagctaactaccttcacctaagcatttcactggttcctcaaattcaagtatttaaaactgaactcaccaactcctgtcaaacttactccctaaatatttctcaaatgtgccttctgtctatcatgctatcattgcccttgtttaagctctcatatcctgcttttattttaaaaaccattcttagataaaacatccctctccttgacgcctttttctatctcctctggtagcctcctaagtgatttatacagatctaaaatcttaccattctcattcccttgcatttcatggcttcttaacaccaagggaataaaaactccaagtatgttagcatgacacacaaactttccatcatgtggcacctgcttattactttccagggtcgcctgtattcactctgctttttaaactttccatgacgtggcacctgcttattactttccagggtcgcctgtatttactcttcttttcatacttcacattccattccaaaaatatggaactctttagtctttcttcagtgctttagttttgtgctctatgcctcaaaactcccctgctgccttctctgcctaatgtcattatcctttgtttcacttttttccaggagacatcccagaacccccaaaattgatgagttgacttttggttagcttcctgaacatactccatcagagtgcattagagatgatctcactgaaca

SEQ ID NO: 80285 - DNA, 1007 bp, Homo sapiens
gcagtgctcctgcttcaaccccccaagtagctgggactaccggcatgtgccaccacacccggctgatttttgcatttttttgtagagacaaggtcttgatatgttgcccaggctggtcatggactcctggcctcaagcaatcctcctgccttggcctcccttgggattacaggcgtgagccaccacacctggccagcagttcattttaaattgacatctgctttaaaaattcagattataaaacaaaacaactatatatgtatattgtgtgtgtgtgtgtgtgtgtgtatgtgtaaaatgtataattataatactttcatgggtttctatttggctaaagggataatcccttacagttattctgaaatagtaagatcatgtattttaggtatgtttttactcaaaaataaaatttaataatacctatatatcaaatttatgggataataaaagagatttgtgctctttgaaatatgtaaatatgatgtctcactgtgcattacagttgcccttgtgatgtacagagctcaaaataaatgagtttcttttgtttctgtgccatttagctaaaggcaacaaaaataattaaaaatgtttttactctttgggaattttatggttctgatttattaaaaatagaggtggaggaatctttgaaaagctgctttgtaaacccaaatacaaataacgtggaattgatagaagaaaagaagataaactctggaaatgtatttatgaaatatttattattgtgaaaaaaacttgtgaaattattctttttgttttgttttgtttttgagacagagttttgctctgtcacccaggctggagtacagtggccagatcttggctcactgcaacctccacctcccaggttcaagcaattcctctgcttcagcctcccaagtagctagaactacaggtgcacgccaccacgcctggctaattttttgtatttttagtagagatggggtttcaccatgttggccaggctggtctcaaactcc

SEQ ID NO: 80286 - DNA, 1039 bp, Homo sapiens
taatcccagctacttgggaggctgagacaggagaattgcttgtgagactgtttctcaaaaaatacaaagattaaaattgagtagaaatgcagtaagggagtctaatgaagctgtttaatactttgtgagcccagagtaaaagaatgactactaagctgaggtttgggtgggtctcctagtgtacaaagtgatttttaaagcaaatatgtttctgtactttaattaatactactgttatttattgaaaagttactatgtgtcaggtactgtgtagtaaacgtaattgaatccccacaatcatattgtgtagatcccatttttatccccattttacaaaactgagcctctgagtgattaagtaaaataacattcagaattcacacagtaggtaggtagtggggccaggattcattctaacaccagaactcatactcaggctgcactataaatgactgagtatgacctgcataccttccatgagtggtgcctcctggaattgcccatcatgcagaactgaagccttatcagtgcacaggactgtcttactgctgtatatttccaagtatgggaacaaggaaattagtccaacctgtttctagtaggaggagacacacataaataaataacaatcagttttgcatgccttaatgatagggataccttttgagaaatgcactattaggggattttgttgttattcaacaaaagcatcataggtgtgcttacacaaacctagatggtatagcttactatgtaccttggcctattgctcctagtttgcaaaactgtacagcatgttacaaaactgaatactgtaggcagttgtaacacaatgctaagtatttgtgtacctaaacatagaaaaggtacagtaaaaagtataaaagatgaaaaatggtacacctgtatggggcacttactatgaatggagcttacgggactggaagttactccaaataagtcagtgagtggtgagcaaatgtgaaggtctaggacatcactttacatcactgtagactttataaacactgtacacttt

SEQ ID NO: 80287 - DNA, 1763 bp, Homo sapiens
catgaaggtatcacccagaggtaactactgtctatatactactcacacagaattttatttttgaaatgaagctttcttttgttgacgttttctcactttttgtgaacattttcccatatgattaaaaatctttgaaaatgtcatttttcatggtcacatgatattttcttacataaatgtgacataaattaggcagctatattcctagttagtactagattttaagaataaatataacttaagttgttcaacctttatgttcatttaaaatatattctaaggatgaattgttttcttatagcttgtttatggaaatcctaaagtactgtacagactgtgatgaaatacaatttaaggaggatggcacttgggcaccgatgagatcaaaaaaggaagtacaggaagtttctgcctcttacaatggagtcgatggtgagtagttcttcacaaggaagaggcagtctccctactgctctaagtctggttttcaatattaaaatccatatatttttaaaaatcactgagcagtttgtggatagcttaataattcctattaacttattgattaaatgttcagaagtaatagaactccttttaaattcacttttttgccagctttaaaaaatttactgatataagatttcaaagtaatgtaatataattagtcatttgtaaactcatacttttgaaactgtaccctttttaaatttttaacagatttgatacagagtagtaaaggttcttttttcatttatttattttttcctggcttttagtatgtttttgctgtaaagacactatgagttttgaaaatgctatcatcgtatttaagtatgtcagatactatacagacaaaaattaatataccgtctgctctcaaattacttttcttctgaagtggacatatgacacattttgattgtttgctctaattcagtaatttattattttgaaaaataatttactattattaaataatagttttaaacttagaagaacagagccactgttggttttctactctctggctccaacaatattgtgaatctaaactgtaactgataaactgtagtgacactgagaaaagagagatgtcatagctcttcccttgccttgtattttaatcattcccatataggatgcttgagctccacattggagcatcaggtagcgtctcaccaccagtcctcaaataaaaacaagaaagtagaagtgattgacctaaccatagacagttcatctgatgaagaggaagaagagccatctgccaagaggacctgtccttccctatctcccacatcaccactaaataataaagggtaagtgctgagacatttaaaaaaaaaagtaatcatgaaaattaacttggcaaatagggattaaagacttgccaaataaaatgattcttgattgtgaaacttaacttagcaatcaaagaatagtttgaatttttcccaggtttgtaatactctggagggattggggtaatgcaccaaaagggtacttggatatagtattcttcatatcaaaagatcattctagtaccgtggttctcaaactgtggtgtacgtacatcagaattacctgagagcttaataaaatgcatacattgcgcccccatgtctgagtcaggagtagagactaagaaaatttgtctttctaggccaggcgtcatgtctcatacctgtaatcctaggactttgggaggctgaggcaggtggattgtccaagctcaggagtttgagaccagcctgggcaacatg

SEQ ID NO: 80288 - DNA, 1055 bp, Homo sapiens
agatcaatgctccagtccttacataaggccatttgattttgcaaaatgtcttagtaaatatttcagaaaccctagatactcaggctatcttaaatttagggctgtgtcccgctgaggagaaaatatattaatttggaagtataattaacatttttgtgtcttttgtttcccctccctagcattacaacacctccttgcttgccgctgcagcagcagcagtttcagatgatcaagacctcctacactcgtctcggtttttcccgtatacctcctcacagatgtttcttgatcagttaagtgcaggaggcagtacttctctgccaaccaccaatggaagcagtagtggcagtaacagcagcctggtttcttccaacagcctaagggaaagccatagccacaccgtcacaaacaggagcagcacggacacggcatccatctttggcatcataccagacattatttcattggactgattcccaggccctgctgctcccatccccaccccagatcgaatgaacttggcagaaagaagagaactttgtgctctgttttaccttactctgtttagaaaagtatacaagcgtgttttttttcctttttttagggaaaaaattaaaagaaatgtacagagaacaaaactatattttcagttttacttttgtatataaatctaagactgcctgtgtgataaaacacttgtttaaaaaaaaaaaggaaagaaaagaaaaaagaaaaacaagcacccacaaaccaccttcagttcatttttttctggattctgaagatttttcattatttgtcctatggttttggttttatttgacttcgatggcattattttatttgcaataacagaaaaggaattgcatgtatgaagttttcaatcgtgggcttttctttgttgtggggagggggtcgggggatagtttgatttccattttctgaaaacgacagacttggattctgtttgtgtgtgcatattttatccagccttaagttataaagctcatctgtcccgctgcattccctgtgtattttcaggacatggctcgtgg

SEQ ID NO: 80289 - DNA, 1051 bp, Homo sapiens
actattaatgttctcagagttgatgaggaccacctttgtgtatacacttgtagttttaaaccttgcattggtaacaaaatgatcaactttaatccaggtagaattcaagatggctgtacttcagttgtatgataaaattaatggttctcatgacttgtgtggcatctaaaaataatgtttttatagcatctctctgccactaaattgttgacttgaattttgggaaaaaaaaaagttggtgttgatatgtatatgtgtgtgtgtatatatgtatttataaacaagtgtgtttgagtaacaagtgagtttcatagtcttcccctacgcatgtgtattccacacacaaatggctgagttatagtcataaaacaatttgcaataaaaaaaaaaccaaaacagattgtcagttaaccaggaaacagttaatgttttttaatgaatctggcattatagtgagcaaatgtcgtattaatttaggctaatttctaatactaccataatttgtgtctaaatttctgttggggtagaaattactaaaattgtggggagttttttctgatttttacattgctttaggaaacatttttactaattcagctgtcttaggtaaaatgaatagttttcttcctgtttttttatgtgtcattgttagtggtctcagaattctgatcagtaactttgtgtatgatgctgaattacaaaccgtttgaatgatccagttgaaaacgtatccctctactttcttcagttgtagaaaaggttaatttccctcagtgtcccacattataccaacctaagagaagaacaggtaatagggagaaataaacatacggtggtttcagtggttttggtcatgtgtccacaggagaaactaaccattcagttgtcttaattttagttcgttctaccctgtgaggagtttgtttccatcagttgttgactttccaaaatgttgcattaagtaatagttgtcactctgttggtctcatggtcaatatcaatcagactttcatgatctctactaattattagtagagtcctgtactatgtc

SEQ ID NO: 80290 - DNA, 1048 bp, Homo sapiens
ttttcctttgagtcaagtgtctgaaatggagtgaaaatatatcctaactaaattaatgtggaaagagcatttttttagacaatttcaattttaaacacataaaactttcaagatcttcaggactttttaaagcacatttgaaattattttagtaagaattttgttttatcaatagatgttgaattctgttttttaattaaatacaaagcttagatttcagaaagagagggaaaatagctggtggtcccagagtgtgctgctgttaattgtttaacaaaggggaaaatgtacataaacagataaagttaccataaattccatgaacttaaatctgtgattcattgccttaaaactttctctcttagaatttccataccgcatgccaaaccagtaaaatggcttttaaaaatgtatagtagacaatgtcagtttgtataaaagtaccaagtgaaaatatttattacatgcattggaaaaaaattgtttacctattgaatgttacctgtttatgtagagctctttagatgtaataaaagaaaagccttcagttaatttgtcttctgtaaaataacactgctggatgttcaaggggacaatccctatgagacaagtgataatggtttgtgcttccaaagcacctttcatccagagatttcaaagcatgacaagtaactaactaattttcttgcagcatgctttgaggtaagtaatgaatatagccatcatttccctttcttgttgaaatatggctaactctttaataaatcacagcatctgtttagtatctgcagtttgaatgctaagagcaccgtggccttcttgtaaacaacactaggtgctagagaaaccagctggaatttcaggaatgagcttgaaaccaggaccaggagtaaggtaacagcccttcctcgggtagaggtttgaatcaaacacttaataggatcttagactctggaccactgaatcccttaatgagcagggagtccgtgaagaggagccccaggttctaatgaccattccacaccaactgtgtgtttttggcaagtta

SEQ ID NO: 80291 - DNA, 1428 bp, Homo sapiens
cgcttcctgctggttcttaccccggcatcctgccgcgggggtggctgccgtcgtaatggcaattgtttgttgctttctcctctagtcagtttttgttgtgtggaagtataaacttaatgtgaccagagaagccagaaatatacatttgtaggtattctgttatttaaatattggcaacaaactcaacatttaaaaaacagtaactataccagctaaatcaatatgctgcccatgggctgtggcttagagcggcatagttctctgagccctggcaccagaggactcttctgcctgcctggagggcagcctggctctcgcacacaggaagggatgccaggcaggacggggttgccacggcagctgcctcactcacccctggcctttccaggtacctggtcaccgagggccagatcttcatcctcttcatcttcaccttcttcgccatgctggccctcgtcctgcaccagaagcgcaagcgcctcttcctggacagcaacggcctcttcctcttctcctccttcgcactgaccctcttgcttgtggcgctctgggtcgcctggctgtggaatgaccctgttctcaggaagaagtacccgggtgtcatctacgtccctgagccctgggctttctacacccttcacgtcagcagtcggcactgagtccctggcaccaggctctggcgctctgctgggtgggagggtgggccatggagggcatctgaatacaggagtagggggggtgtgggtgtgtaaccagagaccgagagcatgagtggggtgtgcctcgtgtgcgtggattcgtgtgtgtgtgtgtgtgtgtcttgtatatgtgtgcgcagagtgcatcattttcagactctactatttccgtcaagtttctgtttgatttggatcatctcaggatcggattctgttttagagtgtttctgggccaggatccgggcccctgccctcctctgcacctgaccacactccctactcagggctagtctgttcttcccggacatcttctggtagccgtgcaggagagggctgggtggggcagaggccaggaggggacctggtgtgtcacctgcccaccacctggctcatccctcaggcccaccctgaccctacattacataggttacgtcagcctactgtggctgttgagcaaagcatttctcctttctgggcctcatttgcactagatgggcctgtggtcccaaagtaggtcagtaggttggggttgctgacaccccttgggtgcagctttgggacagatgagtggctctgtcctgtcactgccctctccctgcctgggggctatgtgcactccagacccctgcccaggctcaggcccatgaggtatggagacaccctggcccccaggagctggaggcaccgcccactcccctggcattccagctttgcaggtgaccctcctcta

SEQ ID NO: 80292 - DNA, 1028 bp, Homo sapiens
ccaactaccggctagccctgtcactggctcagggacacactgagcaaggctgtctgggctgcgggtctccatgtgttgagtctcatcccctgtaaaggcactgtgagctcaacctccagtgaagttgtccccgaggttgcccgggagacccagctgctgtcccaggctccaggccccggcttccagccagcatccccccagcatcgccacccccgcccagccctcagtgcccgctgtggccagcagagggcagcgagtggctttggtccttcctcgccaagcctgagccctgagggtgggggaggaggacgcgtccctgataaacaacccccagatggtgatggcagggggtgggggcacagccagggacccccacccgtgtcgggcctgctctttgggagtggaggaagctgcggggagccagctggatcaggctggggaggggcgtgctgtttgcgctcccccctcttcagaactcccagaggggcaccttttcctacctaccccgtccctcagtcgggggagacctcagaaatgtggtctcagcctcaggagatcccgggcccaggctgggaggcttcatctgttccaccctcccatcttacccaggagaaactgaggccagagggaggagggctccgaaggctgcagctgggaggtgagggccagccctggacccggctcactcctgagttggtgctcacagcacacgcaccctgcacgggcatttccagggtgtttcgggccctgcgatgtcaatcctcctggctcagctggtccagggtccctggacaggcctcctgccatctttccctggcctttgccagagcctcttcccacagaaggttggggaagggtggaggggctaggaacagagagctggagccccagcaggaagggggtgtgggtgagaagaggcaggcgggtatactggtgaaagcacaggtgggagaaagggagccggtgtgtggagaggggagagggtagtattttggggtgaggtgtctgaggtgggggtggggctgtgt

SEQ ID NO: 80293 - DNA, 1050 bp, Homo sapiens
tgctgggaccactcagaaatcagaaggtgccttcagcaggctgggccagccacccagggacacagccagggacagtgggagggctgggcctgagcctggactcctgcactgaaggctgggctgtcccctccagcctacagctcatgtgtgactttgggaaaggagttgggccctctggtctttttgctccctgggtaaagtcagcggggggtgctgctccacattccctccggggttcataggggtcacgggaggatctggaggctgggctggcctgctaaagggaccagccactttttggagtgacattccagctggaagcgtccatcccaccccaggtgtgaggggggaagcagagggtgtcacatactgtgacagaggtggggtcatgctgccaaccccactctgaaccccagctcatcgagcggtccccccgcaccctgccacgctccatcacgtacgtgagcatcatcatcttcatcatgggtgccagcatccacctggtgggtgactctgtcaaccaccgcctgctcttcagtggctaccagcaccacctgtctgtccgtgagaaccccatcatcaagaatctcaagccggagacgctggtgaggccacctcctgctccctgcctgtaagccctaggagcacagtctgtcctgggaggctgaagaaatggcccccacccctcgccgcacctgtcctttcaccaaaggcattctgctaggtgagggcactgtcgcctgccccaagctaggatgctcaagtgttcttaggaagtggtgcacagactgcctcccacctgggcccctgtaacagaaggcgaggccccgggtagggaataaggcagtgggggaggcctgggactgggagaagggtggtcagaggggatgcttggggccccagcacctccctggactgacatcgacatcccccgactctgccctgcccgttcctccctcagatcgactcctttgagctgctctactattatgatgagtacctgggtcactgcatgtggtgagtgatgggcccatctgtctatcccagggg

SEQ ID NO: 80294 - DNA, 1940 bp, Homo sapiens
ggggcccctacgcgaggatctccggggccgttggcagcgcctggcacttctgagctcggcggacgagagcctgcaggtttcctccagtcagggacggcgaagggcggaaagcgcaggaggaggcagtgttaggccttaggccgggtgggccgggtcaggagagacgcgcccatctttcgccatccggggtgcgcgaggtcctctcgggacccggccggcgacccgtagctcgggcacgcgcctgtcgcatcccgcaggaaggaggggtccggcctgaggcccggggcggcgtccgccatggagatcccctcggtccagggccggcgcctgggacctggcgggcggccctgaccgccttcctccctgcgcgggctgggtcgcggacgtgcccttcgcggcactcggcctcctctgcgtctccgccttccctgggccgcactgctgcctgggcgcggcggcggcgacggcgccctgttgaatgggctgtgagggcccaggtttaaagcgctggcgaacgcggcctccgggggcgcacggcagctgcagcggtggcgaccaaacgggtgttggagttggcggcggccatggagggcctggctggctatgtatacaaggcggccagcgagggcaaggtgctgactctggccgccttgcttctcaaccggtctgaaagcgacatccgctatctgcttggctatgtcagccagcagggagggcagcgctccacgcccctcatcatcgcagcccgcaatggacacgcaaaggtggtacgcttgctcttagaacattaccgggtgcagactcagcagactggcaccgtccgcttcgacgggtaggtacatcccaagccagcctctctccgacgcgcgcggactcgttaattcacgggccctcccctccctcaccctctcttaccctctcttcatgtaggtactcacttctcccctttttgtaccacctcctgccccactaatgcccacttcatcttccagggctaataatccatcccatgttttgctgcccgtcctcatcagcccctacccctcattccctctgtgggaagataaccacaccctcggccttgaaatctaatagtcgtcttctctactagatagtctgtgaacaagccatttggaggaggtggctgcctttccaggttttacttttagtggaactggtgatgtaactgatcagaaattaaggaggtcagcggttaacattgaagaactccgaaagagttatttgggcatccatttttactcccttcaagtgagtggttccgtaaaaccttcagtgggctgctgggctttaatgtcaaaataagcacctagaaccagcagcagctgcagcatcatgagggattgtcacgcagccagacatctcaagacatgattctgattcctccacgttgctcggtgtagatatattggctactaagatggcattggacctgatgtgggagatgatgccattcttaaattacatcttatcccgtgatgttgtggggaagcttgatcatttactgttagttgaggtgggaagtttaaaaatgcacattgttatgcctaagatttgccctttgagtttaattgtacgaatttttgggtatttgaccagaattgtcaggtttgacattatcctcttttctatgctggaggattataacacgttttacagattacaactgtataacgattttgctacatatgttttggttgacttgtggtagtacataagctattttagcattttttttttcttttgaagtcagtagggtctgagcataaaaatatatatctttagtttttggtgattagaaactgcctggctaaaactcgactgaaaaaaacatttcttctttaagatgactagggaaatgttctgtttcggttgattcttttttaggtttaaacaataaaagctttttcttctattttaga

SEQ ID NO: 80295 - DNA, 1044 bp, Homo sapiens
tatcaccattatacacattaaggagatgttttttttcatgttgaccaaagatggcaacctgattcatgtttgcttttccttactggctttcgtgtcttctctgtaactccttgcattcccgcacctagagaaggagtgaagcacagtgacctctgaacctccagtaccgttccacctgtataggcatatgaagtcattgagatatgaatttctgtaataacagctgcttgggaatactgctgctgaggcaatgtgcataagggagaatagtggggagaaaaaagagttaagaatttcgaaaggttttgcttattgccatctttttcagtcgtcaaagagatgttttgaggtggcaattaaaagaacctgaaatgactagaaatgtagcattgagcctgtgtagtggcttatcttgcccaatgttctgtactggccagagaaattaatgagttcggtaagtaaacatttattgaacacctactgcgtgctaggttctgtggtagggattggatatgcagagatgaataacatactcttttgtcttggaggatgtcagtctgggtggggggagagaaattaataacacaaatgagtatttgcagatgccatgccatttagggttgtagaaatcatttggactactgagagaaaacagggaaaggaagtgctgttttatccggggggaatctagaaaggcttcacagaggaggtgacgttcgagctgtgttttaaagaatagtagtaggacatgaagaagaggggcagcagcttggtgcccttgcagtgactagtgtttcagtgctgttgcaagaagggattcaagttggggcaattaagaaagagattgtgggagactggagagagctggagcccagattttggtgatccctgtataaagtactaagagtaagactggttaaactgcaatctcaaatgtttccatcatttaagatttcatctccttgattctgtatatcagtttagcttatggattattacaattatgaatttattagctgctatgtaaaaatagtccttattaaa

SEQ ID NO: 80296 - DNA, 1467 bp, Homo sapiens
aataaatattacaaaagttttaaaaagtctattctacctaaaaccttctataataccttaggaaactaaagtggattcatgatagagcctcgaggggaaagggaccacccacctagattaagccattgatatttgagttcttgttcactttttttttttgagacggagtctcgctctgtcgccggggctggagtgcagtggcgcgatctcggctcactgcaagctctgccttccgggttcatgccattctcctgcctcagcctcccgagtagctgggactacaggtgcccacaaccatgcctggctattttttgtatttttagtagagacggtttcaccgtgttagccaggatggtctcgatctcctgacctcgtgatccgcatgcctcggcctccctaagtgctgggattacaggcttgagccactgtgcgcggcctcttgttcacatttttaggagtaacatttgagattattttacttgtggcgtgacatgtgaataccatgttgatatagatgagtggacaagaagaaaagtcacatgagtgggaatgaaagaagatcccttagttgaataatgggaagctgtttgttaagaatgttataaaaagggaacagaacaagggggaggtgtcatatgaccatgaaacattgtgctggcctgagttctgagggtctgactgctctctgccagagtttgtggagaccacctgtccttgaaggggtttgctgatgtggatggggagaataggacctccgagaattttgaggctttttgttgagtgttgttcttttaaagtcagtgctagtactaatacttctgataaatgttgaggcggaggaaaggcatgaggggcatgccagtatttgacttcatttagaaagtcgttggcaatatatatttcaagggattacatttcatgtaatacatgatttttaaggactttggttaaaataaagtgtggatcatttatatttaatgaatttttatttccctttcaaatgcttgaaccaggcatttctatttcagattgaaccaggtaatagatgagctcagccttgtgatcagaaatgttatctcttattgtgaaaagtttccatcatctgatggatactatttgtttgaaaaggtgaatatcagattatagtttcttgatttgaagatgaatacataatagagaacttgcattgtaattttggactgggcctagaaagatcattgctttatagtgcttctcctttaggaacttagtaaatactgcattaattttattttatctttaatttctgttaaatgtatttggtattttgttttgaggcagtatagtcttacaattttagctagattttatagatggaggaatgtcataaatgttagtattgtaattctctttaatctgtttaatattttgatttagatgtagaaattctaaatttaccaaggctaatgtttctgaaggaccagtctt

SEQ ID NO: 80297 - DNA, 1150 bp, Homo sapiens
gggtttcaccatgttggccaggctcgtcttgaactcctgacctcaagtgatctgcccacttcagcctcccaaagtactgagatgataggcgtgagccaccatgccaggcctaacgcctcttgtgtgtggtccttaatttcattcacaagtggaggagccctcatgacctaatcacctcttcaagacatcacctcttaatgctattcacgtttggcaacacctgaattttggtgggaacacattcaaactatagcaccaggagcattattctcttttccacttcatgggggatataatttgaccagtgttataaggttgtatagtgagaagctcactagtgtggtttttggtgtgtatatttaattgccctagtgaatattcctttgatcaacctttcttcttaacacttccaaatgtacttattgcttctagcacagtagactgtctccagcaaaaatctacttatcaggtcttttggttagtggtaagaaatttagaaattaaggttggggaaaaattgacagtagaaaggtgggaaagatcagactctagcaatagtctaattttgtatgttaagtagtgaatctagcacatatcagatgtttagtaagtaagtgataagtatgaagccacaagtccagtcatgtcagagaagatatctgcttggttttccaaaagtgctaattatttcctgctgttagtatttttttcctgtagtggttgattgaggaacacacagacaagcagtatatgcacacacatatacatatacattttaaaacttttaaattggagcataacgtaacttagagaaaaatgcactaattataaatatataaaaatttcacaaagtgaacatatttgtttactagagtcccctttgtgctttctcccatttcactacctctccccaaaagtaaccagtatcctcacttctaacactgcagataggtatgtaaatgtaataatataatatgtgctgtgttcatctgacttcttttctcagcatcaggtttatgttatctgttcatattgtgtgtggagcagtaattatttcattctcattgctgtagtatagtactcaattagcttaggggaaacttacctgctttatttttttcttcttaaagcagtgtctaacacagcttta

SEQ ID NO: 80298 - DNA, 6621 bp, Homo sapiens
ttttgaagttgttaaacttctagtcagccatggagccaacgtgaaccataccacagtaactaattcaacccccctgcgggcagcatgctttgatggcagactggacattgtgaaatacttggttgaaaataatgccaacatcagcattgccaacaaatatgacaacacctgcctaatgattgcggcatataagggacacactgatgtggtcagataccttttagaacaacgtgctgatcccaatgccaaagcacattgtggagccacagcattgcactttgcagctgaagctgggcacatagatattgtgaaagagctgataaaatggcgtgctgctatagtagtgaatggccatgggatgacgccattgaaagtagctgccgaaagctgtaaagctgatgtcgtagaactgttactctctcatgctgattgcgaccgaagaagtcggattgaagctttggaactcttgggtgcctcctttgcaaatgaccgtgagaactatgacatcataaagacataccactatctatatttagccatgttagagaggttccaagatggtgataacattctcgaaaaagaggttcttccaccaatccatgcttatgggaatagaactgaatgtagaaatcctcaggaactggagtccattcggcaagacagagatgctcttcatatggaaggccttatagttcgggaacggattttaggtgctgacaatattgatgtttctcatcccatcatttacagaggagctgtttatgcggataatatggaatttgagcagtgtatcaagttgtggcttcatgccctgcacctcagacaaaaaggtaacaggaacacccacaaggatcttcttcgatttgctcaagttttctcacaaatgatacatttgaatgaaactgtgaaggccccagacatagaatgtgttttgagatgcagtgttttggaaatagaacaaagtatgaacagagtgaaaaatatttcagatgctgatgtccacaatgctatggacaattatgaatgtaatctctatacctttctgtatttagtgtgcatctctaccaaaacacagtgcagcgaagaagatcagtgcaaaattaacaagcagatctacaacctgattcaccttgatcccagaactcgtgaaggtttcaccttgctgcatctggctgtcaattccaatactccagttgatgatttccacaccaatgacgtctgcagctttccaaatgcacttgtcacaaagctcctgctggactgtggtgctgaggtgaatgccgtggacaatgagggaaacagtgcccttcatattatcgttcagtacaacaggcccatcagtgattttttgaccttgcactccatcatcattagcctagttgaagccggagctcacactgacatgacgaataaacagaataagactccgctagacaaaagtacaactggggtatctgaaatactgcttaaaactcaaatgaagatgagtctcaagtgcctggctgcccgagcagttcgggctaatgacattaactaccaagaccagatccccagaactcttgaagagtttgttggatttcattaagtgactggatatgtaaagtcgtttaatgtggtgctaaaaagtaaaggacttttaatcacagacagtagaattatgtgttcataaattctgcttttctttccactacccttcctcccatcccatccttccttagttctgtatttgtttttcttgcctcatggtaattgatttcagacagactttaacaaaaccacattgttttggtgtaactataaggtatttgcatattggttacctatttgtctttcttttttttaaaggaacagatataaaatgttttgtttatgtaacaagggacatttataatttcaagttgataatgttttaaacagctgcttacaaaagtatttctgttaagcctatgtcagcatgttatccatgcagcagttttgaggattttatgaagaaaaagagctaaaaaggaacattaagaggaatgggatatccaggtgttctgcacatgccaaactgctgtagatagtttacactcttccattatttatacggagtgatgcagcacattttagcattcaggaggatttttaaaaaatagctgcagattaatctggaaaatgtgctaatttaataatagttacaaatttataaatttaaatccatttgaaattgttgcattatgctgggtagtatatacaaaatggttatcatcttaaaccaacttttcagagaatcttgatggactctgcctttaggcttgaattcttcaaagtctattttaatgaaatttatctaaattgcagcagtctatttgattcagctcatagacatgtaaaaattatgaatgctgttttcttatgaaacaaattgtcacagtgtagttatacattctatttttgtccccttttccctttttctcctgtatcttttaaaatttggaaactacttttccagaaggcattatttatgcctccctaataaggtattttacttatgacagatgaaaaggaaccaggatatgtttgaattttttcactttcttagtctgtgacaagaagtagaaatatcactagtgtggtataggaacttacatgttttttatgatgaaaataattctcaatgccacttgaaaggtaattgtgtctgagagctgcaaatttttcaaccacaaaatgtcacttattcctacaggctatacagaggtctttatggtttttttgttttgttttaatggcaacattgtaactgtcaaactaaaagggtattctgtgattatcttttaagcattacagaaattcaagtgaaagttatatgcttatttctattgatgttaaaaatgataatgaaagcaaaattagctgtatctgtaattttctctctagtgccaaatgaatgccttagctactcatagtgcatggtactgtaagtgaagacctgtagctttttttttttctttaatgaaaagcattataatgatgtagcagcatcagatataaacttaaaaaaaaaggtttcaattaacattttatatatggataatgctttgtaaagtgtaagagaaaggttgcagttggatcagtataaaacaatgaccaagccaaaatcagcaccctagggccttaaataaaatagagataccccacaaaatgaaatattttgaaggatgggaggggacagaaggggggactatcccccaaggatgcaagatactttttacagttgctatcattatactttgtcttcttgcttcagttaggaaggttttgatggtaaattctgtcatggtaatagatacctattttcctaacctgagattttacaaggaaggtttttaggttggcttaaatggaggtatttatttgagtgagccctaatttgaaaattaccagacttgatcctcctggtatgaatcaaggaaatactgtaccttgctcttagcaactctcagtggcctgaaagagaaaatgcacttcttcaaggtgagtgaatcatgctttttccacagttcagatcagaccctttatttttcaaactacaaggcctgcttattggacagtctaaggaatagctttgatacttggtattcagttggttccattattaatgtatattatttttatttaaacatcaaaacttaaaatatcagataatgttgcatgttttaaaaacacatttcatccctttggctacccaggaccagcactatttaagacactgcttatttataaaatgagaataatgattatatgtacatattcagacatcaaaatttaatgacattctattttgagaagggaagacaatgctgaagaaagtaaaactgttgattgaaatgctgacagggtggagaacgaatttgaagacagtggaataaactatgaactatgctaatggtaattagattttttgtttgtttagtatagtggtaaattgtgtagtatcttgctgagaatctaattctatcttgtaaaatcaatccaaatgtgtattgtgaaacacctgtataaaatcatttttgaaataagtgatctacatgcctgtttttttaaaatgtttttggtagaattgtttgaaaatatgtttagccagacccttccccaacttaatttttttttaaaaaaggaaaataggtaagaaaatgatagttctatatctcagccctctgtgaactctaggctgtctccattttgcagccactttggtcatttgatgtttactattggtatacttatgctttgaattgtaaatcttcattgatggtattacagattcaaccaaaacttctctgtcctgttcagtaattgttatataaatctggatgagctagggaggcccaggtggatgttttcattcgcaaatcatgagaaacttaagtgggttttatgcacttgatagagttggcaaaattgaactatgaagttaactatttaactcaaggaatgggcggcaaacccatcccctcgattgataaagaaggggaacatttttacattagaactgacactgaaaacatagctttttcagtccaccctggttgctctagtagcccacagcccaatcacgttaaggttctttgctgtgggaattttaaataaaccaaaccccaaagcagaccatctgtaagctttggtctgcttgtttctgagaagggttttatttcattatactaatagtggactaataattggtaattgtgagaacttaggtatgataacattgtttgaagtaaaatatgatttgggggcagcagctttctaaataccaactctgtttgacaaatgttttgaaaattaaaatttcaagtgagcaacaccctgttaagagttttcactatagttgaggcagctactttatgaataagaccactttgggttatttaagcagaagcgtttcttttttttttttggaatggggtgggatgaggagtgagttgccagacctttgattagtttgctggtttagaaacagccagtggctgaattagtgagtaaatgaatgaaagtataaaggacttgttttttatgatagattttctgtaagaatcttaaatgttccttttcaaattagatgtgttgatgcacacatgactattctgtttttctcactgactatataacattaaaaaggggttaaagaaaacaaaactctgccttttgtgctatgaaatatttttagtccagaggttttaagctgtgtgtccattcctactctgaaaatgcatagctttgttctggatgtcatctcttgaaagtagaaaactcctatgtgtttatcacattgcagggctttcttatgtatttctggcagacttgcccaaatctttagatgggctgggttatacagcatgccctcccccaaataagggatctgaaataaatactacactattgatagtggagatatattaatttttaaaactgtaaagtaaatgtggtctctaggtttgtggtgtgtacctttgtgttaatgtgtagggaagagacagtgacttgatggttatggggagtgtatcttgatgtgtgtataggggtaagtattgctaaattatttacagcttttattcagggtgagtcatgtgatgaatggcctaatcagaaaagtgaaggagcgaagatgcaagcttgccaaatgatgaaatgaacaagattttgtatctattttttatcaggtgttgtaaaatttgtgcatggctttttgttgttgttgcttagtaactggtagaggagaaaagatgaggaaagaaactcagctttcctcacagtcttttcaaaggtacacagttggggagtaaaatctgactggcctaatcgatggaaaagaccctgtccttttcaccccatcctgcaatcctccgtgcagaggaactacactgttgtattctagtaattcactgtgatttataacaaaccggtgatgtcattctattgtgcacttttgtcaaaccatttatgtgactttaataaacatagtaaacttgctgactgcaccagaggtccattagtgatttatatattgcatgacattttctatttgagtttgacatgtagagtcatttttagtttcatggcaattgacagtcctaataactcagctaatttgaaactaacaatcttgctgtgtaaaaggaaaaaatggtgtttgtgttcagtaaatgtttgaaaaaaactactttgaggtttgtgtctttattaattattcagtgtgccttagttgcgatgttcttttgttgagtgccttaaagttgtcaaagttatatatgtgcatgggaaaaaattcacgtagtaaagaaaaattcaaatatatattttaaaagttcccttttcatctctccccgcctcctatttggactctgcagagacaatcactattaatagttttttgagtagcttcccagaatgtttctgtgcacatatgtattatttctccttttcagtttttaaaatgcaaatgaacttctacctttgcaacgctattctgtatcttatctttttcatgtaatatatcttaggcattttccatttctatatgtataggtttttaaaacaacttcatagcaattaattctgttgatggattgaaaa

SEQ ID NO: 80299 - DNA, 1089 bp, Homo sapiens
gctgaattccaggctcacaccgactgtctcctggcctgcctggcaactgtaacaggcccctaaccaagctcttaacaccccagcccccgaagcctgctctttccagctctttctcacctaagcaaatggcagcactatccctccgcgctgctcaggccagaagccatgtatccatcactgaccctaactctcacacccacacggagcccagcagcaaagtctgtccattctaccttggaaacacctggaatgtggccaccactcccacctcctgggcctgagtgccctcacatctcctctggagactacagcgctgcccgactgcctcccctctgcagtttgttcttagcatagcaactagagggatccttctaacgaggaaggcaggcttatgctctgctctgctctgctcaagctcaaagtaaaaagtgcagtcctggccctggcctgcaaggccctcccctctcgggtcccacctgtcttgctgacctcacctcctgctccctcttgctttactccagctttcagccacctggcctccagcatgcatgccatggcgtgcctgctgtaggcattgctattccctctgcctgcaagggtttccctcacgcagccacgagacactcctgtcttcctcatggtctctgtctgatgtcactttattggagaggcttttcccaactcccctgtataaaacagcaccccctggcactccacccttagatgtgtgcctttttctgggtagcccttatcaccagttgataacgtttatatttatgtttattgcctgcctggaatgtcagctgtaggagagtgggggctttgtctgttttgtccctgctctatcctcagaacctggagccgtgccgggaatgtagcaggagctcagctaacacgtggagtgaatggaccacctgcaacagcagacagagccatgtggagtgaatggaccacctgcaacagcagacagagccctcctttggccactgactcactgttcaacttgaggcaagtcactgtccctcctgcctcatctcacatgcctcggtgtgcatacctgagagatgggggtggggacagtgcctcaca

SEQ ID NO: 80300 - DNA, 1010 bp, Homo sapiens
acacacacacacacacacacacacacacacacacacacacacacacaatttttttctaaagtgttaaaagtccacaccaatagtcccagctactcaggaggctgaggcaggagatcatcctgggcaacgtagtgagaccccatctctaaaacaaacaaacaaaaaaaaccccctaagtgtctgcagtttggtgtctgctctgtccgagctcagagaaggtggatgttttacatggtgttcatgccacaggcttaaacttactgtcccctgtatgagataagtgtcaacacccctggaggctctggctgcccagagcggtggtgtgtggaggctcaccctgggtaggtgctcatgctaattgctgggaagcctccatgatcagtatttaactccggagatgtctgaggtcatctgggccagcactctgcctgtacggcactctacactttttaggaatatcacaatgattcctaattttaatttagattcgtttaagaaataccaatttaatagtagtcagttctcagcctttcaccaggtgctaggcccctgctttcaagggaccaacagacaataacaataacaataataatagaagcggctaacccttccggagcacttagtttatgccaagcatatacaatatgttttatatgtattaattcatttaagcttcatgacagcctatgaagtctgtgctattattatccccctttctatggttgcagaaatggaggtccagggaaggaagggaggtaacttttacagtgttcccacagccagtcagggactcagcctgcctcgcaggccttctgtcttgccactttgtcaggctggtgggaatgacccggaaatatgtggtccagagcatgggacctggaggcagaagacccaggcctcgctcttgcctctgctccttactgtgtgaccttgggctagtccctggatgtctctgagcgtctgtgaaaatgaagttagtagtctatctctgtagggtgctctaatattta

SEQ ID NO: 80301 - DNA, 1051 bp, Homo sapiens
catttgaaaagtgagccaaataaagcatccaaaccttgatctgtattatcccggctctctgtagatcagagctccctgtggaaggcgagggaaggtgggtcccagagcacagtcctacctgggtccctgggcagaaagaccaggttcccactgtcaaatgaccttgatctttgctccagatacctcccgatgcccccagcgctcagacctgcttttcctttaggtttatggaaaggaatagcctctactagcttgaggcatttgcagcaaatcatttaaacaccttgagtttgatttcagaactaacagttttataatctggaatctggtagaatccaggacgtggaacggctgatggaaagaaaggtgttggtggaaggggacaaagggatttaattcctgaggatttttatttaactcctgaaaaattgctggttatgcctgccctgctgacctccaggtgaaagaccagcttgcaaaaatgcatggggaaatttgggattccgagaaatttggaattctgggaaaggggatttctgcatacctgagtggccaactgataactttatcatcacaaatctttcttctagagaccctgagtctgccttcctgccttactcattaaaagatctgggaacaaactcaagttattatggattgaggctgtttcagggcttgagctgttctgttaaactgaccttttcagggttcggatccacattaatttctcaatccttggagttcctgtagcatgtgatccctggtataccagccagcaggtaaaggcctaatgtgccttgtttgctgattatcttatgagcatgatctttggctccctaacttgtgagcttgctgaagctagagattaggtctgattctttttagtagctttcacagcattcatcaaagggctatgcatgccagttagagtgtgttgtggatttttcgaataccaggtatagacatataagatttggcaggatttggagcaaacctaaaacattccctgttgctgcttggacaaaatctctactgttagagatctgtggac

SEQ ID NO: 80302 - DNA, 1059 bp, Homo sapiens
agagacttggctccccaagtgaccaactaggagcgccctgaccagaggcctggtttggcagtggcagaggcagagggagcaacttcggagccctttctgctcaaccatcaggctgcggctgcccaggcctggcagtgcatgccctacatgcctggctgcccccctggcctccacagtggcccgtgacccccggctctccctcctggaagctggccgtcctggcacactgggctgccagcaatctttccctcctttgtttctctgaaaccatgagaagggccgctgagttgggagcctgggttgctaagagctttcctcaggccagaccatatcaccagcttgagaagtctcctggccaagatttccctggaactctggctcagagggagggagagtgggtggagggaaggggagagggtactcaggagccacaaacaaagctgcccctctgcaccaccgcccccctctcccaggaccagagtgtaggagcagcctgggagccacaaactcagtgggcctttgctttttgaagagccctgggaacaatggaacaacaaagctcttcggaggctgcccccccatgcccagccctgcacttctgttctctcaggtacccccataactctgctgttacccccacttttcagagggggagacagcctccgagaggatggcctgccctgcttcacacagcaggaaggggcaaactgggccataacccgctggctgcaccgccccatgcacaagcaggagctgcaggccagctggcctggcagtggatggctgagggtgctgcggggccgctggtttagaaggtcctcccctaccacttcgcttagaacccactatagaattcccttcctttgggtcttttaggtgttcttaaaaatacaagtccccctgagggggtaataatgccctaagtggttgtcattgactggaccgagcctgctggaaggaaaacactagagtaggtgcaggaggggttcctgagaggcaaatgaggcaggagggagagctggttactgtaagtgagccagttttgccagggaagtgagt

SEQ ID NO: 80303 - DNA, 1094 bp, Homo sapiens
gggtggatgggtaggtggaggcgcttttggtacaagctgagctgtgctctccagctctcaccaggttccccagcccaggtgagcagccctggcaggaaggtgctatcttgtatctcccatggcctggtgaacactaattccttgggcagggtggtccctgcttggaatagaggagccccgatttctgaataaccagcagcagatctaaagcagttctgtttgtttctgtctcctgaaatatttatgcaggaatatgagaaaggggctctgtttattgaactcatcctccagggcagaagccgtggggaaagagccacttcccatgtctgcgagccaatgagcagaggtggaatttctttgggtttgaagtgagacagagcctgtgtgcttgcagaaggaagtggggtgggattcctggagaggacagaaagccctttcaacctcttgcctccagtcccaggaaagcttttcagcacatactttcctggcgaatccaaataataacaattgaaatctcagccttggttctactctgggctttgcctctatcatgctgtgtgaccttaggcaagttgttaacctctctggattgtttttttccaattctgaaaagagtgaactatcagtccagttctagctgtccgtgcagttctagctatcagtccagttctgtctgccccttgatagtattttaagagtcagttgagttgtgcagtgaagtggatttaggaagcattgtaccatgcaaagtcccaactctgcagcattcgaggccagagaactggctgagtggccagccaagtggcagcctcagctgtgacttgtggggtcaggccagagagagtactctcttgagctggaccctaccctgcctcaggttgggacaaaggggccccctccctctttcctcctccagctaagccctgctgtcctgtgtccctgagaacactggcaggatttcctcccaggaagggggacatggatgtccagtttacatccctgggagttgcagacaccagagaagcaaggcagcacttccccatgacagtgggatacgccttatcgtcagatatagaagcctgtggctccaggcc

SEQ ID NO: 80304 - DNA, 1022 bp, Homo sapiens
cgtgaccctaggtgatgggacagtccacatgggtgaataaaacaggaacagtccctgccctcagggacaggcccaggaggatggggagacaggacagaacacaatcctgacatcagtggtagaaatgctgttaaagaaaatacaggggcatggggggtagggggtgggggttgtgagaaggggatcccctgtggaatgaaggggggatagagccccatgggatctagggggatctttctggctgagagagaagcaattttgaggctccagcaggagcctgcctgccacggaaagcacagtgagcaggcctggtctggtgggaaaggagattgaaggggaaggtgggttctggctcccataaggctggcctgtgctagctgctcactaatacttctcgactgactgggaggacagataggtgaaggataaggctggaggcctggagcccagcagccatgttgaggtgatgaggatggagccagggcagaggcagcaggcacagggaagatgcatcttcaggccttggggatggtgtgggaggagaggggtacaacacagcaggcagagtcttcccggagctcctgggagaagatccagatccacaaacccacggggagaaatggccgcgcatcacgcagagcactccccacgccccttcccacaggccaccccagccactctggcctcctgacctggggcccatggagcccatcctgtggctctcctcctgcctgccttctggagggtgctccaaactgggtcttgtcctcctgcagggccagcagggctccgcagaagtcctcagggaccgccctcccctgccagcctcacctcgagtccaacctcattagtattttgagcagaagcatatatatctttttttttttttcctgcagggaattggtggcctgctcatttcaaattgcgtaaaaccaaagagcaattaagaggcacagccttctcgggtcaaggagaaatgacagagagaggtggctttgctcgcctggctgctggcacatctt

SEQ ID NO: 80305 - DNA, 1097 bp, Homo sapiens
ctagttgctggatgactgtgttgtcaaacaaataaatgaattgaatgaatgaacgagtggatggatgggagggtatgcacagatgagcgaaagttggcctgtaacctccaaataattattatcttaaaaaaacacacttgctaatcatactagtgtgaggcctgagacagaggagccttcgtggaggacaaactgcagcaacagtgcgaggtcatcagcagatgtcaaggagtccatgtgtttagggcagagttagggtgacatggtgctgtgggctgaattgtatccccctaattcatatgttgaagccctaacccccagtgtgtttggagacagggcctttaaagagataattcagggtaaatgaggtcataaaggcagagccctggcccagtaggactggtgtccttataagaaaatagacaccagagagctcactctctccgcatctgcacagaggacacagcaagaagacggccgtctgcaaaccaggaagagaggcctcaccagaaaccaaccctgctggaccttgatgttggacttacagcctccagaactgtacgaaataaatatctgttgtttaagcccccagcctgtggcattctgttatggcagcctgagcaggctaatacataggggatgctggatctgagtttggagctcaaggggcagaacatggggaagagtgccatgttgtagaattcagaagggcagctggtctccttcagaggctcatactagaacatgtgcaccaggaggttcagcataagagcccaggctgtggagtcaagactgctggggtccaaattcttaccccatagaagcgttgtgagcactgagtgtatttcatacacagaaagcatttggcacagagcccggcacacagtcagcactccacaggcatgagccgcccctcgtcgttcttatcacgttcgcttgtcagtattgtcactctgggcacccccttcccttgacgcatactccagggctccagcattgctcagagtttttgggaccttcctgagagcagctctcagtagcagcttctaccatcaggaaattggttccattcttcatggtcagcccccacccccaaa

SEQ ID NO: 80306 - DNA, 1066 bp, Homo sapiens
ccttgaaatcaatattctactaagaggtctggcatctttgcagtccttggcaaagctcctactgtgtatacctgtatagatggctgaaactcctgaaagtcttagtaagaacactttgttctcattgtcatcttgacttagctccagtgtccaactgctgctatttttgcttttcaattataaattgctgtgagtttagcttccttattatagatttagtttgttgtgggttgttcagttagccaccagtgtgtggtacctatctgtatatttgaagcccataatttttcaatcatcaccgtgccttaaaggtgtcatcagtggaccacctgcattggaatctcttgggtgcttgttaaaatgcggattcttgggttctcacacagacctcccgaatcagaatctctgggagtggtccctagaatatatgtctctgtgccagggagaacctgtgaacacatcttaatgtgttatcagggtggttcagaaacaaatcatccagatctttattgttaaatgagttacatgtaagtccccaattctgcttctatagagatagttgcaagtggatttgttctatttaaatatattgcaaaaggaaggtgccgtattatcacataaaattgtgcatcgcttcttttacgaagtacctgggaggtgattcataatgtccctctcttattcttctttattgttttccctctaatgcatgagtttgggtagatgaggagcctccgggccagccaagattagaaaccaccattaagacacaaaggagcataccagaccctgccaagtcagtaacttgctggagaaactattttaaagaaaagacatggggactaagacaaggagagctcctgaatgactttagagggtcatgagaggaaagccccggagccctcacggtcaaggatgtgtctggaggctgtgctggaaagtgcctgggaggatttcaggactcccgggagccctctggggaagcggcttcctttccgttcctgccttgtgtgctgggggaggggctggttccagggctgcagcgggccctttatccgctcctctc

SEQ ID NO: 80307 - DNA, 1034 bp, Homo sapiens
cacagctcagggcaccgcctccaggaagccacctggagccatcctgcttcttcctctgctttgccaacagactctccgcttcctgccatgtccttgccatgtttgaggcaggggtatcgtggtctgttttcacacctgttcctgcttctaggcgatgggctccttgaggctgggaaacacacccattcgtttttccattcccaacagccagagttcagcccaaatactggacagggatcttttcggacagagaaatcttttgaggcccagggtgcagatgagtcttggccaaagccccacatctgcctgatggcaaagctttggatttaaaaccctgcgtgaggagtgggacgggtgaggccctgtggataagccaggtttgcactgggcctctctattcactacctcccccttctcagcctcagtttccccatctgtgagatgggagagtgcactgaagatgggcggggggatgtggaggaatgctgaaagagctagttctatgttttagtggagggagttgctggaaaggaaagagacttcagaccagttacttccatctctggaaatagaatatggggcagtgaagaccatgggcttcgggacctgtagtcctgacccagccatttgctagatgagttattactcccgaaagccttggatttcttatttgtaaacgagagataataaatcccacctggcagggttgtcatgatgacagtaatcacccacacctgttgaacacgtacaacgggccagggactgttctaagctcttgagacgcctggtgccactgaatactcagcaaccttgcagatgaggaaacaggtatagcttatacaaagtcgcacagctgggaagtgctggaactggaataaaatagagtgatgctggctaagagtttagcaccatgcctgacacacagtgagcctcggtcagcgagagggcctaggtcatctgccccacaacgtgttcacacttgcaacctgcaggcatggcccagggctggggaggggggcgctacaggggatcca

SEQ ID NO: 80308 - DNA, 1031 bp, Homo sapiens
tataattttatttaatttcaaagatgtattttccctggtcttattctgttttatgttgctgggcacatttacaataaacagaaatttatttggtttacggttctggaagctgggaagtcaaagagcacgatgcaggcatctggcaacggccttcctgctatgacatcccatggcagaaggtggagggcaagagagatagagcaagagaagaccaaactcacttttataacaaacccactcacaagacaactaacccactcccaagataaagacattaatccatgcatgagggcacagccctcatgacctaatcacctcttataaccacttcccaacactgtagcattggagactaagtttccaacacatgaactctggggaacatgttcaagccatagcaccctccagaccatccattggtaacaagggtgtagagaaacctgtatgaacaaatacattgatgttgcacaaaagcttttgaaacttgcaaatctggtaggcaccagtctgcatattatttcttcaagaactgtttgcttgaaaccagagaggaatatttttcaatcaaggctatgggaggtgtgttttttgtaataatatctgtttttttaataacaattttatatgtttgttagaattggaagctgctagtaatatccaactattcagatgttgtcactattagcattctgatgtattttcttgtagattggtttttttagatagggatccttttatatgcaggttgagcattctaaatccaaaaacccaaaatccaaaatgctccaaaatctgaaacttcttgatcaccaacatgatgctcaaagtgaatgctctttgaagcactttagattttggattttcagatctgggatgctcaaccagtaagtaaaatgcaaatatttcaaaatctgaaaaaaaaatcaaaatctgaaatacttctggtcccaagcactttggatatggaatactcaaactgtatagaacttgattctgttttactaagcgtagatctttagcaatgctcatgc

SEQ ID NO: 80309 - DNA, 1230 bp, Homo sapiens
tatgctttcaaccacagggcactgtgtaccggtgttcaagatgtacactgcagaaggacgctcattcatatcgtagagagaatggctcgtgtaagagtatataggtggacccagagattcagacctctctgctgactcccagagcagcaggaaagagcctcctcctgatccaaagctgactgtgccctgggggaagcagggagtgtgggccccagggagagtaggtacacccagcatctgagcgtgcgtgaacaaggcagatcgtgggcctgtgtgtgtgccaccagggctgctgcccatcaggctggtcactccagtgggtagtaacagcttaactttaaacacttttacttgatgcaggggcaccttttccttatttgcagaggtgtatatgaacgagcagcagcctgtcccaccatggctgtgtggcctccctgaaccattcagtcttggggaggacacagctgcagagcagtgtggcccagactgacttggcccagcagggcccaaaaacaaaaataaaacacaggtgattcctcaaggaccttccagtccagttgagaggcccagaaaaaaggtgctccattcaaggccaccccagggccatcaaactaatctccttctctctctctctctttctcctctgcagacaggcaggattgaacccaactaccccaaggtctgcggccaccagggcaatgtgctggatatcaaatggaaccccttcatcgacaacatcattgcctcgtgctcggaggacacgtcggtgagcagaggggtgctcccggaggagggtgggctcaggcccctccctgcttcctttggaggcctctcttcctaccctcccctcctccaccctttgcccttcttccctcctctttgtcatctttccagcaagccccacgatgtgggggggatgggagctaggaaagaaccaaggcagcaaatccctgctggattccagagatctgtgttttcagtgtgattgagcttggaggtgttgcttttgtaggtgagaattagaatttaaaaattaagcgtgtgattcagcatttgtctatgctgtctaaagaagggcaagggaaagaatatgaacaaggagggagggagaaaaggaaggaactggatgggcatgaggaaaagagcgcctgttctttgcaggctgggcagggtaaatgtaccatctggtttgtcctctctgagtcgtggtttctaggaaaggagacttag

SEQ ID NO: 80310 - DNA, 1549 bp, Homo sapiens
aggaacaatgtcggccacacctgcaagatgttcaccctctttttccagagtgggggctgagctccagagagattgagagacttacctggggacacatagcaagtagcaggtttggggacaatgagaacaagtcccttgcctcctgtttgtaagaccctttccactgcccctggctgcttttcgtgacaagaaagtcagtcttgccaccacccataggacgggctttttaacatctaggggaggtcttaacataaagtagttgccatcctaagaggccttcctgggatttggggaggggtatgccatcctgcctgcagagaggctgagaccagctcttctccctcaggaggacctctccatgcccctgatcgaagaggaaattgatgggctctctggcctcctgttccccttctatgatgctgacacccacatgctctacctggctggaaaggtagtaggaggtgggggagggcccggggcagcctgtgggagagccctaccctcaatgcacccctgcacctgccccaccccctggagagtagccagcctaaccttccaagttcctgggcctcacctttcccatccacacctgccctcaagtctgacacccattcttactcaagtgtctgctaccaagaattccttcaaaggtgagctggagcgggcttttacattggaataaagatcagagcctgcagtgtagtcagtgatgaatgatggaatttgagatacccgccaggagatccttggtgaatacagccttgtttgtcagaaaggctgtctacacacacacactcacatcagcccatccacctccacctctccacccgcagtgagtcccctgtggtgcacccactaggagcctagaagccaggtttccttggtttttttaactgcccatgaggcacaggggagagctgtcttcagctggctcctgggaccaggccctgctctgccctccctacctgccaccttcctcaactccatctctcctgaccccagggtgatggaaacatccggtactacgagatcagcactgagaagccctacctgagttacctcatggagttccgctccccagccccgcagaaaggcctaggtaagtggccccgaggctgccacagctggtgtgctcatggcacgggaggacatctggcccatgggtcaccccctcccttaagtggaaaatcagactcagaaggccatagcacatgggcaagttggaacagaacctgcaagagctggccctgctgcagctgtcactgcccactggaccggcgctgtcaccccactgtgctcacatccaccatcagcggcagcttgccagcatgtgctctgcgtctgcactcctgatcgcagatggggagcctgaagcccacagtggctatgatgatggtgggaagtggtcccgtaactagaggtcagagtggggtctaggcacaagtcccttcctgagcctctaggaagccgtgactcccagatcccagcagcagctctgtctgcctgatagggcaggaagaagttccaggtgttcccgtgactgcagccc

SEQ ID NO: 80311 - DNA, 1031 bp, Homo sapiens
aatttaaagttcatctgaaagcaaagtcctagtttttacaatgttttctctcatctttttttgagacattgaggtataatttgcctatggtaaaattcatcctctgtagtgtgtcggtttaagagttttgacaaacacacacagtcatgcagccaccatcagccaagatatagaatattctccagtcttttagggctagatcttccacacccaattcggccacagtttttttagcatcatctttatcaagattttctaaagcatttaattaagtttttatagaaacaacaactctctttttgtgctcatttcatcaatttatattatatttcattaaattatgcaattacaataacaaatgtaattcacaccagaaagtttgagaccaaacacaattgactgtgggtaacattcaactcaggtgtgcaggagcctcaaggagcctgctgccttccagggctcggcgttttgtggacatctgtcaatatgctttacaggagaaatggaggcgggttaagctagagagtcattggggtgaagatctgccaggatagctgtacatgaatccctgaccagtgcaaactttggtattcttgtcatagttcctcatcagtagggaaaaagctagattccattctgtatcctgagcctccttaagaagagaaggatacaaagcattttagaaagttctaaattatcagcacaagccgggcatggtagcttacacctgtaatcccagcactttgggaggctgaggtgggtggatctcttgaggtcaggagttcgagaccagcctggccaacatggtgaaacccagtctctactaaaaatacaaaaattatccaggcatggtggcacatgcctgtaatcccagctactcgggaggctgaggcaggagaattgtttgaacccaggagacagaggttgcagtgagccgaaatcatgccaccgcactacagcctgggcgacaaagcgagactttgtctcaaaaataaataaatacataaattagcaataataatgtaataata

SEQ ID NO: 80312 - DNA, 1215 bp, Homo sapiens
catgtaataatacatctattatgtattattatacatctattattatgtattattatagatgtaataatacatctattaatacaatggtaaagaaaagcattaagttaggacccaaaaagggacaagcttgggatatttggaaaactggactgtttggtcactcctttttcagtgatcctgaatcaattaatgacgcaggttttgtttcctacctcacaagggaaagtaagagccatgggctgagctagagatgggagaggtgcaataaatgcacctggggagaataaatgtatcaagcagtgggaggcctgggggaatgtgagggcacgggcggcaggcagctggagactcacctgggaaatccttgtctcacctgctctctcctgggccctccttggccccctctcttcctccaccccagctccttcgaatgttcttccggcagcaggatgagattcgacggttgaaagaggagctggcccagaaggacatccgcattcggcagctccagctggaactgaaaaacttgcgcaacagccccaagaactgttagctccccagctgggctgttttctaagccgatctctccgtcgtttctactcatcccttaacttctcccttaccagtgaccccagagacagagccaggacaggagtgggggccagcctgaggacccccgcctaccacctcgagaactggaagccaacctctaacctcctgacctcatgctaataaaagtccccagcttctggagaccccctgccggcagcccctttccctgccaccccaggagccaggcttcccctcagctgggtgaagactacagactccctggggttggcaggggctccatctcagtggaccaggaagcaagaggggaagcgggatcccagctagacttagaacttggacttttcccctgtgaagggggctgccaggacatctcagcactcccgcctggagctctcagcatcactgaaggtaccacagtgtaagtgctggactgcaggctgcagtgatccctctttcgtcccaccccctcttccctcagcagccccggaagcctgcctcacccgacgaggacagcgagcggcccggctcctttctgtctcttcccttcccaccctcttgtcttcagggaattcagaggattgctctccaaggccataatgaccccttgccttccccatgattctctacaaagctcttgcacac

SEQ ID NO: 80313 - DNA, 1061 bp, Homo sapiens
cacgtagaatgaccacagccactcgcatccgtatagcactttaaagtttctgcagtcctttgacacataggatctcatggagcctcacgtctactcccttctgcagatgaggaaaccgagagaagtggcccaaggtcacgcaactctgagatgccacatttcatttgatcttgtacacattttcttttattccttcttttttcctcctttcatttcccactacgcacaaagagtttataaacactgttctcagaagagtcacagtttggggtgagatctggaaatcaagaaatgggtgtccactcttttctttcattagctaggatctactagatgcattatactccatacctgcttttcccatggccgccctacggaaaatcccatccacagaggccagggctacccaagcccctccaggtgagctgggcctttcctttatgaacctccatcctcccagccagctacagtagggcctcctcaccccgtaccccacagctagacagtgtcagcactcatctcctcctcccacatttctggagcttttttttttccttccccattgacctttgtggtcttctgtgattatttatgctgcctcccaaggatagaattgaaataaaatgttttcaacttatcaaacctgggcatagccatctcatttaaccccagtggttcctgttcttggtcaccatggtaccttgatggtcagctccccacccacagctcctttgcctttctggaatgacaacccacgtctgtacctacagatataatttcacaccttcatttatctcagcactattgacatttggggcgaataattctttgctgtgggggctgccctgtacattgtaagatatttagcagtatccctggctccaccaatcagatgccatagcaaccctcatccaattgggacaaccaaaaatgtccccagatattgcccaatgtcccctggggtgtcagaatcacctcccggttaagaaccactgttctaccgctattcaatagatgctgccccgtgttggggtctgggtgagaccaacgctctacattgg

SEQ ID NO: 80314 - DNA, 1176 bp, Homo sapiens
taagaacctctgctttacattcctcccgagatgtcaagtcttggtgggggctctgagaggctgggggtgaccccggcctttttgtgctctgtgtggcttcctcagcatgtcccaaggcagggcatttctaatgttctggtgtctgtcctttctcctaggaggatgaagaaggttataacgatggagaggtagatgacgaggaagatgaagaagagcttggtggtatggcagcctttttactctcagctggtagcagcctggccctttcactttggccttagattgcttagactcagaggcccctggcagtgggcaggacactcctgtcagaggcctcagattccccttccagctgtgcagatgtcttgcctcggtttccaaggatggcacagcttgctagtcatgggtcccctgacttctcactgggtgggttgagttaaagaggtgggattaataactaatctaaatgccgctttcttacttttccagaagaagaaaggggtcagaagcgaaaacgagaacctgaagatgagggagaagatgatgactaagtggaataacctattttgaaaaattcctattgtgatttgactgtttttacccatatcccctctcccccccccctccaatcctgccccctgaaacttatttttttctgattgtaacgttgctgtgggaacgagaggggaagagtgtactgggggttgcggggggagggatggcgggtgggggtggaataaaatactatttttactgccactctttatttttttcccctactttttctttgtgtccggtttttgtccctgtaaatgcgatagctaagtacacactaagtgagcatttgttcctgactctcaaagaggatggtttggagttctcttacgtttcctggtatttcccaagtctcttgggttggttggaaggctgtggctggtctcagtttggttactcaatgcccaggaggggctgagcaccagccatatcttttgctttggttcacatgatgatacctgcttttctcaggcctgctagaggcatccaacgccctggtttgtaaatagcaacctaaaggcgtattttggcactggtctggggacattccccatctctcatcccttttcccccttcacagatggtggtgggcttcgctctacaaagaggactctgatgtta

SEQ ID NO: 80315 - DNA, 1050 bp, Homo sapiens
cttgtgatatggcagaaaggagccaaaactggcagtcccgggaccaggtcccctaggcccagctcaactagtgactcgatgcgtgaccttgaacaagtcagttctctctgtgcctcagatctctcacctttaacctgaggagtttgatttgatcttgccgctttcccgggccctggaacctgttgctgtgctctgacaatttcctggtggtctcggtgtgagaggcctccagaaggggcctttcacatgcataacacttgtgaggggggcttatctttggcacaacttcaggatgtgtttaattatgtcagcactgttttcatgagagttagtgtgttccatctttggacttaggtgggtgtgggagggtcatgagccccacactgaagacgctacaaggggcctgtgctgtgtggggggcggagccagctcaccactagttctgtttccgttccccatttcgattgcacagaggaggagtatgatgaagatgctcaggtagtggaagacgaggaggacgaggatgaggaggaggaaggtgaagaggaggacgtgagtggagaggaggaggtaaggaggctgggctgggcagggccaccgtctgcccctttgaggcagtcccactgactgcctctgtgatcagtcttggcagccccggagccctggttaggaaagtcgctccccgatgggtagtgaagtgagtccatttcagagcctttcactgggctgtttctggggagacaagacttgcagtaagctctggggaggctggattagaagaggggaagaggattttagaggcagggactgaacctgctggggtaagcctggccgttgtttctatgtgaagaagtacagaatgcatggccccattttctgctttttgctttcatatgctaattaagatattcattgagcacttaaactgtgctagggaaaaccaaagtctgccttgaactgataggtagcaggataacactgctggatcccaaatcagagagtgacactatggaaatagagcaccaggagttggccattttcctaaagaga

SEQ ID NO: 80316 - DNA, 1035 bp, Homo sapiens
agtacatgaagtgccatgttaaccgcccttatcatcatcattatcagatgcagaaggagttagtttgttagttcaagttgacttttggtttccctctggctccttagtctcagggagaggcagtaaacctcttggctcatgcaccaagaaagccccaggctaatttcaagtcaatcactgttaagacagaagctgtaattgcagaataaaagtgttaacattggataaggcttcaaagatcctccagtccaaccccccattttccagatggagacgccgaggcccacaaactgcaggtgatatgtctgggcaaacactgtggctaagcagagccaaatccaagcttccttatcacctggaagtcatggtctgcgcatgctatctcatggcatccttgcctgtttgctagggctgttcctccaccttcctcccacaaatcacttactgttggcttcatttttccgcttgcagaaaaagttagaaaacctcaagagcttagaccttttcaattgcgaggtaaccaacctgaacgactaccgagaaaatgtgttcaagctcctcccgcaactcacatatctcgacggctatgaccgggacgacaaggaggcccctgactcggatgctgagggctacgtggagggcctggatgatgaggaggaggatgaggatggtgggtgacagggtgcggcccagggctgcaggggcccagctgaggccttggggctcgtccttggctttgcagaggtgggtgggctgggtgttgggaggcccccacccagctactgaaggctggctgtctgtctggtagctaccaccttccaaagctatggaggggagtagggctgtctgctttgttttccatagtccctaatctgtctcattggttgacttccctaaaagaacaaagcatgagtcccatgctcatggaaatatcctgagattctccaactgcataataactcctttaaaaccatccaactgaatccccacttcaatttttgtcccttttccaaagcccccagggagtgggattct

SEQ ID NO: 80317 - DNA, 1354 bp, Homo sapiens
aaacatggggcaagcacaatcctgattaaagcttcttctccttcacttttttcctttgcttttttttttttttttcttcttcttcttcctttaaggcagagcaaggtaactcttaggcttatggccagatctcaggtcttaactactttcctgtggtctaagcaattcttcttgcattgcctgtgaaacccactatcctaccaccagttgcatgtggaatgtcccctgtgggtaaaggtgtgtaacctacagcagccttctctccaccccaatctcatgctgccacctcctttcttcccttccacaaattctctcgtacccacctggcttcctagctgttccccaataaggccaagcatgccacccactcaggatctttgccctggcttttccttctttctgtctggaaggccctcctagttgttgacttggccttacgtctctgctgaaagctcactttggataggccttcctggttaccctctctaaagtagtgtcccttgtcactattgcttttctgtccttttcttttctttcttttttttttttttgagacggagtctcgctgtgtcgcccaggctggagcgcagtggcgggatctcggctcactgcaagctccgcctccctggttcacgccattctcctgcctcagcctccggagtagctgggactacaggtgcccgccaccacacctggctaattttttgtatttttagtagagtcggggtttcaccgtgttagccagaatggtcttgatctcctgacctcatgatccgccagcctcggcctcccaaagtgctgggattacaggcgtgagccaccgcgcccggtgcctttctgtccttttttttttttctttgcagcattcatacacattatatacatgtgtatacatttattggtttattctttggctcccctgctagaatgtagatctgtgagacaggcacctagttttgtttaccacggtatctttaacacctagcatagtacctggcatggcatgtagtaaatactctgtacggactgttgaatgattgtatcgggcctgcatcctaaagcaagtaatgcttaagaagaaagaatcaaatcatagcattttaagaggggaaaagactcagagctctctttgcagggctttatcatacaatattattaattcatctaataagcatccagcactctttatgtatgaagctctttgcccacggtcacttaacagccttgtgattcatacagggacaggaagctcccaagttttcagagcagcccattattttgtgagacagccataatgatctagagaccttcttacaaagtacactggggagaaagctgtctctttatgattcct

SEQ ID NO: 80318 - DNA, 1061 bp, Homo sapiens
cacttttattcattaaaaagaaaactgactggcttggacctacaaattagtttcattatttgttaatgtttgaaagccattaaaagatgaatattaaggtttctttatactcaatacttgtagttttgtttgggggaatgagaggatgcccttggtacctttgtgaggcctctccactgagggtcaatcatgacttctgttttaaaccagcccatcccatcttctccagctgctctccttatgtcttgcttctctcccctccaaccttctcagcataaggactcaatcctaggctcctaccccagacgggtgccttccaacgttcctggtgccagtggccccccatcagccatgttcccccagccccttctccacactcttgtcacccagggccccatccttcagtgcattgcacactttgcatgctgggtcagggaagattgtggagagaggacagtgcacctggtttcccccacatagactgcgtgggggtatgtcctgcttccgccacttccaactgtggcacttgggcacgcccctctcagggcaccttccctttttgtctccgcaaaatgaggttgtaatagtgcctgccgcactgtctggcacacagtaagctctcaagaaatgttagctgttgttgccgttagaacaccatagctagaataccatacctggcattcacttaaaaaaaaaaaaaacaacttagggccaggcgcagtggctcacgcctgtacttccagcactttgggaggccaagacaggcagagcacctgaggccaggagttcaagaacaggctggccttgtctctactaaaaatacaaaaaaaaaaatcagccgggtgtcgtggcaggtgcctgtaattccagctactctggaggctgaggcaggagaatcgcttgaacctgggagacggaggttgcagtgtgagccgatatcgtgccactgcattccagcctgggcaacgagcgaaactcggtctcaaaaaaacccaacttacattatccgcagacacattacatacaaaagtaaccattttctttcaatgggaaaggaggtt

SEQ ID NO: 80319 - DNA, 1049 bp, Homo sapiens
tgtttgctctttcggcggaagtgatagagtaaggggaacattaaacatgaggttcttttggcgggggtgaggggtgtcgcgcacgcgactctagtggccctgactgaagccaaggacagcagcctgttccccgggagggaagagttgtcgatccgttggggaaacgccctcccgggctgggctctccgggaaggtaggtcgagctccgtgtttcaggtggatgttgcagcgccctgcaggctaggggaaccctcctcctcggtctaaacctgctccttcccccttttatttttgcctgggagaaggcagctacaatagtaatgagatcctaaagcgaaagagagggatgaaggtttgcttttgaaaaaagtaaaccgcctttctccggatgttgacttaggagccaggcaattcgtcgcgtcgggtcctccgatgctggcatctctgagaattttaaaaagccgatataggtgctggttaagcacctcacgagctgaactctggtatctgtgcagaaactaactttcatggcagtgtccagcagaggctgccttggaagccagcttttactttgacctttggaatacatcgcatgatgttttccaggctgacttactgcctaattgggttcaagtagcatgatattaactacagtttatgcaagccaaccaggaactcgcaggcagaaaattgagcctgagttcccctgtggtcatagtcagttgagttctgctgctgatagtagtttcgagtctgaggggctccatgatgaagatgggcttaggaattacacagacctgggtttgaattcctcctgccacaaggaggtaggatacgtttacctgcccttgtgaccttgggctggtgagcttaacctacctttttgaagctttgtttcttcacctgtaaaacggaataatcctatttaatcagtaaatgatgacaaaattggtttgatatggccctcagtatatgctgtctatatgacagttttagtctcggagacatatcagggtgcttccaggcattactttgagctcctccatggt

SEQ ID NO: 80320 - DNA, 1854 bp, Homo sapiens
ccggccgcgcccctccccctcgcagaacgcacctgcggccccgcccccggccgaacgctgaggcggcggctggctggcaaggccgggcggctcggccctcgaggcacagtcaccttcccttcccccgccattccgcccacccccctcactcagccacagagcagccgccgcgctcctcagccgccccgaaatctaaaggggtccgtctccggcaccactaccaaatggccgagcctccctggccggctgcgcagcccgcccattggtcccttcccccccccgccgccactgccattggctgttgcccggagaccctcggcggcgattggctcgggccgctgccgctcgtccatggggccgcagatcccgcctccacggcgatcaggttagtgtgcgccgcgggtgctgggggctcgagaaccgagcggagctggttgagccttcaaagtcctaaaacgcgcggccgtgggttcggggtttattgattgaattccgccggcgcgggagcctctgcagagagagagcgcgagagatggagatgggcagacggattcatttagagctgcggaacaggacgccctctgatgtgagcatttgccaaaaatatctctgtcggtccattctcctactttgtgtgtgtgtgtgtgtgtgcgcgctggggggaggcactttttttgggggggggcgcccgggaggtgcgggtttgggggtcggactgcaagcgaattggcaaggctggggggttgcaatgccatccgagcatgttccggctgccgccgccgctgcccttggtgtgtgactacctgtgcgtgtgctcccgcgtgtgcgagtgtgggtgcgagagtgtgcgtgcgagtgtgcacccatcgggggccggcgggcgcacgcgtttgggtcggagagaatgaggcgaaatcaccctcggagatcgctgctcccgtgactccgtctggggggaagattaacgagggaggaggaggagaggggctgcctcctggatttaacaacaaaaaaagggggttttacattttataaatgtatccccccttccgcccccctcccgcgcctcccccctccctttctctcgctcgctcgctcgcacacacaataagtttggggcttcgcgagtccggtttagtttctgataaatgtgggccgaggcccccggggagagcgcgtggggagggggctgcagcggagttgggaatggctggagtttaaagtgcgtcttcatttctttgcagtgatgaggcgagagacgggggagccatatttgtaactttgtagtgttcgtgaacgcgccctttctctccctccctccctttctctgcctcccttcctctcctcctctttctccctcactctttccaccccaccttcgggccagatgctgatgtttcttcctttccttccgaagggaggataaattagaaggagggggagggattttcgaacgtgctaaggcacagataatccccgcgtctccctgcctccagcgatcgctggtgcaagttgcccaaaggctacgtcccggtgccccctcgccccagctccttccggcttccccaagatgccagcctttgggccctggtgccccccagctcgaacccccggcccgtctttctcagtgctgggcttgtcggcagccattcggcgcctgcttaataaatgggcacgggaaactttgtcaggacgcgagctgcccggagctggcgcccgtggtgggtactggctgggtccacgtttatgcgggcatggcaaacacgcagctctaggatgggagtttgcccgctagccgccgttattgattgggcagcggcgggagcacggccggaggaaacttacacgggtggg

SEQ ID NO: 80321 - DNA, 1206 bp, Homo sapiens
atcctgggggctcttccggcttggggtaggggtgggtggcggcacacggggtcctaggtctttgacgtcgagggagatttatcagggtcttgagcttcttggaggtggtgtagcggggttccgggacaaggggtctttttacccgggtcccgagctctttggggcagagaatgcagtttagcaaggtttacaccggtgtaaaccttgtctctggaggcagatcatcggggtcttgggggttctttgagcgggcgtgggcgtccgtttcgcattgctgggatgaagaagcagtgtgtccgggttctggggagaggggtctgttcatcggtgtctccgggtgagagagcgatgtatccgttccgctggggccggggccgccttggggggttgttgggggctgagggtgtgtagcggcgaccagcgtctggccggggtttctgctttgcccggagcggggcggtaacttggcatggtctccagtcttttgggggcgacggggcgagttagctggcccccgggcagtctctcggggtgggcgcggctccgcaggcgctgggtccgctgagggcgggagagggctttggtgctaccgcgcaggctgggcagcatcctgaaacgtttttgttcaggtctccttctctctggatgagatttactcaatgcttagttggaggattgatcggtgttgttgcctagttgaagaagcagtgcgtttgttctgcagttttcttttctctgccccgggatccctgtgggggcgcgctggtctcgctggagctccgggagctagagtggcagcaccttaggtgggcgtttggtctgcaggttctttaggaggccggtgtccgcaggttgagcgtggatacagctcctgagcaactggaatctgttgagggtggggaagactgattttggcttgctttcctaggtggtggtctgctttgctcatcctgcatgattagatctgttctgaagtcttgcctgagtgaatgttaggcagagtcggatagtgcagggaagcgtgttctgtctggcttctttctgtcctttgaaaagcatttgtagagagggataacgtcaaattcagcctccagaaaacaatggaatttgaaatcccaaagctagaactctgcaaaaacgttttctgtgacctgtaaggatggttaatcgagcttttttagagaattctgcttaacagtttcattg

SEQ ID NO: 80322 - DNA, 2462 bp, Homo sapiens
aagtaaaatgttaaaacatgttaagtttgttggatatttaattatgtaaagataaattaattttaggactttcttttatcaaatttaattgtttcctgagtttgcaaaaggaagtttttagatttcctagaggagaatagggtgggggaataggtattcttattgtggtacagacttcaggaaatttctttttgtcaaacatatacacatctgatagatatattttgcttgtgaagcatacgaaccatacaaataattttatagtttcattattacactgctgaaaatgacagtaccaaagtgtcttttgaattatcattcagagttctagaatcataaatatgatatactaaagcagtttctagaaaggaaatcataagacatgaattccagtcttcactgtgctactcatggtgtgtccttggataattccttaatctttcagggccccagttttcatatatacatatatgaattatacttacatacattttatatataatatatacttttgctttaatatatacatatatgacatgtgtatgttgttatatacatatgccatatatgtatataatatgtataatatataaaatatgtgtataaaaagatacatatacacacacttagagtttttgtgttgcaagtctgaagtattgtatgtacaaaaaggaagagataccttaagagtagctagttctcaagaaacaactagttccatgtaatttttacatattatacctaattttagaagcctcttctttttaaaggtacatggcaagtatttaattccagaatatagattcatgaaggtgagtgattttctttagataatttagctttatctgttaaagcattattatttttagttccaatccctggttctgtagtagattatctatataataatatgtccttacttaactctggatatagaatgaggtctctagtggttgcctccagacttgatcccctttaatccatccttacattactgccaaggtgatttttctgaagtgcaaatctattcattgcttcttttcttgtttcttttctcttttctttctctttctttcttagaaatgttactgagatttatttatttatctttcaacttttcttttaagttcaggggcacatgtgcagaatgggcaggtttgtgacacaggtaaacatgtgccatagtgatttactgcacagatcatcccatcacccaggtataaagcccagcatccactagctattcttctcttcctgatgctgtctctccctgcccttctttcttaaagcccatactttatcagcccaactctctatcgttacaaggcctttcatcatctgactaatcttatgcatttcccccaccataaatctaaagctgcacttgtactaatacgagcagtttactgaatgagccatactgtttcctgactcagagccttcacatatgttctctccactatttaggatgtctttccttctcttgtcttgctggcaaagtctactgattttttaagatacaacgtaagcactgtctgctttttttttttttttttttttagctcttttttagttaccattttttcttttttttctttctttactgtctgctttttaagtcttctggtcttccctcttcccaaccctaggtgttatatactcactgtatcatgttcattcattctcttgtgtttactaatgtgttgtaattaagtctctctttcctcctggactcaaaggcaggtttatatttgtcttattactttttgacttcctgttgcttgtttatgcatagttggctatcattacatgtttgaactctcagtaccaagattgatgtgttcatgatgtcagaagtgagttaaactcaaatctcagtcttatcctgttttcctaaaatttgggagtttctaaagtatcttattctcttgccctgtgaccataagctgatatgagaatggtagttcttagctttgtgtttaagaaataagacttctcgcactttaagaggtgatggttacactgttaaacttgcagaaaagtcttgtagaattttgaggcaactactaatccttatctctaaaattgctagaagagatattaactagtttgggtgttttaaatcttggacatcattatttggtagatattttaccttggctgctttttacttggaaaatgatagtagctgatgtatgcaggtttttatataggctttaataattgctttacatacattgccattcattttcaaaataaatcctaaacatttaataatttgctcagcgtcattatctactaagatgcagactatgactacatgtaggtctgactgtctccagactctatgctttttctaatactacactgttttctgaatatgactgcttattcagtgtttaaaattattaacatatttaattcattttgtaaattgaagaagtaggttgtaaagtttatcc

SEQ ID NO: 80323 - DNA, 1028 bp, Homo sapiens
acatggatgagcataaggatatataaaaatctgtgcaattgaaatgtagttgaatttgatctctactataaaataatctttataaaaataagattttaacaggtaggaataagcatcatcaatcagatcatggatttcaatttttttgcatagtttacatgttgaggtgatttaatcttttgaagaaaactaaggaatctcatcctcttataaaatgttagatattagaaataacttgtccaatcctatatttttatagttgaggaaatggctacccagtgacgtacccaagctttctggtggcacggccagtgccagatcccaggcctcctgactccattcagtgcactgtaccatgccttaaaccatactggagccacttggggagtttaaaaacttttatgcttctcttatccccagaccttttgatttaattggtatgggttagaacttggtcattggaagttttaaacacgccccaggtgattcatgcatcatagtctgggaacctctactccaaaaagaattagtgtgcttgaggaattggaactagagtgaaatcagtggtacagacttctatccgttatgattccttaatcacttatttggctgggttttatcagagtagtaagacaattttttacattgagaaataattaagatatatgcagagcaaagacttccttaataaaactgtcctttcactagtattttgtgagatagcctgtgacaaaatttttcctaatcatgaaattggagaacaattttttgacactaatcaggcaaggagaaagtttcgtgccatctgtgttgtggcatgctctgctgttgttttaactagataaaattctaattactgttaaacagattgtttatgaggttgtttttaatattttagagcaagtgcataaatataaagaggcaaagaaatggttccagatttaaaatacagtttctttaaaagtaaatcagaatttgacacactgggttgtttaattacacatttcagtttgggtccttggtactgc

SEQ ID NO: 80324 - DNA, 1025 bp, Homo sapiens
gtactaatttgggtgaaggaaagtagtagctacttttatagagataggtggttcaatctttaaaatgttactaggtaatgttgatttctgtgaacttagcatttcagtggccagtaaggtaaagcatcctgttgggtttagttcatatgtaaaaattcttattaattggcaacttttgaagagagctggaagtttaactgtgaatggtgtaatactaattaactgaagttttcttgattctttgaaaaagatgggaaaaaactcctgtgtttatggacattaaaatatagtagtgacttaaacacacgcaatgctacagagagaagagacaggaaatttactaacctactgaaacttttgacaggtgcagtgcatctttggaagtcagattttgattattattaataaaacagcctttgtttagtaagttgaacatcaagtgagaagattacatggagcagtaagcatacagatttgcaataggtactccattcagtgggttttaatgggtgtcaaaactaaactgaccttagtgaattatagctactgcacacacatggcttcagttagaaaggatatggtaccaggtaatgtcatcagtttttccaaatgtgttcctggggaaaataacctaaattcttgaagcagatcatttaacttataattggatgtaatattatgacaagaaaagaccttaaggcaaaaactgttccttatagaggctttttgtttttcatttgaaattagtgcagttgctgattggctttaaaaaaaaccctcatattcttttaaatataataatctgaaggtgttgctaaatttactagcccaactgagaaacaacagtatccttaaaaacaaataattgagtttaggttaaatggaaatagttggctaaatatgatttttaaaaataatacctaaggtacatgtaggaaccagatagattaaataacatgatagaaagtgttcagaagaggtagtacttttatacttagttttaaaaaatttaaattcctctacta

SEQ ID NO: 80325 - DNA, 1015 bp, Homo sapiens
gttcttagtaacctccattgccactgctgccacagctgtgatgggtggctgggcttgagagagtgaagagagaaaaaaacggggggatttgcacacttccttgtgagtcctaagagacccctttccctctctcaagccagaggtagagggcttctcctgaagctttccatttgggctgtattatgttcagtctggatgaaagcagagggggaaataaatggtaaacctgtggttgcttcagtggtacatcaaattctggttgttttaatcggcctgctactgttacttttcaaagttccttagtagttgttccatgcattctgtccaggtcttatagctacattaacttgttggcatgtgattaccccatcttatctggaactggaagctgacttaaggttttcaattttgtttctctaggaatttgacaagaaactgaagttttgattcagatatattttgaattgaaaccagagatgttctagagtttagattctttcatttgattaaggtaagattgtttgataaaatttaatcatacctttactgtacgttttcagtgatgtgctagaatttagattgtttcatttgattaaggtaagattgtttaataaaatttaattataccaatactatgcatttttagacttatattttaatgtgtatttgattaacacatttaaatttcccagtctaatctgagattctgacctcaggaaatattttcatggtttctttaccacttaaatagctaatgttccttgtaacaactactagattcaagggaaacatgattatacattcactggaagtgttatagactgatatcaaatctgtttgcctagagcaggagtcagcaaactatggcctatgggccagccacctattttggtaaataaagtttattggaacacagtcacacccacttaatacatattgtgtgtggccatcttagcactacattggcagagtttttagttggaacagtgtctgtatggcccacaagcctaaaatc

SEQ ID NO: 80326 - DNA, 1040 bp, Homo sapiens
attggagatgaatttgttgattgctttcaaaatttggagatgacatttgagacacgccttttaaaaaaattagcatgtagtagtagtagtaggaaataaatgacataaaaagtgcagggaaatgtagtataatggcaaacactggactaagataaatttgggttctgagcctataatctggtttcattttccagctgtatctcttaagagattttggacaagttgagacttgaaaaaactagtaaccgctctaaaagaaaaatggaacttacatttccacattcttgagtatatacacgtatctcatttagttctcaagacacctgtgaggtacctgtgagctagatagtactagtgctagtgtactaatgagaaaaccgtgattcagagaagtgaaataactggcagtggaagaaaagctagtaagtgattgagtcaacagttgactctatatcagtttccttatctgaaaaacgaaggtaataccactttgtagttatgagaattaagtgggattacattaataaggactcaaaactgctgctagtctcttcctctacccccctttttataaaggtccccacttcccagtctcttgacctgccattctgttaactattaattaataagagaaatttataatatggatattactcttatgtatctttaaaattgcaaaagattatgcagtgtctgaaggctgtatattaaatgtttctttttatcataaacattagaaaaaacattacttcaaattgcaagtagaatttgcagtattgtttattctaccagattatccttacatgtttccattagcgtattctcacaatcattttttctgatatcatgctttctgcattgctttgtgaagtagctcaaaactgcattctatataaaaaaattatcctaataataactcatttaaaaaccaatttggggctgggtgcggtggctcatgcctgtaatcccagcactttgggaggccaaggcaggtggatcacctgaggtcaggagttcaagaccagcctggccaacatggt

SEQ ID NO: 80327 - DNA, 1004 bp, Homo sapiens
tagctgcatatatgctccagactgcctatttctagatatattttatatgagtgaaaacccaagctggaacataagatggtttatttctggtgtctgttactaatagcaaaacctgttcctcacaggtacagatagcagtgtggtacaagcatctgactccctctaaccccacatctagttaccactgaaatgactataaatatatctaaatagagtgtaccagcattgaaaacaccaaaaaggaagtgttcacatacctgaaataccaacatcccaagaaaaagaaataactgcagtaggttgaaatgtatcaaatatgttaaaaatctgtgagttcatatgttacttttttttaaagctccttatgtttggggactagggagccaattcattattttgaaaattgataaagatttaatcattaattctgcccttcccatacaaactgtatatctcagggtaaccaagtagttggcaagagcaagattttctttatagaaatattttaactatacattaagaaggtctgatagaatatcacccattttgcaacttttaatgaaacaatcatcagtgattgctaaaagtaatattgggtgaactgctaaaggataactttataatggctttcctcttgtttttgggctacaacacagacatggctgaggctttagtagctttcttgggtcatataatggctttataatggattaggctgaaaatagggattaatcttaacatcataaaaagagagacagttgaacattatatacttcctgatgaaggttcacatctctatcatgaagtatccttgtgaaaaatcaaaccctacttttatcaaaccgccgagatcccgccactgcactccagcctgggcgacagagcgagactccgtctcaaaaaaaaaaaaaaaaaaaaaaaaaaagaaaagaaatattgaggagacagactctgaaataagattctgcaaccttaaaaatacaggaatgttgcactcaacacca

SEQ ID NO: 80328 - DNA, 1350 bp, Homo sapiens
aaatgcttcaaaatcaagaactttttaagcatcaacgtgatgctctaaagaaatactcagtgaagcgtttcagattttagatctggggtgctgaactgttaagtgtaatgcagatattcccaaatctgagaaaaatccaaaatccaaaacccttctggtcccaagcattttgggtacagcatactcaaactgtattaggtatttcttttggcctagggggcattgtgaaaaattactgagataccaagggagccacaaactaagaaagtttgaacatctctgctttagaagcttgagctaactaaggatttcaccaaaaggaggaagcacctcttacctttttttgtgctgaaaagtttgagtttgcaattttaaatctgatccaaaattgtcctaatacagttgttcaacattaaaaaaaaaaaaagcaaagaaaactttatcctatgaaatgccggtagtacatctttgcatgattttttttcttcttgcctccataggtatggtctgaatatgcgttgcttggcagctcgggtcaactataagactttgattattatctgcgcactcttcactttggtcacagtacttttgtggaataagtgttccagtgacaaagcaatccagtttccacggcgttcgagtagtggcttcagagtggatgggtttgaaaaaagagcagcagcatctgagagtaacaactatatgaaccacgtggccaaacaacagtctgaggaagcattccctcaggaacagcagaaagcaccccctgttgttgggggcttcaatagcaatgtgggaagtaaggtgttagggctcaaatatgaagaaattgactgtctcataaatgatgaacacacaattaaagggagacgagaggggaacgaagtctttcttccattcacttgggttgagaaatattttgatgtttatggaaaggtggttcagtatgatggctatgatcggtttgaattctctcatagctattccaaagtctatgcacagagagccccctatcaccccgatggtgtgtttatgtcttttgaaggctacaatgtggaagtccgagacagagtcaagtgcataagtggggttgaaggttggtatctgtctgcttcacttgcatttttcaagcatgattgtgttgaggaataagaaaatgttgttaattatacatcaagtacatagcttactgtcaaaagacctttcatcactctaatttagcagggaggaacaggttaagcctgaacctagggcaactttctagatgctatgacttaagggctgccataagaccaaacctgggcaaacagaattattttattaacgtaactcagaatctaaaattct

SEQ ID NO: 80329 - DNA, 1794 bp, Homo sapiens
gtaggaaacaggattatgaaacatgacatctgtagccatgagcaaaagtaacacacacaaaaagccagtccttaaaaggtaatttatagcgttgcactatttgttaacaaataatgaatgagagtgaaagaatacttaatttttgtttttcacatctggttaatttggtactagatctggtcattatgagagcagtattataaggaagcccacaacttcctgataaccctgtaagatcccccagaagtaaatcagtgaggaatggtattaggaataggcttgtaatgtctggatatgattattcattttgtttctctattttataggtgtgccattatctacacaatggggacctcaaggctatttctatccaatccagattgcacagtatggattaagtcattacagcaagaatctaactgagaaacctcctcacatagaggtatatgaaacagcagaagacagagacaaaaacaagcctaatgactggactgtgccaaagggctgctttatggcgaatgtggctgataagtctagattcaccaatgtcaaacagtttattgcaccaggtaagttatgtattatatgtgcctgctaattttatgttgatttatgggaccctgatagtcccttaaaattttaatatggtttaaaaaaacacataagcagaccctttatattacatatataaagtaacaaatggtgtcaccccaatgaaatctctaaaaaagatacagctaaaaagtcaaggttataaaaaggaatatttactatgtaaagagccaagccatagattgaatggtaaggtccaggttactgcacaatgtgtacctgcctccaggggtctatatctgataggaatgaagttcctccatttaatatttcagtacagtatagtttaatttttaaacttttgcagtaaatagaatggttttaaggagacagccatcttttcctttgcctattttttgccaatagcttttaattttttcaggataatagagcattaccaaagaggcctgtttcccatattggattttgttaatgtagtagattatctcaaacttcatgtaaagtcattttcattaataaaataattaacaaaatcaaattaactttatgcaacatttccccttttactaagacagtctcattaattagaatgtaatgcattttcctgcactaatcaatatcaatgagaattaatgagtccattacttaagaagacaatgaaataattttagttagcacctcaggtttaattctctatgggggaatgttgtcaagtacagaacttgttccccctcccaccagtcttgcagttggtaaataaaaagagaggaaaggttataagacctcttctgtattctctccttgttcttcattgatgactgtgtaatttacagaccctgaaagccacaatacaaacctactcattctagatagccttaagtaatgaatttatgagtactgaatgcagtgcaaataatagatgacctttaatttttattctgtcactagaactccttttctcccatggcattctgtgatattctggtacacagagcatctttgcttattgtaaacaacaggtttggctgagtgagaaagtacaactaaatttttaagaatatttagcttgtgatacctaagaggttattgcaacaggaaatgattagactatgcaaaagaacttttgggtgcactcaagaaacttatttttgcactagttaataatggttgtctggattagggtggaatcagcagccctcaccttgatctccttgagtgttt

SEQ ID NO: 80330 - DNA, 2104 bp, Homo sapiens
atgctttgatatacatatatgttgtgaaatgactgccataattaaattagttaacacatccatcacctcatagttacctttctttgtatggtgttggtggtggtgagaacatttaagagatattttagcacatttcaggcatacaatacagtattataagctgtagtcaccatgctgtacatcagacccctagatcttactcatcttatatctgaagtttgtaccctttgatcaacatctccccatttttcccacccccccagcccgacaaccaccattctactgtttctgtgagttcagttgtttggaggtccacatataagtgagatcatacagtatctttctctgacttgtcacacgtagcataattccttcaaggttcgtctatgttgtcacaaacggcaggatttccttctttgttatggctaatattctattctataggtatgtgtgtgtgtatacacacatgtgtgtgcacgtgcacacacacacacacatatttacaccatattttctttatctatactagacacttaggttgctcccatgccttggctattgtgaataatgctgcaaagaacatgggagtgcaggtatctttttgaggttattgatttcatttccttgggttgtataccaggaagtgggattgctggatcatatggtagttctatttttaattttttgaggaacctccatactgtttcctaatgactatgccaatttacattcccacccaaagtgcgcaagggtttccctttctccatatcctcaccagtacttcttatctcttcccttttttatgatagtcatcccaacaggtgtaaggtgatgatatatcattgtggttttgctttgcatttatttccctcgtgattaatgatgttgagcacctttttatataccttttggccactcgtgtcttctttgaaaaagtgtctattcagatcatttgcttattttttaatcagatttttttttgctatttgtataagttcctgatagattttggatattaacctcttatcagatatatgtttgtacatattctctcctattctataggttgcttttcattttgttgattgtttcccttgctgtgcaaaagctttttagtttgatgtagtcccacttgtttttctgtgccccttttgcttgtacatttgatgtcaaatctaaacaatcattgctaagaccaatgtcaaaagtattcttaaatgttgatcatcctttattgcctaaagtgcatatatatgtgtcacatataccaaaaataaacagttatagtaactactgggaataactggttaggagaggatgggtcatggctttcaaacaataaaaaaaaaacaaaactttctattagatttgaaggaggaatcttcagatagcctagtacctccagtagagctcagaaccttacctggtacattgccaaactggtttccaccatcccatttgctcccattcaggtcctcgtgaatgatgccaggaggttatttaacgtcctctgtatatctataaaatgggaattaaatgatttgtaagattgttgtgaagattataattgttggttggttaatttaaattgaggattgtgacttctgtcacttctcctagatgactcagtaacaccctctgctggtgttaaggtcttaggaaaattaatacattggctttttaaaaggttacatcccttgacatcgttcattactgagttctttggactggtttgtcatatgaagatataaggtgactgattaaaccatgtcatttcattaaatttgtgtaaataaaattgtaattctgggaggaaatgggtactcttccagcttccgaaattctgggaggaaatgggtacttttccagcttcctcacacttggacttctaaagatgggtcattgttatccagtttggccagaatagacgtcatagttaataatcccatctgatgagaatgaaaaaataagcactcaagatagtctgctccactgaatataatttaatcttgagtggttcataagtcagttcagaatcctgcagtgtttcagggatgttgtcctgaacttcagatcccattttactatagatgcagaaaaatgc

SEQ ID NO: 80331 - DNA, 1038 bp, Homo sapiens
tcagaattgtctgttccatccaatgaagtaattaagagccttgggacaaatataaccatactgcttgagtccagtgttgcaagagttaaatgatcaactcagcatactgacaccctccaagtatacactatcatcagttcacattcctttttccctttctttttttttttaagagacagagtctcattctgtcacccagaacaagagtggtgtgatcatagcttacttcagccttaaactcctgggctcaagcagtcctcccacgttggcctcccaagtacctaggactacacatgccactgcacttggctattgtattatattttttgtagagttagggtctcgctttcttgcccagactggtctcaagctcctcgcttcaagcagtcctcctgccttggcctccgaaactgctgagtgtgaccagttgtgcctggcccagttcacatttctgatctttgctcctggtgacacactaaagattttttcaaggattctgcaaagcatagatctgcttctatggctgcatctaagagaacctttctattgaatattctcataagaataccatctccaatatcatttgtctttttcacagtctgaacctgagtccgggaaacctggattctagtccctgctctacaactaattagcttttggcattgggcaaaccatttaaccttgcaaagcctacatatcttcacctctaaaatggagatgtaatataataattcctgccctaccagcttcagaagattaagtatcaagtgagataatacatgtgaatgcgttttggacatttaagctgtgaaaagatcaagataggaagatttccctttaatattttaaaatttgtactacgtatatttttgttgttcttattcttgctgctgctactgctattttaatatgctcagtttcttggtagatctagatgagcagtattcaaaatgtcatctttctgggaattagccatcattaatactataaatattcaagagaaattttctctttaataatttgtcaaataaaacagct

SEQ ID NO: 80332 - DNA, 3591 bp, Homo sapiens
tactatggcattgggcccagaacttcatggagcacagttaccagggacctggtcactgacctcaggaaaggagtgggtctttcaaacacaaaagctgtcaagccaaccaaaataatgcccaagaaggtggttaggttgattgcaaaaggtaagggattcctcgacaacattaccatctctaccacagcccacatggctgcattttttgctgctagtgattggctagtaaggaaccaggatgagaaaggtggctggccaattatggtgacccgtaagttaggggaagggttcaagtctttagagccaggatggtattctgccatggcccaagggcaagccatttctacattagtcagggcctatctgttaacaaaagaccatatattcctcaattcagctttaagggcaacagccccttataagtttctatctgagcagcatggagttaaagctgtgtttatgaataaacatgactggtatgaagaatatccaaccacacctagctcttttgttttaaatggctttatgtattctttaattgggctgtatgacttaaaagaaactgcaggggaaaaactcggaaaagaagcaaggtccttgtatgagcgtggcatggaatctcttaaagccatgctgcccttgtatgacactggctcaggaaccatctatgacctccgtcacttcatgcttggcatcgctcctaacctggctcgctgggactatcataccacccacatcaatcagttgcagctactcagtaccattgatgagtccccagtcttcaaagaatttgtcaagaggtggaaaagctaccttaaaggcagcagggcaaagcacaactagagctcacaaccaaaactgcacttcagcctctgctgtacacagaaactacaggctctgtctcaggagagcataggcacattttaaaaggttatgtactaggtttttgtggattctatcaaagtgataagtgatccttaaaaccagccttctaaaataattgcattccatgggttgggtatttagaaatgtaggtggcatttagaacacaatgtttaatcaatgggctgaacaaagatgcttcactttgccttgcccatcaccctatacagtttcgcagatagtctagtcactctatgtgagaaagataatggtaagtagttgctactggccaactgtctagcacttacctgaaaacttagtatggagctcttttaaaatgtgattatttatatttatgttgaaagcggactttaaaaaaaataatgtgctgtaacacagtaaatatgtacttgtagcctggatagcagactgtgttcaactttttaaaaagatgtttcctttctaaagattaatttcttgggagcaaatgagtatttgttgcatttgttcaatttgttgtatatggtgaatatttaattatggttttcttgaaacgtgtaaattaaaaacacaatcagtgttcaggcttcagttatataatgtaagcacaactaaaatgaaacttgttgactgcacaagaaattacaaaaatgtttctgttttgaaacttgatctacaatcagtaaaagtttgataatcagtatatcccttcccaacccccattgtgacagtttctttttgtcactgtctagaattttgtattttatttcagactataccttggagttttgtatattttgagagagatatttttgggacattattttggaaacttattacaaatctaaatttggaaaggagctagtagctttaaggccaccaccatattttacttttttaggatttttccccctttaaataaaaatattagatcaaatactatatgcaagaaatcatagcaaagtttttttttcctaccaagatcattcttgatcatcagcttcccaaactagtaagtctgtgcatcattgggtgtttttttttaatttaattttaaattatcccagctattagatagaagggatgttactgcacttatgtgtaatcagatctttatttaggtatacatatcctcctataccgcacataaatagatttcagagcccccatacaatgggcagtgtctgctatagggcttcaggcattaaataaaaccgagggttgttgattttgctgtgacagtacactaaatcaatactatatcttatacagtttgaaaatatgataccctacactttcaggggaccgagtctgacaaacacaatacatttatctgtgacctatatcaagtacacatttaggagccaggtaggttacctgcttacacactatattttaattgaattcaaactatcaagcactacttagaaactggaaaacatatatatgttagcatcaaagggggcagaagcaaagaagatacagatctgcactgaagacattagactggccatagaaaagtaagcttgaactcccaattgatgtgaccacactcttcttaattttgttcacagtaaaaacacttttttgagttattaggcttacccctagcttttgacctttgcatttcatatatgttagatgtctcagcaagaatatctggtctcccctaatttttattcccagtgccgatgttcaaaataaactttctccagtctgggaaccttttttacttccccatatttgttattatttagaatggttcatacgtctgctttgtttgcatactggtcttcagattatgagactcgatgataacagtatggtactgcttctgtgacaaatatcgtgccttaacaatgtggctgtccttttccactgaagaaggaaagacgttttgatctagaaatagcgttgtgatttccttgctgttggttttacactgccttccacattgcaacagcaagttgatttcttgtgatcccagaattttctaagaggatgagttgaatctatagcagcattgtcagtacagaccagtggttctcaaactttaaaatgcctcagcatcacttgggagcttattgaaatgcagatcccagagtcagtaaatctgcctgtgaagtatgatagtctgcatttgtaatgagcattcaagtgattctgatgcaggtgagctgggggcatacagggaggaacactgccctggactatccattgcatttttgcctctaaacaactacagaattttctagggttttaaattatgtaaaatgtttacttattctgagcttagagagaatggggagggtatttttaaattttattgttttatttctttaagtttttctttgctttaagattataggtattaggtttgtttttgtttttccacttatcttgagttcactttgatgttaaatctattgctacttcagttgtaaaaccagccaaaagtttctggatgaaggtcaagtttgaccttttaggagttattgtacataaaggcttcatccacgaaccatccagcgcacagaagcaagtgcaaaaatgacacaagcacaactctccagacgtggctccttctcctttctcagtgcagactctcactgaaagctgctattttcatcctccttgtggttgcttttcttgtttctcttccattgtacatgtgggttatataccatatgttaaatatgcaataaagtg

SEQ ID NO: 80333 - DNA, 1048 bp, Homo sapiens
caagctggttgtgaggattccgtgagcaggaattgcagaattcatgtgaatagcgcctgaggtcccctgatcctactctgcctcttctctttccctgctatccaaatctgccattatttactgctggccaaaaatgcccagtgattttccccaggtggtttgcagtttaatagctagaaaaaccaaaggcttgaaactgtcacggtagaattgtaggcattggctagcaggtgcatgcaagtcttggccatgcaagaaggctttcctggatgctgagcttgaggcaggaactgaaagggaaaacttgctgatgtgcccttctgctcctagttcctggaggttctctcttctaaataggctgcatatgatttgatttcatttcactctaaattgctcagcctgcaactaggggtgcaaggtggagtcctacaaatcaattctgctgtgcaaataagcaggcacctgcttacttgggggtgcttagaaatgaggccaagctacgaagtgttgaggaaatgattgcagttttcctttggggtcaaactgggtttagaatacaaaattgtcttcaaatattagtttgtcctttcaatgtatgtaccatgcgttttatgaaggtctgctctatgcaaaacactttgctaaggctagagtgggaagacggagagaatgtttcttctttcctgtgctcacaggagctcagagcaggagtgcaactaagacctagtaatagggttccatagacagaggttcaagttggggagggcagggcaggtcagtcctcttagtctaagctggaacatcattgtcctgggacagagggactccttttattatcctgtatccgtccatttatttttttggaaaggctgctttaaatcttgcccctattacgtggccaatattgggcttcccatccttgtctggggtcagcatagcaggtcagatggaggcaggtttttttaatctgggctcagccctggctttggtggcaaaatatcctccccaggtctggggccagattcctaaatgaggtcaagttgtccaa

SEQ ID NO: 80334 - DNA, 1017 bp, Homo sapiens
agaacacatgacaccccgctgtggacttttaagaaaaaaactgacaaactccaaatccataatgacatgagaacttacactttgaaggcagaatggacttgtgggaagagaggactccccttctgttctcccttcactaggtggagaagggaagaagggctctccccagacagctctcttcattctggaatgttttgccagtccccaaggcactcagtgaccaactttctttcacaggtcctcccagtgactgacctggctcattctccgaaagtggttgacaggccactacgagagctcttgagagaagctttgtgacatgaaattcatcaaatgaagcaagattcatttttaaagaataatacaaagctccagagtaatatgcttaatccaaatgtttaaatagaatttaaaaccacattttaagtaaatttaaaattaatgaaatatcaatagtttgccttaacaaggacttgcttgaaccatattctccttttaaaatcacacacacagaatcagtgtacatttagagaaatttccccagctgaataacatttttgacatgaattcattcaaaagacaccaaccattatgaatattttaggccatgataagctgtaaccacctccggcttatggtggttaggatgttgcagcttaatgttgacatctggcatgaaaagcttatggtctgagtcatgtttcttttttatgtaattctggcttgggaatccgatacagagcagctgagaaataaattatgttgctgaggctgaagatgatgcacagaagtatggctccagctatctgagagaaagagaagggcttggaggtggccaggagccattccttcctcagagtcttgtccagaagtatggcttccatctgcatgtgcgtggccaggatcacacacacgtgaaacagctggtgactgtgacctatggcaaacacaaaaggccgtcaagatcagcaatgaaaaggaatgagtactgatacatgctatggcattcatgctaaa

SEQ ID NO: 80335 - DNA, 1143 bp, Homo sapiens
taatgtggtgacttgggagccagagagacggagcctgagacttggagcagggcacagcacaggaatacaacacttttcaccagaacgacattccgacctctgaatcaaccctggaaaggcccttccattgaacttcttgtgatggaggaaaagaaaccctcagtttcgtcatcgcaaggcggaagagtttaaataccatacctcaagatctccctccagccctgacacgcgactccgcggccctttcagcgtcggtcgcctaggagacaagcgccacttccggcagcgaagtcacttccgcggaggtcctgcctctccctgcggacgggcgctgattggcccgtttgaaatgcgccaggcgggagctcacctgggctcttagcgtcgccgccggcttcgcagagcaccgcgccttagccgcgaagttctagttcttgctgccggtcctaacgtcccgcagtcttcgccagccagccgtcccgcatgcgcgtttgggcggcgtggagcctgctgccatgaagtcagcgtgagtacgaggccgccgagcagggagagagggcggacgggggccgaggcctcggggctgggggcaggcgtctccactcaggccgcggccgtacgcgggcagcgcggacagcatcccgcccggtgctgctgcggccgcgaccccaaagtgggaacctccacgtgtggccgctccgcgggagcctgggcgcggagacccctgccgcgtcgccccccgccgccccgcctgggcctccaaggggccaggaagggtcggcccggagccggggttgttttacgccgcacccggttcccgggggcggggcagtcctcctcggggtcccgggacagcctttcccttctccctcgctggctgccgccgcctccagagtgcagttggccaacttagtgcgggtcggaggtggtctcgtgtgtggagcagagcgagtgtgctgggcattggttagatgggctccgtttctggagagccctggcaccggtgatcgccgctagcttttttttcagccgagcaccctgtccttgaggccgagcccatccgcttacacaggccagttacttctgctgtattttgtggccgcagagaacctccgcccacattcctaagctaatattttcggc

SEQ ID NO: 80336 - DNA, 1005 bp, Homo sapiens
atggcgaaaccctgtctctactaaaattacaaaaattagctgggtgtggtggtgggtgcctgtaatcccagctactcgggaggctgaggcaggagaattgcttgaacccaggaggttgcagtgagctgagatcatgccattgcactccagcctgggtgacaagagagaaactctgtctctaaataaataaataaataaaaatgtctttgtatattaaatgttgggttaagctgacaagtttttaaattgacatccatttccaagaaattctaacagttttaaaaatctcgtgtgacatgttgttgacttttagagatattagtagtagtataactattatttgtgtacaatataatagtgaatacactgcaatttgatttttattaaaatttattttaattttgtgtgtatttaaagtattctcatatctaatacatacttgtatttgtcaatctcaagtagcagattttaattttcttagcccttggagatacagagctcttaaattgagagactgaatgtttgttgaatgaatgaatgaatgagaagcttaagtgaaaaatcaggcaaaaggtcgaactttcttcttaaagcaccttcctatttcttcaggtatactgtagggtgcgcccactgggctttcctgatcaagagtgttgcatagaagtgatcaataatacaactgttcagcttcatactcctgagggctacagactcaaccgaaatggagactataaggaggtaattctgatttggaccaagttgtttttactcaatatgttgtttcctgaatgacttctagatttttagatgtaacaaagttcatttgtgagcccacattttcaaaagacttatttacttcattataaccactgtatctaaagtgtttttgacttctgggatgcacagacatacctttggtatgctggggttagaggattgcttttagcagataatttcttacactgagtattattgtttcttagagcatgtgttagggatgat

SEQ ID NO: 80337 - DNA, 3496 bp, Homo sapiens
gactaagacacctatggatacagtagtagtaaagaagaaccaaagcactggattcattttgaaaccttaactgttccttagtttttaaacatatttcttactatttaagttaaattctaaaaaacgtggtgtgatttttttttttttgcccccacttcaggttttcaaatctaatgataggaatagtatggatatacagtgtgaggttgatgccttattagaacgtcagaaaagagaagctatgcccaatccaaagacttcttctagcaagtaagtaattatatttgtctgcagcactggcctaggggcacaggattctttcctgtggtttgcccagacatgaggaatggtgaacattaaatagagaagttgacttttgtgagattaaagttaaggaatgttcttaagttctttgctcagatgttttctctttggctttgagcacattttgtttcaatcactgttttaagagggtgccactctggatggggagagggtataaaagccattgttgtgtgttcgggaggacgtgggaatactgttggcaaaccatgagtatgaataaagctgctttgtgcatttctgcttgtaattgcagatatttattttatctgttagtttccccttgggatcagttacttttttttttttttgagacagagtctcactttgctgcccagggtggagtgcagtggcatgatctcggctcactgcaacctctgccttccaggttcaaacgatcctcctgcctcagcccccctagtagctgggattagaggcacacgccaccatgcccggctaatttgtatttttagtagagacggggtttcaccatgttggccaggctggtcttgagttcctgatctcaggtgatccgcctgcctcggcctcccaaagtgctgggattatagctgtgagccaccatgcccggctgggatcatttacttttaaaatggacttataacgtatacaattgaacttttctttttttagacgacaagtagatccagagtttgcagatatgataactgtacaagaattctgcaaagcagaagaggttgatgaagatagtgtctatggtgtatttgtctcttatattgaaatatataataattacatatatgatctattggaagaggtgccgtttgatcccataaaacccaagtaagtaataaagagagccccttcttagctgttaatgttggggaagttactttgcctcaaggagttttagtttcttcagttatgaaagagaataatgcttgcatttgttttcagaatgaaatgatataatttgtatatcacgtggttttgtgtttgagtatgtttattattaactagatatgtacctgtattagggaactagtgggttaaagcatctaaggagaagagggacccaaatattcatcttggagattacttttgaaaactctgggccctgggctatgttttgagaaggatcttaattatataattaagaacgtttcaagaacctgagacagtaaaaggagttttgtaggctctttaaccacccgtgtcttggtgatttctacagactggagcctaaagctgttatctatacaagtaatacttacatatcttctatcattcattaatatggtatgatatctgcactgtaattccatcagagttgaaatactacttcctagatttccttgggtcttgcctttctgagacgtaagactggttaccacttggcatcacaaatgataaatctgcatttgtgccagagttgaccctgggatcttatgtttaatattagtatcttgttcctgagttgatggttttgtttttcagctaaaggcttgtctttaatgctgtctttattagggcctctcaggacataaataatacgaagacctgtggcttatatttaactttgtatatctaagggaacattattggagaaacagctggatttagaaaatcattagactgagaatacataccagtatatccacttttaattacatgaagaatttatggactctggttgaggccatacttgatacaagcatttctgtggttcttagtgagtcacattttgatacagttatcttcaccagagtccttgaattttcatcacgtttattgggaaaacaattacaatatggctaagtaagctaaatgtaaaaatattaacactcttaatactaagagtttatgccaaggaagactctttggctctgtttaacatttcttcaagtgagaactttacaaagggacttatttctggagtgacctatctatatttacccttggaatgttggtaatagtaaaaatacttgggttaggttgtggagcaatacatggaagagttaaaaccttgtgagacagttactttttatttatttttgagacagggtcttgctctgccatgtcagctcactgcagccaacctcctgggttcaggtgatcctcccgccttagcctcctaagtagctggaactacaagcacaagccaccatgcctggctaattttctaatttcttgtagagataggagtgataggggtctcactaggttgcccaggttggtctcgaactcctggcctcaagcagtcctcccaccttggtctcccaaagtgctgggattacaagtgtgagccaccatgcctggcctgaccatcactttttatatcaaactaattactttcccatttgttttaaagtgtcaactgtcttgactctaatcttgagtatacccattttcatgtatgctcgtgtgccaactttttgtttggtttgttctaaatgagattattttcaaaggatcatatcttggctttatttagttatacaaaagaagattgacaaaagtaccttgtgtgctttgtaacctttctgggtaactccttaaatgaacatacaagggtgcttgtttggccctgaattcagatttaatttgttaggttggtgttagacctgcttttttaagctagttaacttttagtacttttaatacaatgaaaaactattacaagtggagggtttttaagatatgactcattgtgattgtcacatagtctggactgaacatgttggtgtgagatggctgctgtagaaacagtaacttctaccttattcctttggtaggtggaacagttgcagcacacccatgaggaacacagattttgtgtatgtgatggtgttggctcttttcttaaggagaagggtgcagttatactatggttggcattctgtggcatgtttgcatgtaggttattttccattgtcactgggctggctgctgtctctaagccctccttgcttcctgaaaaatctgctattgactatcagtgatggtggctggtaaatgtctctaccctcaccattcacaagacttaagaccaaacaggtagctctcatacccaaccttcatcttgtcatacagactaaaacttcataagccactttgaaaggattgccactcctggtatataccaaactctttctgaatttgttttctgctgttg

SEQ ID NO: 80338 - DNA, 1741 bp, Homo sapiens
acaccgcgttggcatctccctggtgtggtccccatagttcctccccacacagacgatattcttcccccacccccagaagcgggacggtggcctgggggtcgccatgattcctgtcaattgcctagagaatatattttaatatgaggatattaaacatctctatataagatattccttcagagaatttaggatttggaagaaaccttatagtcattaactgtaatgttgcattttgtggaaaatcctgttggtagaatccctgaaggatggctgtttaaccttcccagaaatactgctattgaaagagagcctggaccatgcatagacagctctttatattgagccacaaaaatttgttatttataatttctatctagtagttgtttgaagttgagattttataggcaaacagaacacactttagctactatactgttgttctgaaatggcgtctatgtatttttttctgtcaggtaatattaatcagtcactaatgacgctaagaacatgtatggatgtcctaagagagaaccaaatgtatggaactaacaaggtaagcagcagccttctctgttcttttgtatagtttcatttgtgtgcattttttttgcgtaacacatttggatatgaatgtctttgtagatggttccatatcgagattcaaagttaacccatctgttcaagaactactttgatggggaaggaaaagtgcggatgatcgtgtgtgtgaaccccaaggctgaagattatgaagaaaacttggtaattttaatgtatttgtcctataaagtcttgagtttttgtcgggaaaacagttacttggatgagcagaatgacattttgaatattttaaaaatggatagagaaccattgattgtagaagtaaactaggcttggtgtggtggcttatgcttataatcccaacatgttgggaagctgaggtgggacgatcaattgggcccacctgggaggtcgaagctgcagtgagtcgtgttcatgccactgcactccagcctggtgacagactgtctcaaataaataaaaataagcaatctttgcttcatttagtaatttctgggacttggatatccttatttttttttaaactccatttgttttgtgttttagcaagtcatgagatttgcggaagtgactcaagaagttgaagtagcaagacctgtagacaaggcaatatgtggtttaacgcctgggaggagatacagaaaccagcctcgaggtccagttggaaatggtatgatttggtgttgtatcatttgtccactcattggtctgtctgtttctctcttttttaaaaaaaattatttcatttaagagaaatgtttacataccttctgaagaaccaagcacataataatttgaacaaaatttaaatgagcttattttgcatactatgattcttaggtaagtaaacttatgtcagctcaagaaattgcaatggttagttgcactggggctgtatgcagtgttaaacttgtttaaataagctctttctctcctatgtaactttttgtaattttctataattcaatacagaaccattggttactgacgtggttttgcagagttttccacctttgccatcatgcgaaattttggatatcaacgatgagcagacacttccaaggctgattgaagccttagagaaacgacataacttacgacaaatgatgattgatgagtttaacaaacaatgtaagggcaaaactatttgaaataattt

SEQ ID NO: 80339 - DNA, 1076 bp, Homo sapiens
aaatttccatactgaaatgaaatttgcccagaaatattaattaactcgcctaagtcataactagtaagtgatgttccaaggatttcagctcaggtttaattaatcccaaatagtagtgttgtttctatttttgcgtttgttgttgtgaagcaaagtacctgtaaggattgggaagagaatgctatagtgcacagtgaaagacttgagtattttttcagcatttaacagaaagcttctgtgaatatcttgtcaactggagaatgaagctcctgatttccctctaaacttgttttctcattatagactgattctcacagagatttgctgaataactacattttatctagtgtctgctagcaaaagttgatatcattgtttgttttagaactggtgtaaaacttgacctgtatgtttttgtttcagctaatgcttttaaagctttgttacaagaatttgacaatgctgttttaagtaaagaaaaccacatgcaagggaaactaaatgaaaaggagaagatgatctcaggacagaaattggaaatagaacgactggaaaagaaaaacaaaactttagaatataaggtttgttttgacattattatgatagatgtatgtgctggtgttttagcactgttctctgagggagatattgtgctccaacggcctgtaaatgctgcttattaagagttctcggttgagtgcggtggctcatgcaggtaattccaacactttgggaggctgaggtggccagatcatctgaggtcaggagttcaagaacgagcctggccaacatggcaaaagcccatctctactaaaaaagtacaaaagttagctgggcgtggtggcgagtgcctgtaatcccagctactcaggaggctgaggcaggagaatcgcttgaactggggaggtggaggttgcagtgagccgagattgagccactgcactccagcctgggcgacaagagcaagactctgtctcaaaaaaaaaaagagttctcaggctgagtgcgggggctcatgcctgtagtctcagcacattgggaggccaaggcagggagatcacttgagcccaggagtt

SEQ ID NO: 80340 - DNA, 4050 bp, Homo sapiens
ggacgtaacagatactcagtaaagcttaattggatctgtatttggtttacaaatcgattgtaaaagtataaactcaggattaatctcttacaatggggtagaaggaaataccgttttgttgggaagcattgcagcactgtgtaatgtatgtctgttctctcatttacagagggtcatttagaggtttggtgggggtacacattcataagagaagttagtctcaaccaatatagtttttttaaattctgaaaatagcctaaaaactaaattttagcccttaattttaggagaaagtaattttcacatgaagttagttgtaaatgtctttgggtgaggagcttgtttaacatgttttcatttctgagaatgggggtgggaattcagatgaaatgttagagaaaaaagtgctttctccatgatgtttctttccacaaatatgcttgcataagcaaattaaggaagactattttatagcgacatgaaatgtttatataccaaatattgaacatagtggtctaccttcctagattgagattttagagaaaacaactactatctatgaggaagataaacgcaatttgcaacaggaacttgaaactcagaaccagaaacttcagcgacagttttctgacaaacgcagattagaagccaggttgcaaggcatggtgacagaaacgacaatgaagtgggagaaagaatgtgtgagtatcgtttgggtagtgcttgtctcagagtcggatgatttattttacattgtagttaggttcgatattttgaattattgtatttgcggtagggttttggtggtggttgttaactctcaggaagaattggagaactgtcatttttaggaaataaagagattgggtaatctggtgtactcgtttgctgtgatggaatgataatatacattgccactgataatctgtaggagcgtagagtggcagccaaacagctggagatgcagaataaactctgggttaaagatgaaaagctgaaacaactgaaggctattgttaccgaacctaaaactgagaagccagagagaccctctcgggagcgagatcgagaaaaagttactcaaagatctgtttctccatcacctgtgcctgtaagttatttgtaattgtgtagtaactttgtactagagaaattttgttcagattagatgactatttctatgaggatttttacattttataatacttacatttctgaaatttctctaaaaatattttaaaatttagaataaacacaaatttagcacaaaaaaatagaacaaataattatttgtaatgttaagtcttcatgtgctaacattatagaaaagtaatgaattgtttctctcagtttttcagtcttgctcattaatttttctccaatttttctagctttctagtaactatattgctcagatttccaacggccagcaactcatgagccagccacagctacataggcgctctaactcttgcagcagcatttctgtagcttcctgtatttcggaatgggagcagaaaattcctacgtacaacacacctctcaaagtcacatctattgcaaggcgtaggcagcaggagccaggacaaagcaaaacttgtatcgtgtcagacagaaggcgagggatgtactggactgaaggcagggaggtggttcctacattcagaaatgagatagaaatagaagaggatcattgcggcagggttagtgccagtattattttaacgcattgtagcaatagattttatcttctttgttttttgtaacttgtgtctgaaagttcattggaaaaatggttgggctatagtataaagaaggtctaatttctcagttaatttgaaagattgacttacggaaattgaggcctggctcctcatctgaaaaagcctaaacacatctggcagcggaagtgtgttcagtgaacacaggtcagtttggtgcatcccagagtagtctgagcttttcagctgcatacgctaataagctttgcacagaattggtgaatgtgtcttaaagcatactttccatatttttcttttggttccccttccccaaattagattttttatacctcctttcatgccctagttttaaaaattgttttcccaaatttttattttgaaaaatttcagacccaaagcaaagtagaaagaatagtatggtaatgtctttccctccttgcctaagtttaccaattgttacttgatatagatatgtaaacctttttcccctaagccttgtgaaaggaaatcacagacttagagacacttaatctctaagaataaggacattgtactacctagccacaatctttatcacatccaagaaaatcaacattaattaattatcctctattgagacattgtgcagttgtcccaaaattggattggcttttctttttttttttttaaagacagagtctcactctgtcacccaggatggagtgcagtggcatgattatggctcactgcagcctcagtcttcctgagctgaagtgatcctctcacctcagcctcccaagtagctgagattacgggcaggccaccatgctaattttttattttcagtagagacaaggtctcaccatgttgcccaggctggtattgaactcttgaactccagcaatcctcctgccttggcctccaaaggtgctgagattacaggcaagccactgcaccagccagcttttttttcaatccatgatactatgaaagtgtatgcattgcatatcatgattatgtctttcatctcttttaatataaaatagtctcaccctgtccccctactttttttatttttatgacattgactattttcattgaagagtttaggccagttattttaaaattactgatttccatgcccaataaattgcttttaatcttgaggcatttatctcaatttacatttgcctcattcaagggtatttaaataaattcactttcatatttttcttcttaaagattaaggtaaagtttcttttgaatctgaataaatggaccaagttaatgtttgcgaattttatatttagtaaaatcttcacaaagctctcttagaatatttcttctaaatcttacagtaaacatttactttagattttcttatataagtcagggtatagatgaatgttcatttatgtggcctgaattcctgattattaagggatggtgatgaatcccaagttatttaccagggaaacagatgattctaaagtctcttaagttctttactttgcagatttttccttaaacatttttagacagcaaattaggtaaatggtcattctgaccaactctagtcagtcattttatgaaagtttataggctgaaaactattcaaggcttgcgtatgccttgcaaaccgtaatgagatatctaatttggctatgagatatttaagggaatttactagagattcttacgtgaaatcaaaatctctttagaagtgcagcagaaaagttactgtaaggttagtatctgtgcatctaagtttgttggtcaaaaattatgtcaggtggactgaatttatacttcagtgaggaaaaaatttaaatatttgtttcataaatgctagtagattgtatggattatcatctttctgaagtgtgtttcatcatatgcttattgttaaatgtttgaagaaaacctttgtttttgctaaatggtagatgataaggaccagactttctttcgtgttcaacattaaataaatcattgtaggaatggaaagttcctgtttgtcttgaggctcagcatctttagtggcaaactgtattgcccatgtcttagagctgtcactagtgctgcatttgtttcttgttaactatatagcgaaaatgattcagttcctcagatgtgcattttgaaattgaggtcttcatacttgactagctttgacagatttggcctgtgatagactttttccatttgctttcagttttgttttttgggttttttttttttttttttttttttttttttgagatgaggtcttgatctgttgcccaggctggagtgcagtggtgtcatctaggctcactgcagccttgac

SEQ ID NO: 80341 - DNA, 4652 bp, Homo sapiens
atatgtgacatattattttcttaggctgaatgtgcttaatttagcattcccaggtttacatgacatttgactggaagcaacttgtttgtttttgaggcagggtctcattctattgcccaggctggagtgcagtggtgcgatcttggctcactgcaatttccacctcctgggctcaagcaatcctcccacctcaacctcctgagtagctgggactacaggcacgtgtcaccaagcccagctaatatatatatatatatttttgtttgttttgttttgttttgtttttgttgagtctgggtttcaccatgttgcctaggctgaacttgaacttctgagttcaagtgattcctccacctcggccttccaaagtgctgattacaggcatgtaccaccatgcctggcctagcaactagtcttttattgtgtgatagagactgatttgacactgtattatttatttgtttcttggaacctgtatgaaatgtttgggggaaaaattagttggtatattgtagccattactgtatttgaacttttcatgaagttctattatgagattttaaaatcttaactgaaagcactcagaagtatttcacatttctttaatcattttattcatatggttcttattatacctatgttcttaggattgttttctgttttgtttagaagcctagaaaatgtgtagggctttcattgatcttattgaagattttaacagagttgtggacataatagattacctctcaatagcagggataaatattggtttttgatcaagaatatgaaatgagttgtttgtcctgaaccacccccaagcaggaaagacttgcagcattaccagaattttttcttttatcctttattgaaagggaaactcccagatagaatgtgtaacatacaagttggtgttaaagatgtttgttggttttgtgtttaaatgcaaagatcatgtttaaattacttgaataaaatatttagctttggaaaggtttgctatgatactgtcatcaactaatgtagccaaacctgctgcacttctaataatacccttaaattaattctgggttatgcttgtttctcagttactctttcaacctgatcagaacgcaccaccaattcgtctccgacacagacgatcacgctctgcaggagacagatgggtagatcataagcccgcctctaacatgcaaactgaaacagtcatgcagccacatgtccctcatgccatcacagtatctgttgcaaatgaaaaggcactagctaagtgtgagaagtacatgctgacccaccaggaactagcctccgatggggagattgaaactaaactaattaaggtaaaaaactaattttcacaggagaaaaaaatatatttaaaaattcaacaaaagtccatttgtcctgctactcctttggtgacacacaggtagtgtcaactggaacatcagtaggtatttgatataacctttttgttagcagaaaattagtcactgcttaggttttaagtctgccaaactgggactaagtatgctttaaataggtatagattcttcggtttcttagaattctagatccatgatgtactttaattttttaatgactgtatatttagttttaaccactacttaaagtaatctaagcaaagaattcctattgctctccatcagttcaagataaaaaaacaaaaacaaaacaaaacgaaacctatgttaaaatttgacccgtcaaaattactcagtattgagctgcctaaagccgttttccagaaagagacttgcctgactatagaagaattcccctttgatcatagggtcagtgaataatcaggaaagtaaaagataagaccaaaaaaaaaaaaagctttttatttcaatttcaatttagagtttttgttcttattataattagctacaaataagactatactgtcatttgaatatgggcaacagggggcactcagagaagaaagtaccatgccttagagcgtgtagaaacttccagcaaatttcttgatccttagtgcagtttagtttttaaattacagatggagcaaaaggaatatttttttctgcaattatgaatgttactgattacattgaattggacttcttttatttgtgagagatatgtactcaaatttctaaattattttgatagtacgtactcagcaagtaccaagtaccatctgattttgtggatgggaatttctataaaatagaatcatgagaacagtttgaaatatatatgtgtgtttttcgtttgggtgtatcaatgtgtaacagtgaccttttcttttggctttagggtgatatttataaaacaaggggtggtggacaatctgttcagtttactgatattgagactttaaagcaagaatcaccaaatgggtaagtaaccatcaaaaatctctgtataaaagttggtcattttcttagctgctcattttggaggaacagaatagcctgtgaaatgtatcattaattctccaaagggatgtagatagtattcccctacttctaatatttttcctcttcttagatggaaaaataattgttgcatcatgtttcccctttttcagtagtcgaaaacgaagatcttccacagtagcacctgcccaaccagatggtgcagagtctgaatggaccgatgtagaaacaagggtaggggaaaaattaaatatttgtctgcctactaaaattaggtttgtcatgttttaaaccccacagctctagatttttatgctctttgaaaatgctgaggtataatctcacattgccagtgcaccatgtaggcctattcctagaataacaagaatccacttcatcaggaactcccttgcaagtgttattcctgaggagaatctcttggaaagaacatgggaaggtaggggtcaggaggctaagctatggccttagccaccaactctctttgcaaacttatctaaaatgagataagttacctggatgacctaaagacctttctggctcacaacatttgtggcctgtgccagaaataaattacgagtgactggtgttttaacgtaagagtctttgctgaactagaaagcaatattgcatttcacctaggtgtggagcctgctaaataactgtgttttatagactattgagaggagctgatctttttcctcttgtcattttcctctcagtgttctgtggctgtggagatgagagcaggatcccagctgggacctggatatcagcatcacgcacaacccaagtgagtactgactgtaattggggtcttgctgtgtgcttttttcctcctctggtctttacattatcactccttctaccagccatccacttattcttcagaagaaatatatggttttggttttccccttggactatctgggcctccatgggcagactgcagtaggcagctggaatgctgagagcctcagaaggctggataagagcaatcagagctgcaaggcaggcggtggtggaagattggtggctcatgttcatattctgccaacgctcataaagctttctgaggctgaactgagagtacctctaaggagggaaggctaaaggcttaagttggagactagacagctttgtgtaaatcattgtttcctgacttgcttcttggtcttggtgtagcaataggtgttcactaaaataaataacactgaatgaaagaatttatagtagggaaggaatcataccttttcttcttctgttaaacttatactcaggagtctgacccagtctttttccatattttaataaaatcccttctttacaaatacatacatatatgtatatcacatgttatatacatatatgtatataaaatgttatatgtatataacattttaaacatttacataccttactgagcaatttagaaaattgttgcagcaggataaagatgggaaatcctttctaaatttaatactaagataagcatattttataaaagttgtttgctttctcagagggacttgaattatctcatcataaaacagcagttctcaaaggcctcctaaagattgatttgctatgaatgtgttactaattgcaaagttcaactctaagtgctggttgttatgttttaggcgcaaaaagccatgaactgacagtcccagtactgaaagaacattttcatttgtgtggatgatttctcgaaagccatgccagaagcagtcttccaggtcatcttgtagaactccagctttgttgaaaatcacggacctcagctacatcatacactgacccagagcaaagctttccctatggttccaaagacaactagtattcaacaaaccttgtatagtatatgttttgccatatttaatattaatagcagaggaagactccttttttcatcactgtatgaattttttataatgtttttttaaaatatatttcatgtatacttataaactaattcacacaagtgtttgtcttagatgattaaggaagactatatctagatcatgtctgattttttattgtgacttctccagccctggtctgaatttcttaaggttttataaacaaatgctgctatttattagctgcaagaatgcactttagaactatttgacaattcagactttcaaaataaagatgtaaatgactggccaataataaccattttaggaaggtgttttgaattct

SEQ ID NO: 80342 - DNA, 1054 bp, Homo sapiens
cccttactctcagggtcagcgccggctgggaaggccgcgacctaaccaggagattacgaacaatgtcaccagggccacagcggagctcctgccaagtcaagcaactcatggaaccaacggaggcgaagtccgaatacctaggcaaccctaacctaaaagtgtttttaacgttctcaggtcctataatttacccaaataaagtgggaccgtatttgcaggcgctgagaaactttctcaacagtaagaaccaatcaggcgcagtgcgcaggcgccttcagtgggtcctgggtccgcctcttccgcccggtgcgggcgccgattggtccgcgtggacacataagaggctgcgtataggcgcgagagcccctttcctcagctgccgccaaggtgctcggtccttccgaggaagctaaggctgcgttggggtgaggccctcacttcatccggcgactagcaccgcgtccggcagcgccagccctacactcgcccgcgccatggcctctgtctccgagctcgcctgcatctactcggccctcattctgcacgacgatgaggtgacagtcacggtgagtgcgggcgcgggccggcggccgggctgcctgtgggcggtgactttcggctctccatgcggttcccggctccaggccgttcgactgagcacttccggccggggccaggccgcgaacacaggccgcatagggcgggcgctcctcggggctggggcctctctccgggcaggtcctgggcccccgggaccacgtgcgggcccagcgggcatggagtgcgcttgaggctgggcgctccggctccaagagccttcgtgtagaaaagctcttccgcagtgcttgggcaccctgacccgtgcctcgtctctctcagggacacttactcggacctctttcggtgtaattgccttgaattcccccggtcgtggaggaaggcgcccgagctcggctccacctcccaggtcttgtaacttaaaaatagccgcgtgactcaggcaagtcccagcccgtgaaacagcagtgatgggctcgcctcattgcagggcgcc

SEQ ID NO: 80343 - DNA, 1085 bp, Homo sapiens
tggcacctctccagcgctggcgcgtgaaggtcgcaggcccacagttgagctttttttttttttgagacggagtttcgctcttgttgccgaggctggagtgcaatggcgcaatcttggctcactgcaacctccgcctgccgggtacaagcgagtctcctgtctcagcctcccaagtagctcggattataggcatgagccactacgcctggctaatttagtagagacgtagtttcaccatgttggtcaggctggtcgcgaactttgatccacccaccttgccctcccaaagtgctgggattacaggcgtgcgccacagcgcccggccgacagtcgagcttttagagcccgcggcgcgcccaccaacgcagggccgggaggaaaaggcgggccgagaggcggggctggaggccgagtgtggccgagggaagccgaactttccagtttcgctgaggcctgttaaccgctgggggcgccttcgggacagctggcttctgcgcatgctcttgaccctccgtcccccggaggaatgtcttaagtcaggagctgattagtggttgaaggcagctgatctgtttcgaatcctgtgtgtccggagaggccaacgctttcattagccagcaggaatgggctggggcgcgtttgtagttgggaatcctgagcccgggctgttgcttggaggactcgggagcagcagtggatttcggcgttaccaggagaggtctcgagcaccagatccctcttccttcacttcccagtagtgggttctagccgttcccagcgccttcatttccagaaggcgattttacccagagaaaggagagggaagatttgctctacctttggcttcttatcaaatagctaaatcacgtgggaagctggtaaacaaaaacaaaaatgaatgaaacaaacaactaaacagcttgccgggcccctccaaggcccaccgaaccagcccctcgaggcagccaccgggaattttcataagctcttctgatgagcgggaggataagtcagtcagggctggaaactcccggatcagagcaaacccagctcctcagcacctgaggagaagacgcgtagtcaat

SEQ ID NO: 80344 - DNA, 2516 bp, Homo sapiens
ctcatcaggctgtgggcctgagctgctgacgccagctcctagcttggaaatgcttcttcctatttgtaaactcggaggagaagctcttgctaaagcgtcctgttctgatcattatgacttactgtaaagatcacgtgggagactgttactgagcttttccttatggaaaagcaggtgggaggggagctctacctgaaaatgcttcatgggtgctttaaagcctcccccacctcctcttcaccgcactgtgctccaggtcggagcatcagagaggggcagaggagggcaattgttgccgagagaaccgagatggtgttgagcactggaaaatgaattcctgtcttttttctccctgcaccccacgccttcctgctgcttctcctcgtcttcctcctccagtctaaagaatcctcgtctgtcttgagttgtgacatttcagcggatgacaaatacattgtaacaggctctggtgacaagaaggccacagtttatgaggtcatctactaaacaagaactccagcagggctgtcaaactctgggagaaaccgactcggctctgacagggagacccccaggcgaggggccccgaggatggcggaggatgggccgcaggcagccgagcgttcagggctgcgctccggccggctgagagggcacgtgccccgtcacagtctggactcctgggcctggattgatgtgtctcacagactcggaagggttctgctcctcctcctccccctgaacaatgctggcagttgctacaaatagatttattggaggcttatggctccggttcccccacagacccgctcatgagtctctgtttgttcttcccttttcttttgccctgtccctcaccttgggtcgggggtgctggagtggaccacaatgttgtgctgggggatgggggggtctctctttgccgattgtgcagtgcacaagatttgtgaaaaatgtaaataacagactcctattgcggactgatcagtgggagaggaggccccttcccaccggaaactctgagtgtgtatttcgcctgctgtatttgtaatccactcgtggtggtggcttttttttttttttttttttaaataaacagatgctctcacctgggaagaggagacagggaggggaaccaattgaagaaagaggagaaaagtcttagagtgtggaaaaggcaaccaggttggccgtaaggtgcctgctggaatgcgtgtgcctccacacgggtctgggcatccggactgataaccagccggccagactgagggatggaaggcactgagatgggggcccgtccaggcggacacccgcagaaatggagctttctgtggtctcttgcactctggctgcctcttgccctctctgtgtctctctttcttggtctctccctctctcctcctcagcctggtctttctctttggtgcacacttagttattgttgtgagcaatggaagttcaaaggaactccctctccagctcttctgaatcttgggacacagcctaaaaaggacaaaaagttagaagacagcatagcaactcagctcagggagctaccagagaaaaatagcaactgatgtgggtgctttttttttttttttaatttgaataaaaagaattagaagtgatgtccttttataaaatgccttctcccccttcccgcctacagtctcttcctctccccttagaggggggaaagtgtataaacctacagggttgtgagtctgaaaagaggatccccctcacccccaccctgggcagagcagtgggggttggggggtgggagagggggacacagatcctggcacactgtggatatttcttgcagattgcagtctcttgtggcccaaacaggttaggtagactatcgcctctggcaggtgccaccttttggtaccaacatgttctgaggtgttaggatttgggttgggttttttttgtttgttttttttttccttttggtctttttttttttctccttttaaagaaaagctaaaggccgctgtgagtcctggtggcaggctctccatggatgtagcatatcgaagataatttttatactgcatttttatggattattttgtaatgtgtgattccgtctgctgaggaggtgggaggggctccagggaaagccacccaccttcagtgaggttgctccccagctgagcgcaccgggcatgggatgtggaggctggcgacacaccctgtgcctctccaaggctgggcgcgtggggcgtccagagtctctctgggtctcagatgtccatctgccacctcttgttaaggctctagccagaagggagggtgagggtagaagaaagttattcccgaagaaaaaaagaatgaaaagtcattgtactgaactgtttttatatttttaaaagttactatttaaaggttggtttgattgttgcgtcttaattgcctctccccccagtttgccagtcccgccccccgccccccgggaaaacagccaggccactgttgctgtcacattctggagcctgggccagggc

SEQ ID NO: 80345 - DNA, 1034 bp, Homo sapiens
tctccctccagaacagggacaattacatccgctcctgcaagctgctccctgatgggcgcacgctcatcgtgggcggcgaggccagcacgctcaccatctgggacctggcctcgcccacgccccgcatcaaggccgagctgacgtcctcggctcccgcctgttatgccctggccattagccctgacgccaaagtctgcttctcctgctgcagcgatgggaacattgctgtctgggacctgcacaaccagaccctggtcaggtgagccggcaggagggagcattagtgcctcgtcctggggaagtttttacccatcctgcctggtcttgtttgctgtgaccttggccctgtctgaggcactgtggggtggccagaaccgttgggatgagggatgcacaggtgaaaagacagctccgcctgccttatgcgagggacagaggagggagggccattgggcccaggagttggagagggctctgggaagaaagtggagctggagcatgtctggggaagtggaggtcagattagtggagcaagcagagagtctgggagcagagccccagagaccagattagggagacccgactgggaagccacatcacgtggtagctaaacaagcctcaggacaaaactgctggctttgaatcctgcctccactatgacctagtgcaagtcgctgaacccctgcggctcagtttcttcctgtgtaaaacagtgacagtggagcatcttcctctgactgtgccgcagcgcaaaggcagacgggtgcctggcccagctgactcttgtatacatgggctgtgtgtgttattcagcgtgttcatggatggcctcagccccatagttcatgcaggatgaagagatagattaagagggcaaattgagggcgtgtggagtgcgagttaaggagctgtgtcctaaaggcagtggggccctgcattctctttatcagtcatctcacacgtagcttccccagggccttcctgccttcctcaccttcctgagcctccagctccacctcctccagaggcccacc

SEQ ID NO: 80346 - DNA, 1819 bp, Homo sapiens
tccctctgggtctccatatgacctcctgtgttgcatggggactgggacctgggatggcctgtccttttcttccagctccatcatagctggaccatgagctcctggagggcagggattgtatctcattcattctgccactcctggcctgcagcaccagggctgacccagggcagctgctcggaaattggtgggtgggtgaaggtaaagtttggactcttagaaaggagtaaacctcaccaatatcatagaggggcattggtcctgatattagtctctgggcacagaggtttgctggcaggtgcccttgccagttgcacttccctccctgctccccagctcggtggtaacagccacatggtgatttctgaccactatcaacccctaggactactccgtcatcttccctcttcccaggcctcccatcccaaaggcttctcatcctcatttgctttatagttgagggagaactcacgaaattttggggttccctttgtgccaccttctgctaggggagcttgggcacattcaccaacctcttggggtctccacttggtgatggctacagaggcagtgactgtccctgcccttgctcctttccctgtctgtcagagggaaaggcttcatgacgtggcatttttgttttttttacaaccctggtgtttctccagagttgctgacagcctcaccgtggaggcgggggtgttcacacagaacgcttggctgctcatctccactgggaagttggtggctgcctgacgccctccttccctatcaatctccccattcctgtcgggctcagcaaatgaagtattgctcatggcccctgcctgtcagctcagatccatcttacaagactcagtgcaaattccacttatccctcctttgagcaaatgagtgtggcaagcgcgagatgggtggtgaatgagacccaggtgaccctcgccctcacagagcgtagtcccacaggccagaaggcagacggcttactgcagggttaattatttaatagcagtgcagagctgcaaaagagaattggggatgcgcccagggcatctccccggggactcagtctcaggggagtggggaaggcttccctggcaaggctctgatggagccacgatctgcagggcagagaggagttcagcttctcttccctcccctgacctccgtgtcacctgcacttagctgtgtgcggatgtgtgaattgttacacgcagcagaaagttttaaccccgaaccctctttttccttccagaataactctgtgtcaccctcggaaagcctccgggccagtgagaagcaccggggctctgcggactacagcatggaagccaagaagcggaaggcggaggagaaggacagcttgagccgatacgtacgtccaaggcgccatggcaccactggggtttctgttgggtagggcagggggtgtctgcagggcccaagctgtggccagggtcttcttgtggttggcagtgagtcagagaagcacaggttggcgataggggaccctattgaggagagcagggtgggaacagggctagggtgaagttcacacacgctatgagcatgcgagccactgtggggcggaggtggatggggaggtcgtcctagcctccatggggtctcttcccacagacaggccaacaaccccatgctgctgtcatggtgctgccggaatcccacttggctctaaggggctgctcccagtgacccccaaaatgtggaccctatagtcctctcagttggcctgaggcatgcactcacttggccacccagtcatggcttttactagccttttaatgggatgcccccggca

SEQ ID NO: 80347 - DNA, 1581 bp, Homo sapiens
ctgtcataaaatgggagctgctgtcgtcacctgttgagagtgaccttcagttgtggaagcccttcctctctccaggctttaggtctgccatttgtcaaatgaagagcttgggctaaatgagctctaactccgtttcatatgagaggtgatactctgagaggtcagctgaccagccctggatcttccattgcgaggggctttgtggagtctctgggctaaacccagggctaaggacccaggtgtcccatgttcagggccaaggtttttaccacccccctgctaggatgcctcctgtatgatcttgcatcctcctcattcccttcaaacgcctgcagtttctccctgctctgggctttcactcgatttaagaaagtgctagcaggcgagcattaaggccaggccgcctgcgtgtctgccagctctgagatttgttgtaaatctttctgatcacactgaggctccgaggttctgtttcaagtgaataagccttctgaataagcgcagtggagtctggataaaaaaaatcctccagcgattagcaaagctattttattcctcatcgctgtccttgtatctggggccatctaatctgttaggatggctttggttattacctcgtgttaagtaggacttggaaggtcaggcagttaactaaccatctagacagcagcttccttgcgcagctctctccaatccagccctccttcccttcctggccctccccctacccaggctgactttttaaacctcccattagcagtgaggctggcgtccgtggcctcttgacccgcctacatgctcagaaatccaggaccacatttgggctgaggaatggctaggtacctaagagaggagtcattgaagctgaaaatccatgttcactgcctcggtactgatcctctaacagtggcattttttcggagaggcagtttgcctagataggcggaggcctggattggacattttaaggctgaggtctggtcccagctttatgaggccctgtgtagttctcttggcctctctgagcctcagtttccttatccataccatgggaataattcctgcttgaccaacctctcagctttgtttcggaagaccctttataacctgactgaggatccagattacctggctagcagggacccacttcagtggaattggagggggagtgggaagcccagcactctctaaagagcatgagtctttacctcatcctcatccctattggcttctggctttgtgccccatctgtgaaagttttctgctaaaagaccccccctgggaacccccaagagctgggctgtttaccatgctcgctgaggtccatgcatggcacacatgggcctcaggaaactccagtgggaatgaatcaagatgctgggcagaggcagcagtgggcagggccgaggctgtgcgcatggcatgtggcgtggtgacggtgtcagcggcggtgtagactgaaataatcaggctttggaaaccaggttgtcaacagatgaggcctacggcaggaaggacagggctgtgtcagagtgggaggggggatggggggacgggctggaagctgtcccagaggggtta

SEQ ID NO: 80348 - DNA, 2157 bp, Homo sapiens
cctaacttctctttcagtagtggagaagaagttgggtggggcgaagggagaggaaagagaagcccaagcccctgaggctagtgttgagtggggaagttgggcctctggagccagggcagcggagtccttgactggggaggagacagggagaattgcattgttgttgataatactgacttgctgcatggcaagtttttagaagggttcagcaatccattttaaactctttgtaaatgttagctactgccatgaggcttagtagctgtgcgccatgagctgctgcaaacattatcttacaataatcctctggggtctgctgctttccccctttacagataaggaaatttgaggctccaggacttgaagtaacctgccccaggccacacagctaggaagtgccagagctgggatttcaatcctgttctgtctagttccaaagcctccactcttccagttaccccgttttccaccactgatgtccggtgacgttagctctcattccactggcccccagctcatctggctctggggcctttgctgtgatgacctgccctgcccctgctctgtaaggcaggcttggagttcctaagaaataaggagccttccccagggtccagcctcagggtggaagatgctggcagctaatgctgaaggcatgtatgcatgagcaaacactgccagggctgtgagcttaaaaatggatccctctctactcagagggaaccccatgactctgcggttttttaaatgcatgcattctttatctcaggcttggaaacaaacattgagaaattatttgtgaaacgggggtgcagggagttggggggtgcttgaagacataaatctttacattacagtctattaacagacttccttcagcgagacattcatgtgaactgagctgggggcaaaggttttgggggtgcttccccctgccacccacccagtgaaggagcaagaggaatgggaagagccactccctccctccctcctgaggtggccacgcctcccctgccctccccaactcagctgtactcaccaccgacttcattgcagcagcagcagctccaggcgcagcacctctcccatgccacacacggccccccggtccagttgccaccccacccgtcaggtctccagcctccaggaatccccccagtgacagggagcagctccgggctgctggcactgggcgccctgggcagccaggcccatctgacggtgaaggatgagaagaaccaccatgaactcgatcacagaggtgcggctgggctggggcagagggtggggcggggcaggggtgggcatgggcgctcataggcctcacagtgagtggacccagcaagtgctgtcgtcctaagaccaggagttaccaaggatttggagtcatctgttgatacctggtgcagggaagccaatgccatccgcatcccatgcaccttttcctactccttggtgtggacctggtattctctgtcctgaagaccctgtctgttcatctggagctcgctcccatcttcctacaacacccttgcctgtccttcaggggccagccccagtccaacccttcaggatgccttcctggtcagactaggggctttttcaagttcctgtaagagtttaagagttgggatgccaaagttgagtccttgttactgtcgtcttacatcctacccctggaaaatgtcttgtgctcaccacgatcattagttccctaggacaggtgccaagttcttgggtgttttccttacatctatgtctcaccaatgcagaaacctgggaaaggtgcacagtcagtgctcaggtaaaggtttgttagctgactgcctgtaagtgggggtagtgcacaccccagcaagagatcacatagacttggagtcagaacttgttctctgaccctctctgcagcccctaccatgaggacccatgaagctgcaccgagcttggcctcaggagtggttcattggatcagaaaagagaaaagcctggctccctgggaggcccttttcaaaaattggtgccaaatgcactctgcccttagatacggtatttactggggcacgtagccaacaccttctgagcactagggacctggaatgtcaccatcctgccttggcccaggccacagggtggtagccggtccagggaactggaggc

SEQ ID NO: 80349 - DNA, 1038 bp, Homo sapiens
gctgagcctagaaggttgggtaggagaagagacctttcctggtaagataagagtcagggtgcgtggagctattcaactccatcttgccttgggtacaaatgttcagtgcacattttctctagaaacagacttgttcatgaaaggagttagctgtgtctgcaggcagcaaagctacttctttgaagccttctttcccctcctcttctttgtctcttcctcaagggatcttattggctctgcactataaaatgtggattaaataccttgctttcagtccttgctttctgggattttactaaatagttatcaccagcagaattaacgggcctaccaacaatttgtctaaacaaaggggccctactggagactcattttaaaaccaggtatccagataaagttgtattgtccgaccacaccagggaatactaggtagccattaaaaaggacaagaaaatttcttcagaacattcctaaattaaaatcaagctgtatagcagtatggttcacaggagtccatttctgtataaatacatttgaaatgtgtagattttcataaagaaaaacctaggcagatttaacagtagaatcttccgagggtaggattgaagggtaattttaaaaactttttaatgtctacttatttttagtattttcttaaaatgggcatgtattagttttgtaataagatattaaaaattacattttcttaaaaaagaaaaagtggaggagctcagagtaagcgcccatcctagaggagctggagtttcttagctgggaggggttggatctccgcattggactctgtgatgctggctccaggggcccccatagctttgtgtctgccatagtgtctcagtgcagatgtggggtcagaccaccctgggacagtgcccatgaactgcctagcaacagacgtcacagaagtgctctgacagctttgaacaacggccgcagtgccagcctttcacccagaactgacaaagggagccctctggggccaggagtgccatggcttctgtggctgccgttaactttggg

SEQ ID NO: 80350 - DNA, 1703 bp, Homo sapiens
ctgagcacgaggagggaaatttgacacttggtcagcaacctgcagaaggcagcatctatatttcccaagcagatttaagaccctttgagccgatatatcacccatttctggaaccctcttgttacattgctatatcatggcccaagatctttggactggaaagtggaggaggtctcatctgcttacctactgacaatttggtcttcattcccttggaaattaacagtaggggagatgtcacagagcattgacttgattttttttttaagtgggagggaggagaggaagagggacgttgtagcttgtcacaaaatacacaggatattttgaagccatacctaaggtattcactccaggatgtggatgagctgcattcagttgactgaattttgtgtgaggggaaaggatggccaagagaatgtgccttaggatccgtctttcagccaggcagccatggtggaaggaggtaacgctgagtttgagtctgggctctggttgctgatggcttcatggagctgttcagcctcccgagcctgttcaccatctctgaagtggggatcacaagggttgttgtgagcactaaaagctattaccaaccccagaagctcaatgcgtgtggagctatggtgcccactgagtgatgtgaaagagaaggagcagtcggaggcctggagctgttctcgctgtccttggagggcaggaagtgttcattttacgctgtcaggaccctgtctgactcctctggtgggagcccttggcgggtcttggctctggaaatgcttagacaacttcactacgttcaacccaaatcatgaacctgagaaacgcagcattaaatcacctagcgaaggcctaaggcgtgatgtgcataatccaattacacgtactctgcaagcaagatcttcccttcaacctctcctggaagtgactgcaccttctgagccaggccatgggtgcttatcacttgtgtggagtacatgttcgttgtcctatttgtgctctggcaggaaatgttcaaggagggaaaagtgaacgcccatgcatgggcttggttccaggctcctagcgcctctttggggttagggatgcaagagggaattattgacttcctttcatattgtggatggaggagttcccatattggaaggaatggtataagctggagacaggcggtctctgattgtggaattgattccatttctctgccatggggaaagctacccagttgaaaacagtatcagcctcccactcagacatcactgtgtttgagcacattgtgctctgaagccagcagacgtgttgcaggggataggaatacagcctgaggatagctgtgcccgcctgcctgcagaggtgctgagctgtgatagggacgggggtcaggtggggctttgcccactggcccccacacctgtcagggaaaaatcttcgtttcactctctgttgtacccaagattgttgttagcggaccctccgtctgacaagccctggcatctgctcttgcactgaggaaggagccttggaggttggctctcctgtccctgcttcccagagtctgctggaccggtccttgctgtgccttcaaaccaccccaaggagacctcgagggagtttctggctctttgcagcaggttgctcttgcactcagagatgaggaacgcttcagttttgcatgggagattccttttctcttttgcaaagag

SEQ ID NO: 80351 - DNA, 1252 bp, Homo sapiens
tattcataggaggcaaaatggcccttggttaagaacctctgatctagctcaatgcccttgttttacagagaggggaagtgattatgatgtttaggaggaaagccaggccagaggcccaggtggctgactcgcagcccagggctcttcccctggccctggtgcagccctggagggtggcctgtgtcatctgtctcagtgaccagctctcagcttggtggtggttctgctagtggtagcagggggctgcagggttgggacataccttgtgaattctgttttccgacatttctcctcttccagctcctcaccccatcccctttcaaccatcttcttgaggtttccaggccaactcctcctacccctgcggtggccacagcagggtcccctctcaccctctgcccccctctttggaattaaaatcctcttatgaaaataattttttttaagttttaagaaaggagtaaaactgggggagaagcactgcttggattagctgtatttcccttaagtagtattcaggaagctacaagttaggtcgaggcagctcgaggcagacattggaattcaattaaagccaacgagtggggcctgtgacccccattttcaaggtaattgcttctccagctccaagtgaatgcagccatcgccctgtcattaagcaggcagccgtctaatcgctgcgcctgacagagcctcacaaggcaggaattacggacagccgagtcgtgctcgcactggggagccgtgcttgactgcactcccgcgaaggagtccgctaatctagtcagggcgttctttatctcctcctcgaggagagcagagagcgagcctgcagctgagctgcctctgggaagcaaggtgaagaaggataacggggtgcagagccatgggctgagcaaaagggcaggcatcctggccccagcaggaaagggcaggagagagagggtcccaagaggctcttggcagctttcagtggctacccccactgcactgttggatttgctgctctggaaggagacacagcctggcatcctggtcttggacttagaggagggctttgggcaagtcactttgttcctccaggcctcagtttctccatctgccctaattgtttagtggctctcttgctcattggatttgaaagattctgaggttgtggctcggctcaactcaactcaaagagaaatcagatacctccggcatgggcagggaggtagctggtggcatatttatcatgaggattagagtattc

SEQ ID NO: 80352 - DNA, 1294 bp, Homo sapiens
tagactttatttttttaagagcagttttaggttcacagagatttcccatatcctccccactatcaacatcctcaccagagtggtacatttgttgaaactgatgaatctacattgacacatcatcacccaaagtccgtagtttacattagggttcattttaccactttttctttctctatctgttcatctggaaacatactttgttttctctctatttagacaggtatggataaggtatatgtagacatactttttccccaaatcctttgacggtaaattgcagatatcctgacaattcaccactaactactataactgcatctcctaaaaacggataccatccttcatgattacagtattgttaccatgtttagagaattaataatcatcctgtaatatcatctgatatccagctcatacgcaaattgcatggaaaaatttgtgtgtgtgtggttgactaatagccatcttttggcatgctctttgttttagaacttaaaaggaagtttcaattacaaaactaatacatgctcattgaaaaaggtctaaaagagaaagtaaaatcgcctgtcaccctcccccctacttgtgccctgtgcctgttcagtgggactcctctgtctgctctgggcctctccgagaggccctgccagtgctgcacagcctgtgacctcctctgtccaggaaagtggctgcatctaacgcacaccctcttccctccagcaccagcagcaggtggcgcaggcagtggagcgcgccaagcaggtcaccatgacggagctgaacgccatcatcggggtacgtggactccccaatctgcctcttaccgtgtgtatagcccttttattcctctcatttatcataaccagagattgaccctgaccttagctggcctcaaagaatggcggccccagggctccggcttctacaagcaccccaagggcttggacccatgtagggctgtttcccccttggctcccagttgcctcctagtcctcaaactaaaggggagccagacacgcctcaaatccacctcttcagccatctgcctcatcttccactggcttttggtgtccttgccattgaggagggtgggggcctagggtcaccttcaaggccaggccagctggccagtacctggccacctcctcacacttaccccggggcctgtctgcctcctccctggcagaagtctgcccttctttggccacctgggatcagaacagtctctgctgtactgttgatgtgcatcgtgctgtggaatttgggtttacgtcttgctgtcccatgcgcg

SEQ ID NO: 80353 - DNA, 1053 bp, Homo sapiens
tggtgagggagaggctagtcccagggaaccctttgccacataggaccgcttatcagcttagtcccatttatctgagagctcatgtcctattggcactgggcaccagtgggcagagcaattcctctctcactaaactgtgtttcactcttacagtgggttttgctgggttgttgggggtgatttttatttcgttttgctttaattagggattccatccagaggatgcaaactatattctgaaccagacatgtagactacctctgatggaaattggagctccctaaaatgtaggcagcctggctgcaagggagttgaaagagatttcttcatgctgtggatttagctagagcctcctggtaggaggctgactgagggcagaaaggatggagccccgtggagaggggctgtggtctggggggagtttgcatttccacttgcctatgacatttcagtgacttgatttatttgcctgagcttcatgtggtctccttgcctttgcagacagagattgcgaagagactgaacacaattttagcacagatcatgcctttcctgtcacaagaggtaagaccttcttttattatttcttccttttctttccaaatcagcccagtggctggtggggtctcactggagcctgagccccagccccagccccagcctcagcccctgtccattcatactgactgagctgacaacctggagatttccagagccttctccggccagtctggaggcagggggccatatcagagggaccatttgctccttcttctcatagaattgtttctctgccatcacctgagtccagagattggagtgctggcatgcgacctaaccatcagtgggcagtgggtgcctctttcccatccaaactagcatccccagcccaaagtggacctcagttcctggtacagagtgcccttgctgggagcatgacccaggtggtcatgtcactttctacgcctaccttccaagggacctccatttgggacagcggctggactagtgggtgatttgagataaatgcctgcaaagaagccccctggtgcc

SEQ ID NO: 80354 - DNA, 1020 bp, Homo sapiens
ccacctctcagattcgcttctgaagacctggctcaaaagcagtggctttgtgggaccgagatggagggaaggatggaggtcggcctctggaaactacagccgccttatcgataacggattgcgccaagttgccaaaaggagttttccaacatacgatcgagttccagtttgtgatttgtgacctgtcccaattgttgaagtcacacttgatttttttttttttttttccttttttggaactgatgtttagagcttgtttgagttggatccaatgctgttttaacagctgttctaatcagaagtgctgtcaattattaaccttaatggtggtttttctttcaaaaatatttctctaagctctcttgaaatgtcaaaatttggcttcttggtaggaagtcatttagtgaaatcacttaatggctgggcatcagtttccccatctgaaaagtggagatgttgacaagcgccttctccgcggggttattgtggatgcacacatggcgagttgggtgggtgatatcagcggtcattactgttgttaggagggcttctgttaagccagctttccatttccaggaacttcccctcccccaagcgccaccctccaaaaaataaacatttctttaaaatgttgagcgaacagctttcctgttcatgctttgactctgcagagtgcacgcagcccattctcagggttgggcagcctttgtagagatgggggaggcccaatccctgcttccactttgtggggagaccccaagagggtactagcagatgatggcacagtgacagctgggagggatgggatgtgcttgcttcatgtccctttcccaggggaggggctgggtttacgttgggagaacttttacggtgaaccaggaggttctcccaacgtaagcccagcccctcccctctgcctgcctcaaccctacacagtcctgtctggtgacgtgccaaagtccttcctgccttgcagagaggcctctcttcgtcgaacatgggcctcaggaaagacagcct

SEQ ID NO: 80355 - DNA, 2977 bp, Homo sapiens
atgggggagaagcagcctggtttagagctcgaaagacatgcccctctcctgcagggtcctgctgctgttggcctggtgtcggtctccatgtcacccagtccttgtgtgtggcaggcacccacaggcctggtctgcaggaacttgagaagtgtctagatacccctttctcttagccttttgggttttctcactattcttttacctggttttttaccttacttctcaagagacccctacccagctcttcctcactatccatttgcccagggatattgggcaaactccctttttaaactcccaggatgttgaatgcccattgggcctactggatgatggatggggtgggttcccagcaagccagtttttcttggccagtggattccctttctccctcagaagatcacaagttcttgccgggtgatcctggagagttaggtatagagcaccagaagctgggagatttgtcttcatggctaagaggttggctttggagtcagacaaatgtgggtttgagtcccagatcagttcatgttggtgtgtgactttgagcagactgtttgacctctgtgatcttcagtttgcagtggagataataataacacctgcctgttgcggcagtgctgtccagtagaactttcttcagtgatggaaatgctgtatgtctgcactcttcagtaaggcagccaccagccacgtgtggctcttaagcacttgaaatatggctactgcgactgaggaactgagtttgaaatttaattttaattaaatttagctagccacgggtggctggtggcttcataaattgtacagttacagttatagggagtgccatgaaggatgcatatagcctgcttagcacaaaaccttgcacatggaaaggccgaagcaaggtattctcacaaggggacagagtccccaaattgtcaaggcctcagacatagaggacaagatccttggtgttgcatatgttgtaagatttctcagagccctttcccatatgtgacttgttggctctacggtcctgcagtgtaggcaccgtgggcgccacgcatcagatagcagcactgacggttaaagaggttgagtaacttgctcattgttgcacagcagaccagtggccaattcagaactggaaaccaggcctgcttccctcgtggacctcagtgatctttatccataggctatatcaagatgaggtcttctgtggtcttcccacatgtctacccccagaccaccatactacaggcatcagttccagtgctgggaagaaaccagatgaaacctttcagaattcagtaaaacatgagcatcagccacatgtggatcagggattgccaccctgggcgctgtttacatttgggactggataattttttgtggtgggattgtcctctgtgtttaggatgtttaacagcatttctaatctctacccactagttgttgttatcagtgcccaagttgtaacatccaaaaatgtctctagacattgccagaatcccttgggggaaacaattactattggttgagaggccttgttatagaggaaggagtctggctctaacctgggagatttgcttaccacctggtcttcctgtgtggtcttcctgtgtgacagcttcttgccctctctgggcctcatttgactcatctgtaaaatgagagatcaaatggtgtggcttgggaggaggtcagtttgagaaggagcatatcatataaaataagtttctaaatgaccgatcttgatttttatagcctaagaaatgccatcactcctgccttccttatttggagaaagaagaccctctaaccctttttattttaatttacggaacaggtatgctctttggttgtgaataagatggtaggtagatagaatggggctctgtctctgcccctcaccttgttcttccctcatgccacttgggttttccaaagagtccctgcccttaagaagtcctagccagcatttcatttgtagtgctgacctgatggggggagacccccaaaatttaatgagctgtctctgcaagggtaatgtgacttttacagcctgttgaggggcaaggggagatttgcataatgttccaagggggattaggtggctgggggttgccatggcaaccccacagggatgaattgagaatttttcctcctggcaggagttggccaatggagtctgggaaggtgggggagggggcagggggttatctgaggggagggaggagggggaaggagagagggaagggtgggggcggtgtgcctgggatgaatgggcagtgttgggggaaggtataatctgaaaaagcactccctgttctgtctgtacaagcaagctctttgagagccatctccccccacaagtaggggtgggaggcaagcagagtttagtgtgtttgggaaccaagaaattaaagtgaacaaatatttaaagattattggatcttgttaacaggaagcccggtagatggaaactgaaagtctgaggaatgaaactctttagagtcctaaagccaggagggacttgagctgtcatctgggccctgtggtgtctgcctccaagtctctgttgggtctccatggaatgctcccaagggcagggcactcacacagcacctaattcatttttgagagctccgattattacactggactcagattggacttctttattcggaaactgaggcccaagtgcaggatggatctgggctaggaatgcaggactctagactgtatgttgctacctgtttctggggttgggttgcctggatgcatgctagcttggcctaaccatccccagttcccttacactgtagacccctggaagaaaagaggaggtgggattcctttcagggaagtgtgcagaagggtcgtcccaaccccagcaaccccagagtcccttgccgttgatcggtcctagctggggaagggtgagtgtgtttcctcctccctgccctggctcctcactgtcatcctcacc

SEQ ID NO: 80356 - DNA, 1596 bp, Homo sapiens
agaagcaacttcccatctgtggggcctgagaggccagggaaaccctgttggggcctgaagtctatgttgtcctgttctctcccaggctggctgctcttggtaaagggtaggagcatggatgggcttggctcgtgtgtcttaggtggttccttccatcacccactgtgtgaaggataggatccagtgttctggctgctgccaccaccaaataatcccaggggaagtactttccagaggacaaactgtttgaaaaatttgatcttccagatattatagattataatgctacggcctcttagaatttctgtagcacttgattgcaaagcagattcgacattttcatcttagcagctaaaataatgggtatttgggtccaggacagacagacaccaggataaaagcatcagagcataccctgaaagcttggggtgtgaagatgacctgtgtactagagggctgtgttctcaaattggggttggggaggtgaggcctgtgctgtgacaggactgtgagttccgtgagggacaggaccattttgtatttgttttcactaagggtcctgaaccctgagcagtgcctggcccatactggatacacagtgtgcattttgtggggactcaaggaaggaaggtaatattccagctcagggttctctctgaccctgaatagtgttatggactctttgggaaggatagaagctttcttagttttctgacagaggcctgtaggctgcaaacgttgtgtttgtagaaagagttgtaaaggtgtcatgagcctttatttaaaagtgtctttaatgtatcttaggcatctttttcttttcatctaacactatggacagtttaagtgcaaaaggggaagaaggcagggtgggggtgcgaagagataactgggaggaagagatgacaaagcagagatgcggaagagacaagtgctgagtgggtgaattggtaaactcggcttgccatgccttggctgtttgggcatggagttccaagtgttgtggccttatctcatgagccttttaagtttgactattgttcacagttcttctactgctttttttgtttgttaattttgaatgaaaactaccgcaggccgatagaagtttctttttcgtttgcgctggaaggctgaccctttcctcaagtggagacccaaatgcagaagagctcttcccactagtgttttagcactgaataccaaatgcaatttgggtacaggagagggctctcccttcctggtcagccatgaagacttgaggtttagactccaccaccctgccagctatatgaccaaaaggttggaggaggcggcctttcacccacttcccaaatctttcccttgggctagccctcgacaggtctttgctgagtttggatctgaaactgattaattctgataatactggcaggggcatgctttggaaccggtgatgctttgtgatttctgctggggaaaatgagaagaggaaggcagttcagtgcagactagtggacaagggatgggagtccattctagctctctggtgggggtgaggtacaagaacttctattaaccttcctggcctctgtccaggaagaagtaggacactca

SEQ ID NO: 80357 - DNA, 2059 bp, Homo sapiens
cacggagttcttcctttccttgaactcctccttcccacctaggctgtttgtttccattttgttgaaggagtgagtcagtcaaggaataaatctccttttgctttctacgtgggagaatgtcattctgtctcattgtttgtacaaaatactgggacaccaggggcaaaaacgtgacaaagacctaagcttggcagtgttttcccctgtgatctggcactcattcctcgtctcatttttgtaggtatgaaggaagcccctctgctgaggtctctatagcacttagtatgtaataggtgctcagtaaacatcttggtttttcttcaaaatttactcaggttatctgagagtagagttccgattccctgagccctgtgagtaggaagtggggattttagttgtgggctggccgcccgctctgcaggcttcctcctatggcccagcatccagtttcttcatcagtgaaatgagggggttggattcattcccaaagcagttattaggggactgggatgtgctgggtgtgggctggggttggttacacagccgaataagacaccattccctctgcgggggagtcggatgtctaaagaagtaattgcaatgcagtgaggtaagtgctaatgtggcccaagtgtcataggaggagcacccagcacagaacagcttattcttcttgggtgagagcagacttcactgagggctttgcttggcgcgagtctgaaagggagggtagggtttatgaggcagaagtcggcagccgaggcccctccagggtggcaacagctcgcggcaaggcagtgagatatgttctagaagccacacgtcttcggaatgatgtggggcggggactgcacttgggaagtgaggcgaggtggtgacattttgcagcagagcgatctccaaggcccctctgcccttgcagtcgcggctccccacccggtggctccctgcatccctgcatggctggctctccagggctggcctgagtccatctgccgcggggtgggggtgggggcgggggcgggggcccgctctgggccgtttgtggcctgctctgcctgctttcctaccgtaatatgctgctttgaactttattccccaaagtggcattgtctcctttctcatattggtaattctgtaatgactggttatgacccgccccctcccccatatttaattctcatcagcccagctctccactttgctattaatgatagcagccagcaaaatagctttcaacatgccattgacagtctggtttaagagagcacttgaagtagtgctagacagctgaaagcacccataattgtgtaccagagtgagaactgcgtgctcaagggccttgtttttatatgcttaaagggacaatatcttgttttcaacaaatgctctctgagactcacagccaagatgctttcttcctttttccttttcctttcttcttttggctttctcttctccttcaaaatacatatttaaaaaaaattctttataaaataattgttcccttcaagttggggttaaggagaaacttaaggaagggggaaacgtcctgccgccatgtaagcggggaatatttggtgggtttgttgttttgaagcatcgtcctttgcaggcagcaagctgtgggtcagccttgccctactgagggtccttaggaccttgcgtttctcaaggaggtaatgggagagtctgaattcgcatcagcattgattttgaattcttttctttgctaaggatgttgcacaatcagtgggctgcagagctgtcactgtgaatgtttaggcagaggccaccttttgggggagggctggaggagaggggtcaccgtgttggagagtcaggccatgaccgctaaggaatcagattctaggaggctgtttgctgcagagttgatggcccaagaggcccgtctggaaatcaacagggtgggtggggcaaggacttgtattcttaagtacaggttcacaccaggcttggagggttaaccagggggcccggctagtccacccggcagattttatctgagaacaaatacttttctccccttcacaccagc

SEQ ID NO: 80358 - DNA, 1034 bp, Homo sapiens
ctgtagaagaaagccctgccactaattgtagtgtgggtcttgggtgcatttggcgaatggtggttaggcctgagcaaacaagtttatcagctgacctgtttagcggttgactggtgttttatcggcacacacaatcaagtgactggagtgcttgaattattcatgcagtgtcctgccctctagacttgactgttcgtgtgattacatctgcctggaacaaacaggctggattcttcatctttaagctggggtgggggtggggactgtctgtacttttatataatagatgatctatagagctagcaccttgggaagtgtggcagtcctcagcctgcgcgcatacacgcacacgcactccaccatcaccaccacatattttttttaaaagctctcctttgctggctctatgggaaatgccaattagctgggaacctcgagtcctgccagatgggcccgggtattgacagagggcagctgatgaggtgcgtccagcccatttttattttactgagaggttaaactcactgtggctggctccttctctggctgtttctctgtctctctctttttccaagctgtcaaaatcccagagaagtaataaatggtttctcctcctgctcttctgcctccctccctaattatggtaaagcaaagattacagaatcacaggcctggcccgggacttcaagaggtcacccacctccaccaagccccctgcttccaggcagaatgtcaagggtggttcagagagtctgggaaggcagtgatgactgaccggctcatcacttgccatcttgtttgtgcagaggctttccagtgtcagccacaaataacaaagccagcttaaaaccaggggccccagagcaattgccatgcattggatttgaggcactggctctctgagaagctgggtcaggcagccttttcacccactgttggtgagcactgacatttttgaaagtggacttgagccattttgattttggggcagtgtcgtgccgacacaatacagtcacctttttctgtgaactgaa

SEQ ID NO: 80359 - DNA, 1031 bp, Homo sapiens
gccttgcattgacaaggtggctttctcatccctgtcttgatttgaaggcagccgagttcccattttacagagaaggaagctgaagctcctgggtgaagtaacttgcccaggggcagcctagccaggactttcgagatggctgggggttgagctcagctttgaaatcctgaagtcaaaccagtttagctagtgtggtgtcgtttgatggatatgtaaactacctggtattgtcactcttctaataacagtatacctcaaaccgagcaaatacaaacaccctttatctcagtgcatatcagtaactagtcccagtgctaggctgggctgtgggagaggcctgtttgtgtatttgtgttctgaggaaaggctgcctataatttggcttggccaacgtttagagttgacttggcacgtataaatggagcaggcaggccggttgttctttttaacaattggtgttcatgaaatctcagaaggctgttgactcattctagcctttggtgaccgtgacttgaatggattttctgctctaaattaacagtcgtttacaaggtttcaattttgctctttaaggaggcaggacccagggcaggtgagaagggcaggtgaccctggaaagtgggcagattcctacccactcgggtggcttcctatagagcctttgggatctgtagtttcctttcccctcctggagggagcccccagtgttgggtgaagggaagccagaaaggggcctgagtttattgagcaatgtgtgggaagccagcttgtggcttcctgagggattagttagtcccttaggaaggcacatgaaggctaccatgtttttacttcttgacacacagaaataatagacagggctttatacgtaaagatatttctccttggaaaaatagaatagagacaggttctgcaactggaaggggccaggtcccggaagaatgcttgaaatggaactgggggcccaggtgtttcaaggaccttggggtgtatgcagggtgccacttcctccctttgtctgccctgtctta

SEQ ID NO: 80360 - DNA, 1092 bp, Homo sapiens
tcttttgttgttattcctctgtcttccctctttcctcctcccgctaaataattatttgctagtagaccgtgggaaaaaaaaggaggaaaaaaactcgagcagcccaggactataatatatatctatttattatatgtctttcggttaattcctgatctgaggagcgctgtttttcactcccatgcgaaagtcaccagcgggtagggcctgattgctacttttcatgcatagttttagacacaagagggcattgtgacgtcgcgcccagcggcacccagtcgtaggccgagtcccgcagccccacgtgggggccccgcgctcccattggccagcgccggacgaagctgccacattattttgttacttttcagtccctatttggaactgctctcgcggcagttcagacctcgtgctcgtccccttcgcctgtctgtgtgtggtatccgtaggtccggggcacttttttttttggtgtgtgtgtgtgtgcgtgcgcgcgtgtgtgtgtgttgggtgtgtgtgttttgggggtttgccggggcgcggagaggagagccgggccgaggggaaggaaggaagccgtagagctccccggtctcgggctgcgtctcccctccagcgctctcctgcctgtgcgctccgacgcggcagcggcggtggcgctgagcgctcctcggtggggacgcggtgctcaagctgggagcagcgagaaccctttgcggaggcttcccgtgcccgctggacttaggatgccagggcgtttgatttgcacctactgagcccggagttcctccccggccctgggaagggcttgcagcggcggcggcggcggcggcagcggcagtagcagacggaacagcaggctctcctctccgagggggggcgtcgaagcgcccgcgccgggctcccgccctcaccctccggcgctcctgcggccccaagccaccacctcgtagcccgcctccttcctcttctcgccgcgagccccaggcccggacgcctctaggatcggacccgcgcgccccggatgcttggggctgccccggcgcgcccccctacaggcgcgacccgctgagtgacccggagggggcccga

SEQ ID NO: 80361 - DNA, 1151 bp, Homo sapiens
atacataaatatacaacatatattaatatataaatattgtatattatatatatgagggaaaaataagaatttcaatccagttaaatatgatggattaaatataccttgaccttctctcactggcaacattttattaaattgacagtaaatggggagacatatatgaaatgccaagtccaaagtggtttgtgacatcaggagataagagatttcaacaaatacctgggctctgggaagcagagggatgagtggtaatgactcagcacagtggagaaagttacaaacttcagcacttgcggaaggcagaccagtgagaagcacattgatttatcttaaaggattcctgagagattcagagcttgaatgctccaagtctgcaaaaatccatggcgatgtgcagagtggaaggcactgcagttaatttaaagtctacattcagaggagttagggacccagggtaccctccccatgtccaccacatccacatggtgtcagacttcaactagaacttgagaaatagaagacaatggaaacatgaatgcagagaggaaccctattttgaacacagagcctgatcataaatcaagtatgatggtggaataagtatatttcaaacacgcaaaaaaattgacctcccttgcacctttccttaggaaattaccataggatgtgcttcagccaaacaagaaaagaaaccaataaataggaatacatgggatacaggaaaatggggatctcacccaagaaactggctggattttagagataaccagagagcagccggtccaaataaggggtgaagtgggaaggcatggaggtgaaatttgtatattatccagcatgttgtttcaaacttttggaaaacaatattgataggcatttgatacttcttttggaggacagagaattgagcaaacaaaaaagcaaagtgatgtacaaatggaggaatgtacctgacttgggtcatgggggaataatattttcacagccataataatgtaaacacagccccaaactatgatataacatagtaagataatcaaaggagaaatggaggagagagcttataaagtagctaaatcctcaattaccagaacatgaagtcaatagataatggggggaaaagcagcatagcaaattatttagaagta

SEQ ID NO: 80362 - DNA, 1028 bp, Homo sapiens
tagaaataaagggtcttggggagagtgaatcgaaacaagggagagaaaggggtgggtgggtggatggtgcttcttgcagggattggcctttgtctgcaatgtctgggcagagggggaccctgttcgtggtccttgaaaagggagttcagtgtgaggggacctgacctatagtcaagagatctgggcacactttatctctctgagccttgatctacctgtgtaccctgacttcctcaaagggcaattttaagagccagatgagataatgattatgcaggtagtttataaatcacaaagccccatactatatcaaaaccaaattcttattatacagacagggaagccgattcccatagaagtgacccaagacgcacagttgatcagcatcccagcattcactgggatatgccttaccatccccaggctcccagcttctctgtgctgacaagggatggagccctggagtctggggctaaagctccagatctggcgccacctctggtaccagcctaccgtgtaatctcgggccagttacttcatgtctctggacttcagcttcttcgtttttttcttttcaaagagccctctttccttattttcctgattgtcctccctgccagctacctcattcataacatctttagccaccatctttctctatgacctcaaatccatatctccagccccgtttttattctttgccccagaacctactgtatgcctatgaaacactcaacaggtaccaaatggaacccaggtctttccccacaaacctgaacctcttcctgtatttcttgtcttaatgaataatatcatttcatgtgactcaaccacatgacagatgatgaggaaactgaggtccagagaggctaagaggcttgcccaatttacacagcaatcggttgacagagatattaatagaactagagctcaaatttcctgactcagggccagatgtgccattctactctcttccatttgactggggagtgacttgaaaatattttcattagtctctcaatgacagg

SEQ ID NO: 80363 - DNA, 1025 bp, Homo sapiens
cgctgcattgggatttcccaggcgaggtgtctatacctcatgcgcagcctacttttcgcctatctgggatggaggttgtttgcatgttccctcctctttccttccttcctctgccacataggcctgtttttggcagggaccatgtcttaggcacctcagtgtccctaagtgtctctctcagtgactgacacatacttggtactccataaaagtttctgtagttgtcttaacttatggaatgactgccagcaaagtatttcttgtttccaacccaggctcctcacttgccctgcttccctgagagctgctgggaggaccagcagcagtggccagcacttgcagtgcctggcagcatttgcaaggtccctcatgggtcctttcccacagggtcccaggatgatgagcgtgaaatgagaccaataaaagattgcacaaatcttgttggactcacacataggatggaaagcaatatccatgtctgaaacatgttggagcaggccttccaccaagccctttagaaaaagggttgtatgtgttgtgtagagcaaacctggctgacaggcattagcatgcccattttacagatggtgaaacgggatctgagaatttacgagccttgctcaagcttccacagctatgccaatgccgccagcccgccatccctggggttggagccagggcatgtggggtgatgtttttcttggtcgtgagcagatgggctagtgccctacctgcacagtctcaccgtagctcaccctcccatacatcctgttaaaggtccagccaagatccacttccctccctcgttttcttgcctgggttttgcctagttccttctcttcatgcaccacaggacgcactctgagcaggcggggaggcccgtgagcctggcaaacaagctatttgctctgggaggtgggctgcttctgaggacagcacagggtttctgggacagtgctgaggaagtcacccacagcctggctccctggctgagtggacggttgaggtggccagaggaacttaga

SEQ ID NO: 80364 - DNA, 1110 bp, Homo sapiens
cctttggactgagattgaattacttcactggcttttcttggcctccagcttgctgacagcagactgagggactcagcctccctagtcacatgagctgatccctcatcataaatctcattttgtatatctctatacatcctactggttctgtttctctggagaacctgctagcacagagagagatagacagatgggggaagtgatggtgggaagggtggcggtgtggaatgggtctgagtgaactagcaggttcacaacaactattaatgatgactcttgtatctcaagcacttcctatgtgtcagacactgggctgactgcttaatataaataatctaatttcaccctccctgcagatgcttaggagtgacaggatgaaactgatttcctcatttacttgggaatattcacatagtaagctgctctaccttcttccaatagagaattctgaatataccctctgagcttacctcctccaaccttctcctaaagtggagggaggggtagggaaggggaggagaagagtcctgtgcacatggcactgcggggagcacttcatgatcacactgtgtgagatgtttcagagcaactggggagatggcaagaggattggggagtgaagaaagcgattttgcgggggaaagttattgtgtataatttgagagtttctagtaaaaatggaattccttctcaattatttttggctgcagaattggactggaccacatggggccctgaatttataaaggttacatagttgtgattgtctttatttatagatgaggcaacgaatgctaagaaaagttaagtgatttcctcaagaccacgctgctagaagcgatgaagtcaggacttgaacatgggccgcctgcctctgcgcaatgcacttgctctctctgctgcatatttcccgggtctaaataagtgagagaaacatttcctcatagacatttagacacagaaaagacacagagccatccctcccaactgtttgatcagtagagaaaccaaggaccagaggaagggaatgactggcccaaagtcagatgtggaatgcgacctcggatggaccccagctttctgccccaacgagtgtgattctctgtgctg

SEQ ID NO: 80365 - DNA, 1100 bp, Homo sapiens
ggggctgtttcctcatccatttgtccccttcacgggcttttccctccaccgaatcccaggagccctgggttgtggagcagagtgggcaagggtgacccgcaggcagtggcagggagtggagaaatcggaacccttgccatgcaccctggacttcccaaagcatttcatgcatcctctcattccccactcagcacaaaatgggcgatgtgatcgtgttggatggaggaggagaggtgaaggggctgcgtggaggtctcccagccactgtctggaccttctggctcctaaggagtgggttgttcagagtgagtgtgtttccaaagcctctttttatttgcagctctgttgtctccagttctgttttggggggagcaagactgtggtgcctccctaggaatccagctttcttaaatgcaccccttgaaagggtggatcgaaggctgctggagaaaagatgtggacaaaagccacataaactgctccccacccccagcagctgctctgccccagagcaagtttggggcttgtggtgtcctctgtgtttgtgaaagccagtctccttcagtgtctcctgggctgagcctgtgttagggactgggcagggcaggataagatgggacaaggcacagtgcagttggggagcctcacccttgcctgggacaacaaagagttcaccaaacttcagccttttgcgttccaacacattttttaactttatctgtctaccacctgtactattatttacttaatgtatttccttaaatcaactaacatttaacttagttccatcctaggccataaatccatttaaccactgtttgatgtattcattttatttttctcatgcacactaaaaataaaagtataactaaaatgaaaacaaatgcatccaggtaacagtgagaagcatctggcaaacactaggaatctttatgcctgggtaaggctttatgtcccccaccaggcagagcaggcgatctgggaggggacaaggcatggtatcactgccatcacccatctgcacatcagcctggcctggatcaacagagcgggggcccatagaacgcccgtctgcccagtggtgtccgaggggtggtgtg

SEQ ID NO: 80366 - DNA, 1046 bp, Homo sapiens
cagggagctgggaagctccccttaggttccagacacctggcccactttgtgtctagatgtgggcttgccacggaaggatgcttcaccagaagtggcttctgccactttggtcttgagtgatacaatgctcagctaccaccatttacaggtgggtgctagtcatgcatctgctctggtgttgggcagtggggttttatgtttatctgtggtcaggggtcctttcaccacccactgactttgcccttcaccacccactggccttgctgagctgtctccctgagtgttttcggcataatcattggctggtcttcatggatgggcaacctctggaaatggctttcttccagagccattgccctgggactactgagaagtcccaaggcccttctagagtgccttacccccatgactttatcaagatgactctctcccttctttggggactgccatagtctctggcagctgcctttgcaggggccttgctctggggctcaaggactccagagcttctcttcttaacttgacccttaaggactaaaatctttgaatggggagtagtggtatcagatggacccggatatgaataccagtgttgccatttctcttttgtttggctggtttttggataggatctcgctctgtcacctaggttggagtgcagtggcaagatcatggctcactgcagcctccacctctcgggctcgagggatcctcccaccccagcctctggtgcagctgggaccacaggcgtgcaccaccatgcctggctaattgtgttgcggttttctagctgtgtgaccttacataggtcactagccctgtctgatttcctcagctgtaaaagagggtaatgataaaaaaaaaatcacaattaacactactattttattctcaatgtgtcaggcattattccaagtactttatataaatgacctcattcaatcgttgtaattaccgtatgaaataattattattgtttagttcctatgtgatagatgtgtaaactgcgaccacgcagatagttagcagcagagcagggatctagg

SEQ ID NO: 80367 - DNA, 1445 bp, Homo sapiens
aaagacattcttataaactaaataggcaatgaagaacaattgtgaaaaaggacctcaatttgagcatctcttggaaattcttgtaaaaagaatgcctaacttgattttgaagtttgttctaggacagggagaaaatatctttggctcaaacttcatttgactcatgttttaaggaaagagccaatctatcccaggcagaaaaattccaccaaaagatttatgacttaacttttatgttaaacaattggttttgtctgacacatgtttgaaaagcatatatagtgacttctgataatgaatgacttgatcatttggattaattctccccattagcacaataaggaaaaccagacaaaatatttttttaaaagatctacatgtaggctgtagtgagctgatatgataaagaagcatattggaggatgacagaaacccagagaggtaaattcaaaatttgggctttttggagcatgttctctgaccaaaattgaattaaatgagaaccaacaactatgacatctatgaaaaacgcacattttggagattcaacaatacggttttctataacccataggtcaaagaagaaattaccccaaattaaaaaatattttaggccaggcacggtggctcatgcctgtaatcccagcactttgggaggccgaggcgggtggatcacctgaggtcaggagttcaagaccagcctggccaacatggtgaaaccccatctctactaaaaatacaaaaattagccaggcctggtggcacgtgcctgtagtcccagctactcgggaggctgatgcaggagaactgcttgaatccaggaggcggaggttgcagtgagccgagatcgtgccactgcactccagcctgggtgacagagtgagactgcatctgaaaataataataataataacaataataaaaatctcagacattaggataatgaaaataacaacatctaaatctgtgagatttggctaaatcagtgtttagaggaaaatgatttacatccttttattaggtgtgctggcttacacctgtaatcccagcactttggggggccgaggcaggtagatcacgaggtcaggagatcgagaccatcctggccaacatggtgaaaccccgtctctactaaaaatacaaattggctgggcgtggtggtgtgcgcctgtagtcccagctactcgggaggctgaggcaagagaattgcttgaacccgagaggcggcggttgcagtgagccgagatcgcaccactgcattccagcctggcaacacagtgagactccatcgcaaaaaaagaaaagaaaaaagtgttgaaaaatcaatgcccaaagagctaagagaaaacaaacaaacaaaaaagagcaatgtaaaccaaaaataagtggaaggaaaaaacaataaagacaaaagcaaaaatcagtagagaagagatcaggtaata

SEQ ID NO: 80368 - DNA, 1030 bp, Homo sapiens
aataatgatagatgatatactagatttttcaaagtgtgaaaacctttagactttttttagcaattagtttgacattcgctactatagtaaccaagcactcattatatatgcatcctccaaatgtttcatgcttatttataggaaagttatattaatgagattaataatgtgaaatacagttttcctgcaaaattagcattagagaattgattttagataacagatttttaaagttttagagaaaagtacagtaatacagtaaactgaaagagtatatagatagcaataaaataacataagtggacatgtttatagtaaatactctgaagtaaacaaccgtttttattaactgcatctcattagggaaagtttatatgtcttgttattttttattaacattttatttaccattcagagtgaaaattactaatttgagtattaacaaataactgaataaatggatcattacagttaggttttctcaaattgcaaaatttgccttagcaattatctttgaacatcccgaaccagatttttaaatcccatttttgtttaatagggtaaaaataccatcaaaatgacttctcataccaaagaataagccatcatattttttcggtgttgaaacaacattgaaagtcagaattggatttgtttttaattctttatacggtttacataagcaatatctgtctctttaattattatgattaatgtcgtccttcagcatgagttctgtttcacaagttttgggccacctatttcaataaaaaataaaatataaattaaaaaagttgccgggggtggtggctcatgcctgtaatcccagcactttgggaggctgagggaggtagatcacctgaggtcagaagttcgagaccagccttaccaatatggtgaagccccatctctactaaaaatacaaaaattagccctgcatggtggcaggtgcctgtagtcccaggtactcgggaggctgagacaggagaatcgcttgaacctgggaggcggaggttgcagtgagccaaga

SEQ ID NO: 80369 - DNA, 1079 bp, Homo sapiens
ttcctattcctataaacaagcctccttgttttttttctctctacaacaaagtggtcttaaataatacaactcttgaaaggaaaaaggaacatatgttaatcctagacttacacgggccacacccttttacttttcacactttgttgctgggaatcccccttcccttcctgtgttccatatgttacctggaagatagttcatgtgccttcgtagatgcttatatattagctaaaagtaagactatgtttatactcacatcttaggatatatgtaatatttattcttaatttggtattgcttttgtaaataatttctggagagggatttaattataaattacatattgtatacatccttggtaacagtcttggcaatattcatacctcaattttctggtgtataaagataaagcttctgtctccaaaaaggaatgatttctgtacaaagatgttcattgtacatgataagtgaataatatatttctcctacaacatttttttaaagataactgaactgcttaatgatgtggaaagattaaaacaggcactcaatggcctttcccaactcacctacacaagtgggaaccccaccaagaggcagagccagctgattgacactctgcagcaccaagtgaaatctctggagcaacagctggccgtgagtaaccaggcacacggggctttgcaggaatatgtgctggctccctgtagttagtttgtaaggctcatttagaaattaaagtgctctgtagctatgttcggatccaagaatataattatttttatatgcgaaaagttacctatactggtggtgtaataatacttatttgatgcctactatacaccaggcaccatattaaacattttacgtactttatctataaactttatcttcatcatgatctcacaaagcagatttattccctccatttaattcttaaggaaacaaagaataacatatttgatgcctggggtcattcagctggggtataaacctggaactggctgactccaaatccagcatctttctcattgcagggtgctctctaaaatattggtccactaaactaaaggaggttt

SEQ ID NO: 80370 - DNA, 1016 bp, Homo sapiens
tttaaaagtaagtgaagacatgaaaaagtcacatgatgcaattattgatgatcttaatagaaagcttttagatgtaacacaaaaatatacagaaaagaagttggaaatggagaaattgctactggaaaatgacagcttaagtaaggatgtaagccgcctagaaactgtgtttgtacctcctgagaaacatgaaaaagagataatagctctgaaatccaatattgttgaacttaagaaacagctgtctgaacttaagaaaaaatgtggtgaagaccaggagaaaatacacgctctcacatctgaaaacactaacttgaagaagatgatgagtaatcagtatgtgccagttaaaacccatgaagaggttaaaatgacactgaatgacacgttagccaaaactaacagagaattattagatgtgaagaaaaaatttgaagatataaatcaggaatttgtaaaaataaaagataagaatgaaatattaaaaagaaacctggaaaacactcagaaccaaataaaagctgagtacatcagcctggcagagcacgaggcaaagatgagctcgctaagtcagagcatgagaaaggtgcaggatagtaatgctgaaatcttggccaactacagaaaaggccaagaagagattgtgacactgcatgccgaaattaaagcccagaagaaggagctcgacacaatacaagaatgcattaaggtaaaatacgccccaattgtcagctttgaggagtgcgagagaaaatttaaagcaacagagaaagaactaaaagaccagttatcagagcagacacaaaagtatagtgtcagtgaagaagaagtcaagaaaaacaagcaagagaatgacaagttaaagaaggagatttttacccttcagaaagatttgagagataagacagttctcattgagaagtctcatgaaatggaaagagcattaagcagaaaaacagacgagctaaacaaacagttaaaagacttgtcacagaaatacacggaagtaaagaatg

SEQ ID NO: 80371 - DNA, 1039 bp, Homo sapiens
tcaggaagtcatttcagtaaccgtaagtataaaagtatggattatcattacagttcacctagttcaagtaaagaagaatgtttattcttacttgtttaactatacaggaataactgtacaagatattcctgctgctaaacttcatcagcacatggaactaggaagacgttaagatgactattgtaacttctaacatattctgataattactgaagctctgattctccttagctacctgtattttaaaattgtatattgtatgaattaccaaatttgccttgttgattagtagacatagacatttgtcttgtgatatttagggttcatttttttatggaaagaacataaacatagttttctaatttggagaaatcggtcttaatgcaagtaggcattttaaaattacatttatgaattatttttagaccctacataatcttttttattctgcaatgttaaacagtttctctagaaaatctgtttttgtttcctagtgactattaaactattctctcctacaacagtaatatttatgctataaatttaaatcatcatttttgttttgattgattataagatatatgttttattatcatgtagcctagtttaagagtcctcaatatttctgaagttttagtgattctgctgagagagagcatagaaaaaaataagaaaaaaaaaaaccaacctagtatctgttgttcagtagattgtaggtacttctgtttatagaaataataaggggaaaatgggtattttagaatgaggatacttttgtgttgtacctcttgcttctcttttatttgaataataaaggaaataacatcaaattaatgtttagcctactttagtatggatattgaagttaaaatgtcattcatttgcatttatttaggaaaagaagatatgcttcttaaacaaggtcagatgtatatggcagactcacaggtaataactgtttttttttttaattttaaaaaacatttaaagaaaatttttgtgcctttataaagagaggagaaagcggcattgtacatta

SEQ ID NO: 80372 - DNA, 1004 bp, Homo sapiens
tatttgcatttcaaaagtaagaagtaactgcgtgattggtacagctgtgtccttgtgattctaattttccgtatcactttaatatcttgctatctatgttagattttcctaaaattgaacatatgcaaaagcaaaaggctgaactatagttagggccatgggattggagaggaaaaagtagacagaagatatgaggaccaagaacaagtaggacttggtggttgataggttctcaagagaatcaaaagtgcttctgaatttggatagtgagaagaatgaatgacaactcatacaacagaattgtacataattttcttctcatatccttggccctagtcttaaagacatttgccaatctttttaaaatatctttgccaagttcatgccttttaaaataggcttttaagaattaaaatattttgtgttctttttaaatttaggaagttatggttgctgatgatctggaaagcgaggtagggtgacattttattttaaaccattaaaattgttttaggaattgaagatgatatagtagtaaaggtttaagtcctgaattgagatagagaccaggattctatttctggttattaaagggaaattcaaaatctatagatgactaaaaaaggatgttttgaatgtagtggcatagattattgtaggcattttgttgttattgcctctgaaagtcttactttctgtgaaacttgtcctgaaaataatataaaattctaaacataaagaaaatgtctgaaaacattaagattgaaaacagagatttgaattttttatgattttgtttatagatattgtatgtttcattagtatatttgtagaaattatcaactctattagtagttaaagttcaccaggttggagaattcattaactccagtcctcaatgcaattccaattcacgttttctaaaacacatttttaatccaattccaagcacagggtgattttactgtatttattctgtttcatttcagagagaaaagctgaag

SEQ ID NO: 80373 - DNA, 1844 bp, Homo sapiens
gaaaaatcagttaaggaataccctttctatgccttacgcttcttaactttctcaattttcagtgtccacactgcctatttggatatgtaatgtgaaatcttggtatttctttctctctcttctttcctcattgtctttctctcctttcccttttctctgtgccagtatttaattatctgctgtgttttaggtactgttctacatgctggggatatagtagtgaatacaacaaagttcctgcttgttatagatttctataattagtttttctttctaccttcattgttttggtacgtatatcatctcttactaaaatatcaagctagatgaaacatctttggaaactgaaagtatacttacagattaagtatgttgtcaactagttttgggaaaaaagaatcatatttctataaaaatcctcaatttacatatgaagaaaataatccttcacatgtatcttaaattatttatagggagaaatgctcttcacctggctgctaagtatggacatgcattgtgcctacaaaaacttctacaggtagtggaagtggttaatactttagctttattattttgacaacaaatcatagatgtacttttaatgtgtttttggaattttagatcaaagagaatagtaaactaactttgactatgagcttacatattttttccatcatttgtgaaggaatgtgaacaataaagagcaaaaactgagggaagtgaattgcataactcagtgtattaaaaataaataacaaaggcttgaccttcctgttgacatagctgaaggttggaattttctgttgtctagactatcgtggaagataaagtaatacaacataggacctgtatatttctattcaaacacagataacttatactacataatattattacatttttaatcagataaccacaaaattctaactagttggctaaagttcccatcaaatatttcagtcatacatttttataaacatattcactaagtttcatagcagaactcacctgcttttctgattcagtatctcaagttttaattcttggtggaaaaaaaaaccccaaacaatacatattttcctgtatttcatgccattcattataatgtaccatatgtttcctgtttggtgaaacattgttaatttagttatataatgttactgtatttgttccatgtcagcatatttcatggattgtcggatagtctttagcttctttgataagtggaatattttaagattaaataacagctgttcatctgagtctggatatctaattttaaaataaaactctcctactttactaagttttctttactttaacagtacaattgtcccactgagcatgcagacctgcagggaagaactgcacttcacgatgccggtgagcagtggtttcccttggatacaaatatttgttaaaatgtctagtcatttgaattaatttcagggttttaacacatagatatttatataattcatggagaaacaaagaatattaaaaacctgtttgcacaaattagagatttattagattataccgcttaaaaagattcattcagtcagtatttacaggccagtcagcttgctagatactaaaggtacaaaggtagataaactataatcctgctcacaaggagctccaagctgtgtgtgtgtgtgtgtgagagagagagagagagggaaacagagagagaatgtgtgtgcgtgtgtgtgtttcatgtctttgggaattggagaaatgggaagaagactttccttaaactatgtttacctaattaacatgtctgaacctcttttttctcatttgcaaaatgaagttaataatactactgcaataagtag

SEQ ID NO: 80374 - DNA, 1007 bp, Homo sapiens
agaggtgaaaagtctcatttcctaaaattcttctcagtctttacttgcatgaatttattcagaatattataactggaaaccagatactaaatatagaaatgaatattaggaagtgaatagttaatgtgtgatgtgggtcactgccttggaatgcttaggtattaaatatagtaaagataacagcaggactataaattaagtagtttttaagagcaataaagttggaaaagtttcaagttcataatgtttcacttttatcaagtagcagtttgatagctatggaaacactggttattttgaatcttgccccattactgaattttaagctatttatagggctcacagcataaattgtgaaaatttaatatccaaaagtgatattgttcttcatgtttcttttttctcaaatgctaagatgttaaaagatgaagtgaatcttttttgggatggaacttttcagtgaaacctatatcactgaaatcagttctgcccattcatacttcgaatgttttgagtgactggtggcttgagtttttgtttggagttcttgatataaggttcaattttgagtgacattaaatagtcagttatagtggtgtaatttgatgaactgtgaactttagtttttgaactatttgaggagtgttagtcttgaagttttcatcatagagagtagaattttttttatttttttatttttttgagacagagtttcgctcttgttgcccaggctggttgtgcaatggcacaatcttggctcactgcaacctctgtctcccgggttcaagcgattctcctgcctcagcctcctgagtagctgggattgcaggaatgcaccaccacccctggctaattttgtatttttagcagaaacggggtttcttcatgttggtcaggctggtcttggactcccgacctctggtgatgtgcccacctcagcctcccaaagtactgggattacaggcgtgagccactgtgcccggccaagagtagaattctttctagga

SEQ ID NO: 80375 - DNA, 1038 bp, Homo sapiens
ctgagggctcaagcgatcctcccatctcagcctcttgaagttttgggattataggagtgagccaccacacctggccagggtgagcttcttgagatttgaaagaagtggataggagtgatctaggaaaggttaaatttctttcagagttaacaacaagagcaaaggcatagagaagaggaaatatcacggagctcagagctgggggaaggggaaattggatactagaaaaatagcaagggaggatcctagaacaatagcaaggggattgggtgggaagtaggaagtagaggtttgggggtagatcttggaatagctttaaaaatggccattttcaagagttgttgggacttcttcctgtggttccagaagtgggaaattccaaaatcaaacgtgttttagatggattactgtggtagctctgttgaggatggatttgagagggtctagcctggagacaggtggattggttatgaagctgctgaaatattataggcaagaattagtgagggcctgcatcattacaatgctggaagggatggagaggagggcccaagttggagaaacacaggccacctgaaaccctgaagaagttgtgacttaccaaagtcacagtcaacagacacgtggtcagaaacccagcctgctagccccttgtgatttccaaatgtcctgggtttgatgcactgttcagtccctgattgaatggtaattacgctgtaagagggagagagagagcactgtccatatcttcctgtatgttagcaatttagtgtttttattttattttttttgaagtgcacatatttatattcagttcgggtgaatagctcaatgttctgatgatgatgtttgataaatacccttgaaagtttaacttactatgctaataatctttataagcacagatttttagcaggtagctaatttgttttctccaactttttttttttttttttttttttgagacggagtcttcctctgtcgcccaggctggagtgcagtggtgcgatctctgctcactgcaagctccgcctcctg

SEQ ID NO: 80376 - DNA, 1050 bp, Homo sapiens
aaaaaaattataagtaatttgaaattatttgagcacatacaaatgtcccaattagaagtactcagtaaatgctagtgagttacttagaaagaaactgcttgtgagaaatccatgtgctgatagccaagatttattgagcatgtatttcccaggcattgttctaagtgctagtaactcaatcctcaccgcaaccctaagaagtaggtactattgccatcatttcagatgcaagttaaataatttacctgcccaagacactatagctaataagtgaagagttaggtagcctggctttggaacccatgtccttaccattgtgaactgatgtttcaaatttaatgctatgggatttacaccttaagccatatatacaaaaaaattggagaaggggagagaggaggcattttatgggaaattccaaaaccaatctgtgttccctccagagatatgtggaattgttgcattcctgatatccttccaataatagattctgttatttaaaacatttttaaatgtgatagaaaaaaatagtttggcttaatccatgtttttgatttccagggagggtgaacatatttctgtgcttattggctgcgttcatttcttgttttaggaattgttcattttctttgaccattttttctgctgatgccctgttcatgttgatctgtaagagctttatacgtccttatttttgctacttggccagccgtcgctttagagtaatgtctgtctcactatagctgtgcttctgttaccttccctgatatttaaaacagtttttgtttcatgtatttaattttgtgataattgatacattaaggttcttggctattttatattcattgtagagtgtaacttgtcgtataaaagcctctaatttgttgcattataacttttgttttgaattctacattgttagatattaatactgtcacactgccccttctgtcattttgctttgtatgcatgtatacttacccagtatattatactgtcatccttggttttatttggaggggtgtgtgtgtgtgtatctacaactgtgta

SEQ ID NO: 80377 - DNA, 1102 bp, Homo sapiens
agcttggggattgtggtaaaggaaggttttcattcattcttttttttttttatttttgagaataagtctccctcttgtcgctcaggctggagtgcagtggcgcaatcttggcccactgcaacctctgcctctcgggttcaagagattctcttgcctcagcctcccgagtagctggtactacaggctcctgtcaccatgcctggctaagttttgtgtttttagtagagatggggtttcaccatgtttgccaggctggtcttgtactcctgacctcgggcgatccacccacctcggcctccctaattgttgagattataggcgtgagccactgcccccggcctcattcttttttttttttaaaccttgaattaaaatttaaattacttgacaagtttagatcactgttcagagagaactgactagtcatgaaagtttcatcttcagaaattatcctattagtgagtttataagttcatctttctgcttctcccttcctctctagaattagctaatagccagcaaaattttgattttatcagccctgtttaacttatgtttgtatctttggtaaactagatccaagaataatagatttgaacgttataacatgtattgtttcatcactatcatatggaaacttttactgtcctgttacagttttgcaaatgtttgtcctgccacctaaaggatacagcatattattgaaatttccacctgcacgtgcttatttatgcaaaggaagtcaaattgatttctgtggggaatttgcctaaaaatggatggttgaaatgtgctgcctgaaattataaatggaacaataggatataatactcattgccttattttccttaatcataatacaattaaaagctttatatagcttttatatcattagaaaagataatgtctcttccaggcttaaaaatgtagccccaaaacacaagaataaattggattgtttgtagtcacacaaacagttttgtctgttggctttgttttattgtcagaaatcctaaatattgttgacattgacttattttcaaatgatacagtctccaagatgatatgcagaagatgaactgatgtagctgagtgaccaaag

SEQ ID NO: 80378 - DNA, 1090 bp, Homo sapiens
gcatgaaaattcaaagaatattcagaaacaaagtataagtatattaaattcaaaatccacttagaaacaaacttaagatatataactagtttcccctagtgcatttcttgtacttatattatagaaatacttccaaaagggatttgaggtagtatcaatgaagagagtcaaactctgtaaaatatttgaagagatttattctaagccaaatgtgagtgaccatggaccgtgacacagccctcaggacgtcccaagaacatgtgcacaaggtggtcagggtgcagcttggttttatacattttagggaggcacgagacatcaatcaaatacatttaagaaatacattggtttggtccagaaaggcgggacaactcgaagtggggggagaaaaacagagatcttgcttcagctgtttcctaactcatttatgaaaaggtaagatagccctctgtcagaagcaaaaatatctacgtgattgtatagattttaaaaatctatataaatagctgttttaaagttcttatctactaattccaacatttgtgtcatctttagtactgttacagtgactttttttctcgttaatatatgtttcaatttttattgcttcttcctcatctggcaattgttttgattgtattctgggcattgtggatgttctgttgagagatttaaggattattgagttttgttttgatagctactagagaatcaggttgatcctgttgaggtttatttttagtttagttttttttttaaggaagatctaaagtgatacttattatagaactagagtagtatatttttatatctgttaccagcggcaaatctatatgggtctgcagcaacctcaattcttgcctcctcagaagaaagaatttgactgaggggcataaggcaaaaggagagaccaaggcaagttttagagcaggagtgaaagtttattaaaaagctttagggcaggaatgaaagggagtaaattacacttggaagagggccaagtgggcaacttgagagatcaagtgcccagtttggcctttgatttagagttttatacgttggcatacttcccaggtcttgcatcccttct

SEQ ID NO: 80379 - DNA, 1055 bp, Homo sapiens
cgctccttgagtcctggcctggggcctcggatctgtgtgtctgtctgtctcagtttagttgctgcaacccagcgagcgcctggagcccgagtggatgggttgtttccgccaactctggacacttcctcaagtgcagcctaagtacctgcggccccttggcgcacttacagaagtagcttttgcacagcgagctcaccttggagctctacagatctggaagttaagttttctttttatttgaaataacatcagccctcacttgggaaggggattttagggcgttctcgggcccacctaagtatctggaatttgtggtctagtaagttttttaagcagtccgcacccagcaccgtacctcccagcctcctttgccgtcttactaaaagtgcatgcttgcttctcttcctgtctcctttgcgatctctaccacgctgcgcttcgcccttttcgggctatgagtctaaagcttggacgtgggtagcaatcattggatgcctgttggaatttggaattagagaaatagatacccgagagagatctaaggaatcgccttgtccaaccctcctttcacagttggaggcacccaggacccctgacagtctgaagatttttcaaggatcacacagcttttaaaatccgcgtgtcttctacttgattaatattgttggaggtgatggagtaactgggcttactagggtcttactgggtctcaatatacaaagaagcaaacattttaaaaatgtgacttaaaatacggaactcttcaattcctatagatttttgttggcatcatagttgaattcctttagaaaacaaaatcctagccctgaaattaatgtgaggaagcaagcagatgggcgtcctgggactttcctataaatctctgcagggctggagcagggatttcccagaggtctgggcctgggaaatgagtttgggtgatcaggatactggagccccttctgaataagcaactgggttggtttcttgtggggaggctggccagtggaactcatgtgatctcctctgtgcccagcactgggcggggcaccagc

SEQ ID NO: 80380 - DNA, 1046 bp, Homo sapiens
tgcacttttgtaacaagaggcaccagcaaacattttgctgccatatcttgtgatcttctaaggatggttttttggagaggggtaacatagaaattcaaaagcagaactgatttttataaatccctcataaaagaaaattttaaaagctcccgaagtggctttggacattttcaaatatgttaattcacagtattttcacttaatcttgaaatttcaggggtcaccaagatggtgaagcatcattctttaattcagtgaattaagctcctactatatagcagccactgtgctaggtgctggggaataaagtagtgacaaaacaaactccctgatctcatggagcttacattccattggatagagagagaaatttaaataaagacatagtatgtgagacggtaaatgctatggagaaaagggctgggctgggagagggaccactgttttttgtagggtcaaggaagccctgtgaagacaagatcctctgggcagagaccttaagaagtgagggaacgagtagaattgaccaggcaacctggaatgcagttcctcggagtcagaggaaaacctagatgtgatctcactccctttcctgccccaagtccccctgaatgctatgaaagtgcaatctcagatcagtgattatccaaaactgctccttacaaatatgtggctactgtgtgtgccaagagctttgaggcactgaggtgtaacatgtttatggagctgcagctttttttttttttaacaaaaccacaccaatctggttttctttttaaatgagtaagcagtgccagaatgtgttacaaatgattcacatttttaggcctgggtgcaagaaagcacattaactcatttgaggtaggaggacaggttatacaattcccattttacagatgaggaaactgaggcacagagagacggtgatttgcccaaggtcatgcaaccatggagcatggacttgtgagttgtgatgcacatgttcttgatttagaggtcaaattggatccagcagggatacagctagaagattactgtccttttgc

SEQ ID NO: 80381 - DNA, 1693 bp, Homo sapiens
tggcagtacattgagctccacagagacagcgccagggcaagtgagagccggacgggcactgggcgactctgtgcctcgctgaggaaaaataactaaacatgggcaaaggagatcctaagaagctgagaggcaaaatgtcatcatatgcattttttgtgcaaacgtcgggaggagcataagaagaagcacccagatgcttcagtcaacttctcaagagttttctaagaagtgctcagagaggtggaagaccatttctgctaaagacaaaggaaaatttcaagatatggcaaaggtggacaaggcccattatgaaagagaaatgaaaacctacatccctcccaaaggggagacaaaaaagaagttcaaggatcccaatgcacccaagaggcctccttcggccttcttcctcttctgctctgagtatcgcccaaaaatcaaaggagaacatcctggcctgtccattggtgatgttgcgaagaaactgggagagatgtggaataacactgctgcagatgacaagcagccttatgaaaagaaggctgcgaagctgaaggaaaaatacgaaaaggatattgctgcatatcgagctaaaggaaagcctgatgcagcaaaaaagggagttgtcaaggctgaaaaaagcaagaaaaagaaggaagaggaggaagatgaggaagatgaagaggatgaggaggaggaggaagatgaagaagatgaagatgaagaagaagatgatgatgatgaataagttggttctagcgcagtttttttttcttgtctataaagcatttaacccccctgtacacaactcactccttttaaagaaaaaaactgaaatgtaaggctgtgtaagatttgtttttaaactgtacagtgtctttttttgtatagttaacacactaccgaatgtgtctttagatagccctgtcctggtggtattttcaatagccactaaccttgcttggtacagtatgggggttgtaaattggcatggaaatttaaagcaggttcttgttggtgcacagcacaaattagttatatatggggatggtagttttttcatcttcagttgtctctgatgcagcttatacgaaataattgttgttctgttaactgaataccactctgtaattgcaaaaaaaaaaaaaaaagttgcagctgttttgttgacattctgaatgcttctaagtaaatacaatttttttattagtattgttgtccttttcataggtctgaaatttttcttcttgaggggaagctagtcttttgcttttgcccattttgaatcacatgaattattacagtgtttatcctttcatatagttagctaataaaaagcttttgtctacccaccctgcatatcataatgagggtaaagttaagttgagatagttttcatccataactgaacatccaaaatcttgatcagttaagaaatttcacatagcccacttacatttacaaactgaagagtaatcaatctactcaaagcatgggattactagaatcaaacattttgaaagtctgtccttgaaggactaatagaaaagtatgttctaacctttacatgaggactctattctttaactcccattaccatgtaatggcagttatattttgcagttcccacattaaagaagacctgagaatgtatccccaaaagcgtgagcttaaaatacaagactgccatattaaa

SEQ ID NO: 80382 - DNA, 1051 bp, Homo sapiens
cagttatggatgaaaactatctcaacttaactttaccctcattatgatatgcagggtgggtagacaaaagctttttattagctaactatatgaaaggataaacactgtaataattcatgtgattcaaaatgggcaaaagcaaaagactagcttcccctcaagaagaaaaatttcagacctatgaaaaggacaacaatactaataaaaaaattgtatttacttagaagcattcagaatgtcaacaaaacagctgcaacttttttttttttttttgcaattacagagtggtattcagttaacagaacaacaattatttcgtataagctgcatcagagacaactgaagatgaaaaaactaccatccccatatataactaatttgtgctgtgcaccaacaagaacctgctttaaatttccatgccaatttacaacccccatactgtaccaagcaaggttagtggctattgaaaataccaccaggacagggctatctaaagacacattcggtagtgtgttaactatacaaaaaaagacactgtacagtttaaaaacaaatcttacacagccttacatttcagtttttttctttaaaaggagtgagttgtgtacaggggggttaaatgctttatagacaagaaaaaaaaactgcgctagaaccaacttattcatcatcatcatcttcttcttcatcttcatcttcttcatcttcctcctcctcctcatcctcttcatcttcctcatcttcctcctcttccttctttttcttgcttttttcagccttgacaactcccttttttgctgcatcaggctttcctttagctcgatatgcagcaatatccttttcgtatttttccttcagcttcgcagccttcttttcataaggctgcttgtcatctgcagcagtgttattccacatctctcccagtttcttcgcaacatcaccaatggacaggccaggatgttctcctttgatttttgggcgatactcagagcagaagaggaagaaggccgaaggaggcctcttgggtgcattgggatccttgaacttcttt

SEQ ID NO: 80383 - DNA, 1044 bp, Homo sapiens
aagatggcaccatgctatagcagcttaggtcatggaggttggaatgctaaagtgtttcctgttctggggcaatgcagccacatgaactcccagtaactgtccacactggtttctggtcctgtgaggactgggagacccttttatagcaatgactgttcctgtctatggaggtgatggggcaaaggattccagcttactttttccccgtgagaagaagtttccctggctctgagctggtcctggtgggggataccatgtggcagagggaggatatctcacttccctctctgtggtgctatcctgggcttccatgctctatagaaattttgttgctcccccggtgctttccagtgtacttcatcagtaactccagtcaaagtgtagtttatttattgttttggtacctttttgtgtcaggcaactctagttggccatcatgctgacatcactctataagttactctagaatgtttaatttaaaaactgagcaaagtgtatcacatcttgggatatggtacctccttgtcaaagcattattaagaactttgtagtagaaagatagattaaactttttctcagaatcatgtggagattactttatatagagaacatatattttagaatagtttttcaatataataaacgtgtatttattatcttggccaccaagatcattgccattcactcaagacaagaaaggattctctggtttccttggtggtgagtttctttttgatgttttatcagagctttgtggaactgtggttgtcatcctggttatgtgctcaaaaacttggcagcagaagcagtactagtagtagtaacatccatttattcctgcaagatgtgaaatgaggaaatgcttattaaaacaggagtcaacatgtttttaaataaagggttgttgagaatattttaggctttctgtgctataaagtctgtcacaattcttcaactctgcttttgtagcacaaagccagccatagacaatgtgtaaatgaataagcatggctgtgttccaataaaactttatttacaaaaaca

SEQ ID NO: 80384 - DNA, 1949 bp, Homo sapiens
aaacaagacacaaaaatcagtaaccataaaattgtactacattcgagtcgaggttgtttaaaaattgaaacacatcataaaaacagtgaaaagatacgccatggacagggtaaagatgtttacaacaatatatttggtaaaagatttttattcagaatatataaagaaccccttcagatcattaagaaaaagttaagccagtcaatttaaatggcttaaacagacagttcatgtgagatgatatccaaatggctgataagcatatgaaaaggtagtcaatcaaaatcattagtccttaggtaactacaaattaaaatctcagtgtgacactaccagaatggctaaaataaaaaacactaccagtgttggtgaggataggaagcaattggaactttcatacactgctggtgggagtttaaatggtaaaccactttgaaaaactgtcagtgtatcttaaagctaaacattgcccatgctatgatctggctactgtattcctaggtatttacccaagataaatatggacatatatccaccaaaacacatggataacaatattcagagtagtttcctttacaataaagctaaactggaaataacccaaaagtccatcaataagagaatggagaaatacattatagtgtgtttatacaagagaacaccaaacaacaataaggaaaaaataacttgtttctagccaagatggagcaccagggattggatttaccttctcacttgaaacaaccaaaaatacccagataacatatatgaaataatgtttttcaaaaccttggactttagacaacaaaagatagttatcactcagagatagaaaataaatgaattgagtcataaaatgtccccagcttactgccttgagagtttcctggtcttggtgcagggaggggtatgctaggcagaacctgttagacatcttgagttaaggagatagacttaagagtccagcaagatggccaggcatggtggctcaagcctgtaatcccagcattttggaaggccaaggcaggcggatcacctgaggtcaggagttcaagaccagactggccaacatggtgaaaccccatctctaccaaaagtacaaacgttagccaggcatgatggtgagtgcctgtaatcccagctactcgggaagctgaagcgggagaatctcttgaacccaggaggcggaagttgcagtgagccgagatctcactgggcaacagagtgagactttgtcttggaaaaaagaaaaagagtccagcaagaccaagtgatgatggtctgcaggatagagtaccagagaggagagaactacacagacagaagactgtggagctctgcaggagatcctccataaggatgcagcatactactgatcagcacacacatttgaggaaacaatctgaggttgaggaaagaatcatccaagagaatgaaaaagaacagtgcccagcattcattcaggaccaagaacagtgactgttcccactaggcatactttaaaaactcataatccaggaggcattgaatagaatactcaggaagctctcacctcagtattgggggaatagttaaccctagactgtgtcctgctctggatctaacaaattaaaacagcagtaatgaaatgattaatctgtttctaaataacttaactgtatcctagcataaagtatgggaatataaaaatatccagcacccaacaaggtaaaattcaagatgtctagcatttagtcaaaggttaccaggcttgcacagaagcagaaaaatattaacattattccccataatgaggagaataatcactgaattgaaagcaattcagaactggcacatattttagaatatgaaaacaaagatattaaaaattactaaaaccatattccatatattcataaagttaagtagaggcatggaagatattaaaaagacacccaaatctaacttct

SEQ ID NO: 80385 - DNA, 1087 bp, Homo sapiens
ggctctgttgcccaggctagagtgcagtggtaccatctcagttcactgcaacctccacctcctgggttcaaatgattcctgtgcctcagcctccctagtagctgggactgcaggcatgtaccaccacgcctagctaatttttgtatttttagtggagatgaggtttcaccttgttggccaggctggcctcgaactcctgcccgcttcggcctcccaaagtgttgggattacaggcatgagtcaccgtgcgtggcctccccaggcactgttcttatcactttacactcatggtcctataagagagttgctaatagcatcttcattttagaggtaaggaaatagagtcaggcttgaaacccaggccatcgtggctctaaggacgtgacctgatgaagtagatgttacacctgaggaatcagaggacctagagccagtggacaagctgagttttgaaggcggtgctgctcacccccagatccctgcagtactcatcctcctgcgggtgccaactgaagggatggagggctggatttgggtgaggtctgagtgggaaagaggcttcttgaaagcctctgtggtggagaacctagaagagctgcctgaggatcaggctcttgttggccacaggcctgtgctgcaggcattgtgcctgtgtgttttggcagcaggaaatttttttcttcaaatgtattgacgggggccagttaaactgtttactatgaagttcctgcaagtttttatcatgctcttgtgatttgacagttactgatgaaataatccaaatattagcctaggaggcctgtgctgcctacatatgtcatgctcctcccggctgatgaaaatcacatttgcttatattcatcagtcattaggtacttgcatagtatatttgaccccaaggagaaatgtcagcatattttcaggatggctgtccgctccactctctgtttcaggtttgaagtttgaggaaaaggctgttggagtttagatgtttaaaaaattgttaggttgctctgctaggcaacaggaaacttcattggagtcagataacaaatgaagctattcaaccttccaccagatatttatt

SEQ ID NO: 80386 - DNA, 1051 bp, Homo sapiens
tgatacagtctgatttggcttggctctgtgttcccacctaaatctcatcttgaattgtagttcccataatccccacctgttatgggagggtccaggtggggataattgaatcatgggggcagttaccccttgctgctgttctcgtgatagtgagttagttctcacgggatctgttggttttataaggggcttttcctccttttgcttggtgcatcgccttactgccaccgtgtgaggagggctgtgtttgcttccccttctgcgatgattctaagttttctgaggcctccccagccatgctgaactgtgagtcaattaaacttctttcctttgtaaattacccagtctagcgtaagtttctatcagcagcatgagaacggactaatacactgtccttcccccaaagctgttaaacagctaccaaacctgccagtctccatttcttagaaatttctgtgagaacactccatgaatcagtgggagttgtttacaaaagattaaaagaaaaatcacttgtgtagctgtagtctgaggtgggaaggtgcacccctctttccttttatctgggtaaaatctgccttggtacattcttgtgatgccaccatgtttaccctggaataattatttattgcctagttaccctttggagccatgttgagcacaacatccagtgtacctcttcggatattttaatacaatcatgttgtcaccccgcatcttctttttgccagcctgctgaataattttatttccttaaactgatttctgtgctttggggcttgctgtttattatcctgactcttccctttagagtgtggttaatgagtcataacgcgcaggtctcctcacctgtgtgagctctgatgtgctgggcttggaaacaaggaatgttattgggattgattagtgatgccttgattgggcttgggaagggggaatggctacatctgtgctgcctctttgccagttctatggtttttcaatctttccaatcatggttacctaggtgccgattaatcctgctagttgctcgaaaatttgagatgagtct

SEQ ID NO: 80387 - DNA, 1047 bp, Homo sapiens
tagtagctcagttttccatcatgaaccagagcctcatctttcatggttcctgtgcctccgagggctgggctactggggtgtctgtcagtccagatggctttgttctcaagtttcctccacagtggatatgaatgtttgcaacttacactcaattacaacgctttcctctacttttctccaagtttgctgaaatctttatttgtggatatctcctctctttttgctttgtcctcataggttaaaacgttttaaaattccctaacagtaggaaatttagtagggttttggaagggagaggaggtgtaagatggtcactcttccatgtttaactggaagtggaaagtctaggcttttgcttcaggcctgggaggtgcacatgaaacagtccctcccagtggctgcctggggggtccctgaagggtgtgagaccaccgtgaatcctggggcagggcacttgcagtacatgtgctatgtgtttgctagtattgttttagatgtttgatctcctagcctttgcttttctttgtatttttcctgctttagtccatttcccttctagctccttctgttctcatttatcttctgctgctgcttggagttacattttcagcaagtctgtaacacctctctgaaccaaaggctctcaagttcatctttctttctccaagcctacgcctgtgctgctgtcatgagtggcgagcttctgtttcttctgtcttcttgtcagtcccaagtgcccttttacagagaatgcctgtttttcactgtctagctcagttaccaggagtccctgtgaatgacacccacaggtccctcaaagaagtcagatttctcttggacctgataaagcaaacaaaatgtgacccaagcaggctgagttggacgggtcccttcttaccttcgccctctgccatgttgacattcttatctgatggcacaggctgggagttcaggatccacttagatggggtccgttcaggggataccagcgttcacatttttccttttaagaaagggtcttggcctgaatgttccccatccggacac

SEQ ID NO: 80388 - DNA, 1032 bp, Homo sapiens
ctgtgccctacccacctgaggtctggcatggggcccaggaatctgcattttatgagctccccaggtaattcagatacatctggttcgtggatatgtgtttcggcccactaagaccggatgacctctgaagcctccctaaggcctgttgtctctattagtctgtgcctctcgggcaagacgcaccttcctgccaagtctctctgggtgtttgtctttggatcagagaatcagtacgcagagcagggctgagggagttggccaagcagcgtgcataactctgcgcagcacctgtcctgcattatcctccacactggccaaggctttgtgtccctggcttcatggacataaaattttatcacaggtttttatgtgttatcacattgtaaaagtgccataaaatcaagggtccagttttcagtgcatctgaaaacgtcgtattcctttaagttataatcttggttgcagtcattttggtaacttgttgagaagcctcatcccgaccctgccatttattagctataactagatttttaattgctccgagcctctgttttctcatctgcaaaatgagattaataacatcgacatcatgaagtctcttgaaaggattaaatgagataacctgtgaaatgctactgtaatggacctcagtgctcttttctttcttttggctgtttctgccccatccctgcttccattattatacatcttttcatgagcttattgcccatttatatgtcttctattgtttttaatgaggtgaaattcacatagcataatattaacccatttccttcacatccttgttatttatttttttttaattatatccatcctagtagtgggtgtgaagtggtattcattgtggttctgatttgcatttcttgaatggctaatgatgttgagcttcttttcatgtttttgtgtgcttattggccattcatatatcttatttgcagaaaaatatttattcaagtcctttgctctcctcttcttttttttgtttgtttgtttgtttgtttgtttgtttct

SEQ ID NO: 80389 - DNA, 1063 bp, Homo sapiens
tggtgcatggctgtcacccaggacccatggacaatccccaagggccaaataacgctgaaattggcattgaccaaggctgcggccaaatgccagcccatcaaggcaaatgagtcagtttgccagtgtctgacccaagcctaggagaagaaacaaaccagcctccctctctctagttctttgaaagtaagcccttagcctgatatgtttgttgcaggatagacctgtggccctcatagtgctcagaactgtcagcagaacttcttcactggaagaaggaagatgcacatctttcatggaggttgtgctgtctatctgggacaaagggggaatccgttacaaaatctgcttctttttgaagctgcacattcagaaacagactatggctaagtgacacactggagcagatgggccagggctgtgctggatttgaaaaaggccctccttcctgagcagaattaatggagctcaggtctggggagggtgagcgcactcttggcaggcagctgtcttgtgtgacttgtgctgcactcatctgtgaaacatgttggatctgagaaatgagtcttgaatcctgggtcatgttagcatcagaatcatcttctgttaattacatgagacaatacatgtgaggtgcttagagcagtgcctggaacacagctcacgttcaggaaatgcaaatacttgtcagccccagcaacttcttctgcttttagttgagggctcttttcttaaatcagtattgtgggctttgagatggtatttcaaggaaacagaatttcctactctgtttaggacttgaaccaagtaccccctaacctctccccaacccctcccaacaaaaatgcacagattttatttaatttttcttttcagaatctttatcccttagaacctagacttctagaatgacaaatatatttaatatggtttcacagagtttgtctggacccctttttgaggagaattctggggctgatttcagacccagagaaaaaggatataatgattgatgagtgatgtctgtcacgggtgcgagagaagggtgggaggtatgtgtgccatg

SEQ ID NO: 80390 - DNA, 1053 bp, Homo sapiens
gagatcctgaagtcagaggacagcctgaaaacaggagagaagaaacaacaggggtgcagtctcagcatgggagtccctcccttctctgacccccaccttgagctgatcgccatgcaggttaatagctttcactccgggtttccttgccttccccctgcccacccccaacttctgcccctgccctggtgtgccctggcaggcgcagaccctgcagtggctgcacagtggcccttggggacattccgtggctacagccactttggctactctgacatgttcgtccttgttctccaggcagccgtgttggaggggatcccacctcagccatggacggtgcctgaagcggccctccccaccccacagcagctgatgggggtccttggataccaactagatgtcttctttcttgtggcaaattctcttttgaggctgtgtgtgccaggcacacccagatcctcagagacagtccacaagtgttgagcttcagaaggtctttgagttccgtttgtgctcgagtttttctgttctcttcctcccgactggcccatcttgcatatagaagggtcttaagagacagcctttgccatatgctaaaaggttccattttacccatatgccagagcctttgtgcttactgggcatgtattatcagagctgggagggaaaattatttcttctctggacaaacaaagtccacccctaaatgatctgccttgactaagccagtggctcatgcctgtaatcccaacattttgggaggcagaggtggaggctctcttaaggccagaagttcaagaccagcctgcataatatagcgagaccctatctctagtaggtaggtaggtagatagatggatatattagatataaagagagatagatggatatgttagatgaattagatagattagatagaccctgtctctactgattgattgataaataataaatagcctgccttgcccgctgtattagtttccagggtatgccatgacagatgactgtaaagttagtggtttaaaacaacaaaaattattttctaaccatctcaga

SEQ ID NO: 80391 - DNA, 1004 bp, Homo sapiens
taaatttaaattattgatttttgtggatacatagtaggtatattatggggtacatgagatgttttgatacagacatgcaacgtgaagcaagcacatcatggagaatggggtatccatccctgagtcctgtaatgatcttaatgcagtccttcctgctttctctgcagggacttttaggaagatgtaggaaggaatgatttgtccactgtggctgcagttacctccattaactctagatggcactcatgcattgattgggaaaccagtcactgataatattaactgcctggtagaaactgacaaattcttcagtcagggtggtgaaaagttaaatataggtggctcccaggcatggctgggtgaatagattggtcaaaggagaagtggtgaaaactggggactggctgtaaacacatttcatgagtacatacaaacccccttgccttctgttcattctccctcacagcagccaaagtgggcaaaccagaaaatggactggccagccttaccagtgtgcctgtctgaccagcgggcgacctggtcactgccccagagggtcaagggaaacctattctccttggccacattccttgagatggtgatcacagaggacactcagttgccacatcaggactttgatattcagatggaaaaggcttatatgttgatttgagttagtaattagggcttttaaactgctcttgtcgacataaacacatacactattattcagtacttctggtttaaaactcttgttccactgaacacattatttgggggtacattgatactgtttctatgtggcatttcagacactggtgaagaacatgagctttggagtcagacttgggttgctgtctgggttccatcacctactaactattgtgtggtcttgggcaggttaattaacctctctgcgcctcagaaaatatggaggtgataataaaacctacttcacagagtcattgtgaagatggagataattctgtgtagtacttacagtg

SEQ ID NO: 80392 - DNA, 1050 bp, Homo sapiens
tccatctcaaacaaaacaaaaacaaaaagaaaccccactctttcctctcttgcacctctaggaaagaatttttttctttttaaaggtaataaaccttaatacttaagttaaacaaggcattttctgtatgttgatgtaactggatagctttgaaaagaagggtgggatcatccctggcctgggtcttggagtctggccaccaaagaaagaggtggcctggcccctctcccagctgtggggctccagggccaaggagcccgaggccccgcgtgtgacacctcgctcttaagatactctaatttatagttaacgccttttaagcaaacaagagggagaaaaagaatctggttcatattatggcaacttgcaatgaagggaagtctggaagttcaaagaaaaaatgtcccaggaaaagcacagcccgttaaaattcattctaagtggtcagaaaggtaattgaaaagaaggctttctcagtgcagtgttggcaggctagtttccctccctttgcaatctcagctctccaaacatctctccctgacactaaggtcattccaaagaggaacaaaattaacaagaattcattactaagacatgctaaattgactgaatcaataaaatccccaaagcccagttgaagagatcaagatgggaggaataaacactctctccttccaaagccagaagcctgtgggacccctgctacagctttgattttcaacatgaatcttctctgatttgactagaggctccctctcccttcctatgcccacctttgtcacccacaaatggctgcatcacctgctgatcacgtggggctggattttctaccatgagaaaattcctgcctggtttctctgggccaaggcatcttttgtggctgtgtgtatttgttggaggtctgcagagcaggagaaatgagggctagaaaagagcagaactttgctttccctccttctgcctgatgtagaagtcttgagccccttgaggctagaaggttttcatacttgatgcagcagcggcaccacaatgatgaaatcagaagggctt

SEQ ID NO: 80393 - DNA, 1051 bp, Homo sapiens
atgtgtgtgccttctgaagtatgagttgtatttgctgagcaattgagtcttccctgggtttctgggatcaggtgcctgcagtttgataaaataacctctagatggagcttttgcaccttttggttgagctgggttgcccgtggggcaaatccccggtaatctgagcaggatcaaaataaacttcgttactccttcttattacgtaagtattgtgtgtttgtggtgggaacactaggaaatatagatttgcaagtgggagaaaataaaaatcaccgtgcagaggtaaccagcattaccatgctggagaatagccttctgatcactttttctgtgtgtaatgaaaatggtttcatcctcgaaatccccttttgtaactttttttcacttagtaaattgtcacatcaatacagcatacaccaatcagtgtcactaaatattacaacaccttagttttataattaaagagtatctcagaacatacagtaagatgtatttaactcagaccttgtgattaaatgtttacattatttaagatttttcaccattatgaacaataccaagatgaaaactcttttttagacaaattttggctcatgtccacgattctcagagatggaactggtgttcgttgaaaatgtatgcattatgaagtccgctgatattgcctgcttagagcaggactcccacctgactagtaggagaaaatttaatcacaagggtccttaaaggtggaagaagaccaaggcagatgagggaaggttgtgagaagaactcaacctgccattgctagctttgaagatgaaggggagacctactgatcgggtaggagatgtgctctaagtaggcattattggcaggcttagtaatgcatatattttgaactaaaataaccccaatatcattaggggttattggaaatccaaagtctcaggccccatcccagacctactgatttaaaatcatgttaagatacgaagtgatttgtatacactttcagagacagggtcttggtctgttgccctggctggagtacatcagcgcgatcccagct

SEQ ID NO: 80394 - DNA, 1101 bp, Homo sapiens
ttctgtgcttattgaccatttgtatgttttttcctggagaaatgtctattcaaaccttttgcccatttttaattgagttttcattttattattaaagtataagaatacttcataggttctgatacaagtctcttatcagacatgatttgtacattttttctcccattctgtggattgccttttcaccaacttgatggtatcattagcagcaccagggtcttgaattttgataaagtcccatttatttatttttcctttttcacttgtgcttttggtgttacacctataaaaccatcacctaacccaagctcatgaagttgctcctgtgtttccttctaagagttttaaaatcttagctcttatagtcaggtctatatattagtgtcctatggcttttacaacaaattaacaaatttggtggcatcagataacaaatttattatcttacagttccagagatcagaagtccaaaatgggtctcactagactgccatcaaggtgttggcaaaaccgcaggccttgtggaggctttaggaaaggatccctacttctggctctttccagcttctggaggctgccacattccttggttcccaggtccccttcatcttcaaagcctgcaatggcaggttgagttcctttcacaaccttccctcctctgcctggcccttccacatttaaggaaccttgtgattaattgtgcctaccttgataatctaaaataatctctgtattttaaagtcatcagagtagccatgttaattccatctgccaccttgttttccctttgctatgtaatgtaacatattcacaaatttcagggattaggacgtggacatcttggtggagacattattctgcctaccatgatctatgatttatttgtttaatggacaagtaaaaattgtatatatttatggtgtgccacatgatgttttgggtttatgtacacattgtgactgagtaaatcaagctaattcacttatgtattataagaacacttaaaatctctcttagcagtttccaagtatataatatattattattaattatagtgaccatgatgtagaatctttgatgtgttttgagttaatttgtgtg

SEQ ID NO: 80395 - DNA, 1023 bp, Homo sapiens
atttattttgtcattgatataaattagagaaataactttactcctcaagtggctggccacattcccaaccctttgccttcctttccttgatgatttgaagtgactcattgattgcacacgaaatccctctacatgtttagtcaggtaaatgatctgtctcttctgtcgctggttgtttttgccactgttttcattattacggcttcgtgctatgttttagtatctgacagttaccttttgtaagaaaataagatttcataaaataatactttgtgcaatttgaattaaggttttctagacagataattattgcttgaagcagtggttcccaaaccagcaggcatccacagggcttgttataacacaaatcaatgggcttaacccccagagttcctaattcataagtctgggatgaggcctgatagttgcattttaaaacaagttccctgatgatgctgatccagggaccatagttgagaacctctgccttagagcaaatacttgaaacaaagaatacagtcaacatgagaatggttccaatgcattgtctgaactagctcccctgtgtgctgtaagagttaggatgggcctgtatggtttttttgagcatctccctgattgtgtctctggcccttctcctggccccactttaaatccctgagcccagttgagccaagtaacataaccctcctttcagtgaacctgcaaggtgctcagcctaactgcatggctgccctgatagttacaagtgctgatccagccaggctttggcccctttcagatagaaatcagagaagggtaaggatgcagtgacttgctttgttgtagattctcatgattgtccttatctttgaagagaagggagagcaatcaccagaaatgcagcagagaactcttctttgctttcctcatttcccacctctgtggctctttaatggcttcttggttttgtacaaagggagagttaattactaacacctgcttctgcttctcctttcctgcatggccagctccctgactgat

SEQ ID NO: 80396 - DNA, 1101 bp, Homo sapiens
atacaaaattagccaggcatggtggtgcaagcctgtaatcccagctactcgggaggctgaggcaggagaattgtttgaacacaggaggcagaggttgcaatgagctgaggttgcaccattgcactccagcctgggcaacaagaatgaaactccatctcaaaaaataaaaataaaaaaagagtcatggatgtgtaaagcattggggccattggaaggataggatggcccaacaagggcagatagagaggagacagggcctagaatataggaatttaggagctaggcccagggtgtgtcaaggagtccagagcaatggtaacaaggcagtgctgtcattaagagtcaggctctggacaaaggcttttagggtcagaatgccgactgccacctaccgctgtgtgacatggagcaaattatttaataagactgttgtcatggttacatgaaactattttaaaagtttttaaaataattttagtaatactgggctcatagtgctcaacgaatgttggctgattagaggcaaaggaaatctagagccatagccctggaagctatggaaagagagtggttcaaacaggaggacatacgtttcacacccattaagatggttattgtcaaaaaagtggaaaataataagtgttgtcaaggaggtagagaaattgaaccttcatgcattgctggtgagaatgcaaaatggtgtcaccactatggagaacagtttggtagcttctcaaaaagttaaacatagaattaccgtatgattcagtgattctactcctagatatatatctaaaagaattgaaagcagggattcaaacagatacttgtacagccatggtcatagaagcattatgcgtaacagccaaatggtagaaacaatccaagtgtccattaacagatggatgaatgaacaaaatgtggtatatccatacaatggatattgcttaaccttaaaaaggaatgaagttttgatacctgttacagagtggatgaaccttgggaacatgctctgtgaaataagtcagacacaaaaggacaaatactgtagtgtatgattccacttatatgaagtacctagaccaggaaaactcatggaga

SEQ ID NO: 80397 - DNA, 1043 bp, Homo sapiens
agttgctacttgagcccacgtggtctgtaaaacctaaaatatttaccatctggccttttacagaaagtttcccaacccctggctagacaacactcctggtctttcaagaactttggctttcttaaataattcctgcatttctcatgaggttactcggtagataactttgcccctttagttaggtagcagaacagaaccaaagctgaacagtaacaatgactaagaaggaggaagaggaaaaattcattcctttctttccttaactggagatattatcctcactatacctttttttctcttacagccctgtaaaaaggaatgaaagttcttccctccctgtcccccaccaaaaaactccccactggtaaatggtcatgtgactggtgataataaactttctgagatggctacgaactgcagttaggtttaaagtttcctcattaatgcaggaaaatgctcataacctgaggcttttcaagtgtttattaatttactttctggggctggctgctgatacttatttcagatcaaagagaaagcctgtgtctttagtagttactgtgtgccaggaactatgccacattttgtgcctaggtgagctcattgatagtcatcataaccataggatggcatttccctatttcacaggaggggagactagggctcaccagggttaaatactcacccagagacacacatgaagagtttgaagtacaactggagtttaacccacacctgcctaattccaggacctcagggtgtttccactgcaccgtgcagtcatcctatcctctgtggccaccaagagcctcagaatagcaccttgagcccactctaggcagaatacagtacttgatgggttctaatccattttaaaccatggtctctgctatttcaggataacaggtgaccatgtaaagtgtatctcaagtgcattgtaggctttaggaagacccttttcccagcctgctccccatgctcccaagccccactttgatggtctatgtgagtctactcagaggtagctcttatttctttaaaac

SEQ ID NO: 80398 - DNA, 1067 bp, Homo sapiens
gatgcaggcaaagagattgggatagatgatcattgagtccagagagggaagcaccttggtgtatccaccctcacctgcaaacaagcctgcaacgtatttccctcatccactcctttccctccttaccctgatgcctgagtaacgaaaggacagcctttctcctgcatccatcttcgtctttgaaaagccaaatgaaaagtgtatctcctaaaaaggccatgaggccacttcacagctttgccttttgttagccttgtcagggaccaagcaggctctgaaagcctaatgtaattactttcccttgtctaagaagagtggaagtgggagtgctcccaagcccacggctgcaaggctagctgtggtttcagcaggcttgttgctctgttcaaaacagacatgcagctcagagacatgcagcaacgggtcacttgttgtaggcttttcacttattagttactcatgtcctctgctctgtagacattttctgggcctgtggggggattgagcccttgaatgggagcaggaggaactgaatgggtgagtgatgctggaagctgaaagcagaccattgccctctagttgtagttgaagttcgcaatttccctgttgatttttttcgtgtgtagagtgaatgacaaatgggctggcctcactcagcctggagcatttaagcaggcgagaggagagctcatatggaaaatatttctatcaccgctgcatgcacatatggtctggggagacccccgaactgagcaaatcacagtgctccagcagcccctcagtggtgtgccaattattcttattaacagcaagcaaagggcaggctttagttacctgcacacagctgactcgtggggaaggccacgccggaatctgtgtgcccctagccttgtgtcacatgcagagtggcaaatggctctgcttcacctgacaatcagcaaagcagatgaaaaatgaaagggattatacaggctcacccaaatcttggtgcttttcagacagtgctcagcgtttgagagaggaaggcagaggttttgtcttatgagttaaaagtatgtgtgcttaac

SEQ ID NO: 80399 - DNA, 1052 bp, Homo sapiens
caacaaccatgtattgagtgctattttttgtgtcaagttttgtgctaagtgctgtggaattcataaagaggtgagacccaatctgccctctaaagacaggaaacaacaaataggttagtgagggctaagatataaattactctaataaacatatcacactcttttgtgagatcaggaacagcctatggagaaagtagcatttgagatgggattgaagaatgcttaggggtttcgtaggcagatattagaggaatgcattccaagtcatttttgtaaatgttctgtggaagcttgtaaagatgtactttccatttgtgttataaatatagttgtatataatacgtgtgcaattttccatgtaattgtatcatttcttttctctgtgtgggtatgctcttatatttcttaggttctactagaagtaactaaaattaagtgacttcctaagtatgttccagccttaacattatctgaatgtaggagtgaccactaaactacaaacacatatcataaaccccttgaatagagttgatgtcttttgtatagtgggagaaagtccatgagctttcaaacacacaggcctgagcttgactctctggttcttgcttaggcaggctacaagtaagttcactaagcatcattctctttatcttttttttttttttttttttttgagatggagtctcgctgtgtcgcccagcctggagtgcagtggcacaatctcggctcactgcaagctccgcctcccgggttcacgccattctcctgcctcagcctcccgagtagctgggactacaggcgcctgccaccacacccggctcattttttgcatttttagtagagacggagtttcaccgtgttagccaggatggtcttgatctcctgacctcgtgatccacctgcctcagcctcccaaagtgctgggattacaggcgtgagccaccgcactcggctctctttatctttaaaatgggaggatcatgtcaatatcgtagagttttagtgaagattaaggaggtgatttccgtaaagtgtttggtatgagaatatgc

SEQ ID NO: 80400 - DNA, 1105 bp, Homo sapiens
gacagaggaagtgagataggaagggaagcggcctgatacaggggtgtgatcaagccagtagccactgtgggcaccagagctgaatcctgctggagacatctaggagtcagtgaagcacacacctcagaattacccagcaatgaagcaaggaagcaggcatatttgtccaccagctcctttttcattgttagttgagtaccgctataggagcattacctctttagcacttccaacttgctcctggacaagaacaaagacacccccccacacacacacacacacacatgaaagagagtcacagtgtttctagcaaactgccttcaggagctgagagaggaaggaatgtagcagtgcatgggcagaggatccacaagaggaagcgccatcagcggtcaaaaccagggaagccagaacagctggagagagaaagagagagagagtgtgtgtgtgtgtgtgtttgtaggtgtgtgtgggtgtgtgtgtctgtcttccccatgaatcccatcatgcttgcttcttgattttgtccatttggaagctcagaaccaatttacaccccacctctagctgttggataagaccttaagggaatgtcatctcttcacccaccttaccctttatttctcttatttatttcccttctgcctctctttctttgtatacttattattatcctgtttgtgcctttgaaagtccccttaagttcctttcttggtataggatgagtataaataaatacaaaagccaattacacaccaaaaagatacaaacttgggactagtcacaagcatctgccacactgctagctcttctctagttttacctcagaaatattttttttaacgaggactccctggtcttcacatgaaggccctgactgcatgggaaaaccacagaattcttgcccatacatcaaccttgcattgagaactgcaaataaagcaaaatgcatgttttcttcaaagtggccacagagacagatgcccatcatccccacaatgctacaaaataggatgcagcacatgggtgacatgatgagaggtccttgaaggccaagtaggatcccgggattctattttgctgaatcaggattcaggatcccatg

SEQ ID NO: 80401 - DNA, 1062 bp, Homo sapiens
ttatctcagttaataccctattatcatgcctgtctttttttttctttctttctttttttttttgagacagagtcttgctctgtcgcctaggctggactggagtgctgtggcgcaatctcagctcactgaaacctccacctcccgggttcaaacgattcacctgcctcagcctcctgagtagctgggattacaggcactcaccaccatgcctggctaatttttgtatttttagtagataggagatttcaccatgttggtcaggctggtctcaaactcctgaccccaggtgatccacccgtcttggcctcctgaagtgctggcattacaggcatgagccactgtacccaacctatcatgcctatcttaaagatgaggaaacttggttttggtgagaataaataacttgcccaacaaccagtgagataattaaatgataaaatgagtgcatgttggaagcgagatttgagtccaggctcatgtgatgacagagcaagagccattaccattctgttctactaaagactatcatttaacacttcctgctgtgtgtgagagcagatcctctccctttattgcctcaatgattggctgggggtagtggggagaattgatgcatttatgaaatcagcctagaatggaagcctttagcagctagagaaagcactccaggatagctactctcacaccactccaggggttgctcccttatggcctccatggagcttccaagacaagggggcagaaaactgggtgagcatgtccaggctgccggactttgcaaggcactgtcatgggcctgccaagactctgctcctgttggccgctttataaatgactgtaattgcaccagtctttggtgaaagactttgaacttaataaaaatgtcaaactcattaagagcgttttcaagaccaaataaactctgaagaggctgtaatctttgatgacttcagatttgtgaatcacaaggacgtggaaaaaatctagctgccctgtacagagctactgaaatgtcactatttattgcttcagcgtcatctggtaatggaagtttggttgcga

SEQ ID NO: 80402 - DNA, 1026 bp, Homo sapiens
atttctcccttaacatcagtgctggtcggttgtgtctagactgcaaaacggaggtggtatgacagggtgtgtccaaccttccatcctgtcatggccaggaaatccatttttaaggtttctctgggggtctccttggccaagaggaggcccattcagtcagctgggaggcttaggattttatttttagtttacagtaggcgaggcatctaagaaggtcttgtagaaaagggttgtggagttttctagggctcagatccctgccccagctggtgacatgcatgacagagcctcagtctcatggggctgatcacaaaggctgcgggctccatactggcaattctctcccagagctgaagctgctggttcccctgacgtcagtgtgctgtgtttcagtgctcggtgccctgcggcgtgggacagaggacccgtgatgtgaagtgtgtgagcaacattggggatgtggttgacgatgaggaatgcaacatgaagctccggccgaatgacattgagaactgcgacatgggaccctgtgccaagagctggttcctcaccgagtggagcgaaagggtgagtgtgatggcgggcagagcgccggggaccgaggtctgccaggtgcctccaaaaccacacaaagatgagtcactagctcagaatcccaagactgatttctggctctggggggaaaaaaaaggcccagagaggaattatcgtaggctttctatccttatgtgaggactgagggtctccaaaggtgaggagggtgtatgcaaaacttgattgaattctccttagcactccatgtggtcactccataatactaggtgaagtgaatcattacatcccatcgttcatatgtcttgtaagtgcctggtgtctcatagacactcagcaatggcaggcccctctactgctttttgccaactcaaaacatcccacaccccgttccctccccagtagcctggcctcccatgggaagtctcaggtgtcaaagaataactcaaaggcatatatagtcaaccattagcc

SEQ ID NO: 80403 - DNA, 1033 bp, Homo sapiens
agcccttaatatgcatcacatttgtggttccatagtgcttctcctttgcttgtttgatctctgcatggcagcagtggggcagctccacatttggagcccatactccaaaatgcagagcactcttctcacagcacacattcccagccccaaacaaaacctgaattttcaactctgcccattaaagtgaatgtatccctgtaatttagtatgtacttattatggaaaatgtaacaaaagcagagaagtgtgatttcattctgtatcacaaattgaagcaaatcaacagcaaatacagcaggattcagggaggcttagtttacaacgtactttgtacctcctgccatttaaattattttgccactctgggcttctgaaaacacaaagggagatacagccctccaactatgagccttgcagagagagacaaaagggccagaggtcctgggatggaatactagagcccccaccttctcatgctttggaaacctgccagagcacttaccctgctggaagattaatgaagactccattctgtgtttcataacagtagcgttgttttctccatcaaaaacagagggtcacagaaatgtgctgaaaagatgtggtccagcaaggttctgtagtcccacctcagtgcctgtgggctgtgtttttcactgtaacaagcactttggtaaactagaaagaagaaaggattctcaggatgtgttcaaagctaagagagttttcattttaaaaagaaacatacatactcactccatggctttcctcatcctcctctcttttttcttcttggtgggaagctggatgcggggcatgcatcattctgtatggacaaatgtgttatgtccacccatactcttgtgacaactccccagcactgtcctgcaataccatgctggccttggtagtaaaactccttggtatctgtgagagtcctctttttctatgccctagactacttttaaccacttttctctggaatgactcccacatttgattgggtattgaaagggtaacagcaaaatgatga

SEQ ID NO: 80404 - DNA, 1768 bp, Homo sapiens
aggtaatgaggccctgggaatggaaggaccattgggccagaccaaattcctggaagacaagcctcagttcatcagcagaggaaccttcaacccggaaaagggcaaacaaaaattaaagaatgtgaaaaactcacctcagaaaaccaaagagaccccagaggggacagtcatgtctggccgcagaaaaactgtggacccagactgcacctccaaccaacagctagcactctttggaaataatgaatttatggtctgaaccggcagatgtgtgtccctccgtggctacagagtggtaaacaaatctcacctttggggctgcgtttcatcacctcgtccacaatagtcaatcctaattgtggtcctgcctcttttctaagcatatggctaagactgtatgtgctgaattcctgggcctcctgcagaagcagaaagcctgctggggatggtgccagctgtgccttggctgttgtatttgaattgagatttttactatacaaagccacctagggcctggggatttgggtcagttgtagttgcctctcccccaccctcttttcccttcccaaaggtgggtgttgaactaggggggatattgctgtcctgagggaccctctcatttctgacatttgaagaaaacgtataaatctttcttaaccgtgaaagcaaaagcctttgggtttattttgggatagttaggagctagggtagaatataatttttttccaaaaacttacttacaaacaaaaagcctaatccctctattttaagatttctgaaaaaacactccatgttatattctggggaaagcaaaaacaaaaaaaaaaaacaaaaaaaaaaaaacaaaaaaaaaccgtgattgtttccattaagccatcagagcgtgtctcagatatcttgttatacagtgaagaagagaatacctattttttttgatgatgtttgatgtcatagtaatcagtgctggtttaactcctgtttagttcctgccaaatacattgcatgggctgaagtgtcagtagccatactgttctcatgtttcttggtcctaggatcagattcttctacattattttttagtttcccagagacatggtgatccctaaacttatgaaggtttcatcctaagccattcaggcttttctctttgtatagattaaaccgaaaaccgcatatgagcctgttcatctgctggtggattcccaccacagactcagactcaaacaaacaaacaaataatgtgaccgtttagttagtttccaaaaacattcacatacaatattgcatgaataagtaagtaagtgttacagaaagctgccaaaaaataaaaaggtttttaatatgacctatctaactaactaacttttatcttccttttctcagactatcagtattaaatagatggaaaaaaatcaaggactacttgaagctatttttgttaatattctggttactgaagtttattgtaaatatgtatgtatagtaggcatatttctttttaaccttgtgcttccctccttcccatggaatttcttcccacagatgaggggccactggacagggggatgagagccattcgtccctgggttgagggaattagtaagacatcattttcaccactgggtggtcttcatacacatgagttataatagcattttaagtatcttagcatttgtgggattagaaatctgtttttgctatttataatatataaaaaatgaaacatgatagcctttcttgagataagtatgtgaaatgtttatttttaaag

SEQ ID NO: 80405 - DNA, 1063 bp, Homo sapiens
cttgagtttggtttataaggggatataagactgttaaaatactttcttggtctctcatgattgattctggaatataggccagctaaaaaagcagctggggctcagctgtaaaaaacatgataaggcaaagatgatgtacattgaccaggggctatttgctagaagagtgatctgaaaagaagacccagtttggctttgatgcagatgatattggcagtcttgaaggattaataggaattttcaaggaaggggagagtctctagaaaaagaaagaagaacgagcagagtctcagaatgcacatggcctcagacaattgtaatgctggtgatactgttcttgaaatgattgttcatggatctcaagccaggtaaaggggaagtaaaggtaaggggctctgttagggaagagacttgattagaaggtgagtaagaattggaaggataaggaggttgtgaacagggtggagtgttggattcagagtaatgacaagctccaggatctgtgcattggagaaagtagcttagataaagtagaggagaatattgttagaagttgcagacataaaggaacttcagtgttagaatattcagatgagtttttacaaagatattaattgaatagatcaggtgatgtcaggcattagtgaaaaagcaagattaggatctgagtaccaaagacctcacagaatgtggggcattactgagaggtagctgggtgaccgtgatgaagaagggagactagagaatacgacaactgaagatggcataagcttcaaaggacagaaaagatcaatcagtgtttttcttcgtctagaggtctctgtggtgaagatagagggtatcgtctatagccagttagtaagcttcatggaaaatagtttaagagctggaaggaatcttagaggttatctagtttaatctctttgttttgtggtaggaagctgaggtccagaagagaaaggtactttcctgatgcattatggatattatgaacaaggttagagccctgatctcctgcttatcagtccagagttcattttactgaaagatctcaccactacat

SEQ ID NO: 80406 - DNA, 1002 bp, Homo sapiens
tgagtttttatgtttcttagcaggagattaacctaaaaagtttagtttgccactaccagaagaaagtcatatataaagtaaccaatgtttaaaaaaaaaaaaaaaaaaaaaaaaaggaagaagcagcaatgagattttcacactctgatctcaaggatagaagtttcctaagaaaatatatctcactagcaccctgtgttctataaatgactacattttgtttttgtttttcaaaactgagttttagaacatacttctatggtcttcctagagagattatgcattccaaggctacagttatagagcactgttatccatcagaacttactatgatggtaggaaatgtagatctgtaccagtcagtgtgggggtcacaagctacttgtggctattgagcacttgaaatgtggctagtgtgactgcagaactgaaatgttagttcaattttaattaatttaaaaataaatacccagatgtggctattttgtttggaatggatgcagcttatattaaaagaagaaactcatctcagtacacaatgggttcttacactcccacctaccaaagtatccgttttccagtactcctgcaagaaatattttaacttaaatgtgttgtatgaatatgtctcactaaatatcctaggcctcgcagagtgtttccatttattcttatcattcacctggtgtgatggaaatacacttgttatcctaaaagagcaatgtaaaactgatgcagtcactcaatttactttctaacatgaatttttctctgcagggaaaggggcgtattcgtcgaggaaactatccaggtccatcgtctcctgttgtagttcggttgccttctgtgtctgatgtctcagaggagaccttgactagtgaggcagccatggagactgacatcacagaacagcagcaagcagctatgcagcaggaggagagagtactgactgagcagattgagaacctacagaaggagaagtgagtatccaggaggaagggg

SEQ ID NO: 80407 - DNA, 1678 bp, Homo sapiens
ttgaacccacaattgcttgtatgtaattagtacagatgtcaacaagtgaaaatggcaaatagcatcttagtataattatgaaaataattttgacattgtagaccctgtgaaatggttttgaggacatcatcacaccccagcatctttgctggggatctgtgggctacactctgagaaccactgcactataatacatataatactaccggctcactgcacttcacagaaatatttgatgagaataattccttttcatatgcaagatataaatacctacaaacagatactagctgtatttaaagtgcttactaaccctgattatctggtgaaccataactgcaggcattgggatatgatttttgaacaagcttggatacctagttataataccacacaaaacaaccagtcttttcaaaaaaaagccttggataaaggatctctccttatcaggaaagcaaactcctcaggaagtggtctgataattcagttccttcctatttttgtgacttaacaaaaggcactcaacagtgatcttccgtcttgccctgaagtgctatttttgagtaaaatttcattaggattctgagatttgtgttttagctagttatattattattctgtctagataatgcatagttcctcctcctcacacatttaacccatagacaaaccctagtaacgtgtactttctttgggtcttcataaagtatcatgactttctgcatgagggtaatatatgtctttttctaaatagtcatcaggtttactaaaggcaatgcaattcattccttcattatcaccatgagtctcttttactgtttaggcttacttcgatttatagtatttaatttctttgtgcccatcaatcatgccttgccattccttcttgcattctttcgctatcgtgagccttacagaattttcagaagaaatcaaagctctcctcataggccttattcattctaacactggagtatcttctatttgtttccactgttatcttcttaaagtcttaggagaaaatgaaaaagtgagtttcaactgattccctcaaatagggtatcctgtttccctcaaataggtatcactcagatcccccacattagagcatttgactctcaatatttttgttacagtctgagaagcctgtaatggactggtctcacagaattctcacccaaattaaataattaagactgtctgtttcagaatatcattcttagaaaaaatagaccatagaatcatatatagacttccttagacagagcatggcaaatctatatgattaggtgattgaatgtgggtattagaaagcctgtcccaaaaggaaggagggagagatggattagacagtactgtgtgccaaatatggtgagaatactaaggaagaagtacttaattctgcctggtggcacagggaaaggctgtagaagtgacatgtgagctagctcttaagggatgagtttaaattaagcagatggagaaagaactaccagttggtaaaagtcaacaaggtttaattctgtaaaaagctatatagcttacatataaacttgtatatataattgtgcagaagggaaaccttaagttaaaaccaaaataggctttgttttgaagcaaactctaagacattagtactatggggtcttgaagagtgagccaggactcacaaagtctc

SEQ ID NO: 80408 - DNA, 1026 bp, Homo sapiens
gcacagtggttcatgcctgtaatcccagcgctttgggaggccgaggcgggtggatcacctgaggtcaggagttcgagaccaacctggccaacatggtgaaaccctgtctctactaaaaatactaaatcagccaggcatggtggtgcacgcctataatctcagctacttgggaggctgaggcacgagaatcgcttaaacctgggaggtggaggttgcagtgagccaagatcatgccactgcactccagcctaggcgacaagagtaaaactccatctcaaaaaattaattaattaattaattaaaaataatacaaaataaagagcagttacaaatcccaatgcccaggctacacgctacaccaattaaatcagactctctggggatgggatccaaatattgatatattttttaaagttccttttgcagtcaagattgaggagagcaaaagaaaaccatgttagaaggaaagcagagcctcaagaaaaaagaccaaggtgaaatacaggaatactgaagtattaagaccaaaggattcagagccattaagaccacagttagactagattacaggaagatactaagtgtccataatttggtaaaatggaaatttaaaatctatttagaaactacaagcagtcctaaagaaaagccagattttaaaaataagatgctttaagacaaatgatgctcagttgaatccaggagtttgcatcctcagcataagaaaacccagcagtgtccaacaatcttcttaaaaacacctgaatttatgaacccattcactatgtttgatatctggatacagtgactacatagtcagaagtccctgaggtcttgcaaaggttatggtaactggccttacgtggtagtcttactgatgtcctgtacactttgtagtgggtcagtggtgtcagggcagcggagaatgcagggcgcaaacacaatggccaaagcattagcagacattcgattagtgtcttcctgcagagcaatcctaagaattaaaacaaaacaaaaaacaaatga

SEQ ID NO: 80409 - DNA, 1050 bp, Homo sapiens
ctgggattacaggtgtgcgccaccacaccctggctaatttttgtattgttagtagagacaaggttttgccatgttggccaagattgtctcaaactcctgaccacaagtaatctgcccacattggcctcccaaagtgctggattacaagtgtgggccaccgtgcctggccgattctgcattctttggacatgttcatctagtgatcttggcctagagcaggtaggtcacaaatttcccttgggaagctatcggctgacctagactgcttcaaggaaagaacaagtgaaaatacattttccagagacaaaggaacaaaggaacaacttgggaaaagtctgcagacccttaaacttaatggatatccttctagtactatgcagttcatgtcatactgtcttcttttgctcatctcttctgcctatttccctatggtgctccctttttatcccttactcatttgttttttgttttgttttaattcttaggattgctctgcaggaagacactaatcgaatgtctgctaatgctttggccattgtgtttgcgccctgcattctccgctgccctgacaccactgacccactacaaagtgtacaggacatcagtaagactaccacgtaaggccagttaccataacctttgcaagacctcagggacttctgactatgtagtcactgtatccagatatcaaacatagtgaatgggttcataaattcaggtgtttttaagaagattgttggacactgctgggttttcttatgctgaggatgcaaactcctggattcaactgagcatcatttgtcttaaagcatcttatttttaaaatctggcttttctttaggactgcttgtagtttctaaatagattttaaatttccattttaccaaattatggacacttagtatcttcctgtaatctagtctaactgtggtcttaatggctctgaatcctttggtcttaatacttcagtattcctgtatttcaccttggtcttttttcttgaggctctgctttccttctaacatggttttcttttgctctcctcaatct

SEQ ID NO: 80410 - DNA, 1987 bp, Homo sapiens
aagacgtattctttcaccacagttagaagcacagttccaaagcatggaattacattgtggaaaataggttagtcagtttgactaagaaacatgaagccggccgggcatggtggctcacgcctgtaatccctccactttgggaggccaaggcaggtggatcacctgaggttgggagttcgagaccagcctgaccaacatggagaaaccccgtctctactaaaaatacaaaattagctaagcgtggcggcgcatgcccgtaatcccagctactccggaggctgaggcaggagaatcacttgaactcgggaggcagaggttgtggtgagctgagatcacaccattgcactccagcctggccaacaagagtgaaactccatctcaaaaaaaaaaaaaaaaaagaaacatgaagccttcctttaatgatgatagtttctaaagtgaattatttgaatctctttgcatgttttggctctgttaatctaactcttgtctctaaatagatgctgagagtgtaaatctagatgactataacatacacgtcattgcaagtgtattcaaacaatggcttcgagatttgcccaatcctctcatgacctttgaactctatgaggaatttcttcgagctatgggtaagcataggcttcctgggttagagagaaggcctatagttgggaaagaaatgccatcttgagtatagattatcaagccatcctctagtggtttaattcttatagattcaaaggtaagcttttgacagtgaatacaaaacggctagtatactgtcacctattcaaatgttgactttttagagactcatcaaaacgttagtgtcctaaaaattttctgagtgagacacttggttgcttcttacaaagaaatggaaagactggggttataaaacagattaaaatattaaaaataagttttaagattaggcttatgttcatttaaattggaaatctaggcaagaactatgtgtaaagctggctgttttatgccaagcttaacaggtttcagagtttagtttctcagtgctgtaagtgcgtaggatattgataaaggccttcctagaggtatttaggccctgaggattcataaattatgttgactttaatggtaaatcaatctgctacacaatgactgaaaaactagaacatctctatccccttgctgttattaaggattactgtgatataggttcaaactaaggagactgtttatgaatatagaactcaagcaaaaggagttaaatagttactgtgagttgctcttctcctgccctacaggtacaactactcctaaaactctgtagccagccttctttgcttcatagtgtctgggaggaagatacactgtataaggggggatatttagtcttagtttctgctcttactgtttttaggccttcaggagaggaaggagacaatccgtggtgtatactctgtgattgatcaactctcccgaactcatctcaatacactggaacgcctcatctttcatctagtcaggtaactttaagaagcaagggaacgatttttaatagtttctcttggattattttaaatagataaggaatttctccatttggaagactgacaggtatttattttttcttctatttataaagtcagtgtctcaaacaggtggttaggataccttggagcagaaatattcagctgagctggaatgcatggcagttgcttttctgcccttgtttgaaccatgtaacagcttcagcctcatggtggcagtgtgtagtttagcctgttttctaacagctgaactagaaaggatatataatctattgaaatgacctaattcatatgaggggttcagatcattctcaggaattgaccaaagaggcgtcaggagtagtgtctcttcccctgtgtgtaaatatcagcagtagttgagaagaaagccatctttatttttggttaaagcctctactctgcattctttttttttttttttttttttttttttt

SEQ ID NO: 80411 - DNA, 1828 bp, Homo sapiens
agctgtttgcatataaaatccaacccttttccccacacccaaatcccacctttgcttttgaagcaattttttgataggagaagctgtagccctttgccactgccttcattcttcactccattattttcttttggagattctggtggaaaaggattgaaactaatatctcatttatacttacttaaacataattccctttctcccaactcttctaactatgctcataaaacttcagagaaataaaaaagtagctcctggtaaagaaatggttaaacatgtttcaagatgtttgaatgcatttggaaactaaaaattatctttcatttagtatgatccagagctgtcatctcgacaatttggggttgaactgtcccgtttgaccagtgaagaccgaactgttcctttagtagtggaaaagctcataaactacattgaaatgcatggactgtatacagaaggtatttatcgaaagtctggttcgactaataaaatcaaggagcttcggcagggtctagatacaggtaagatagtgccctctaaatcataatgaaatacttttatttaaatagttcctttcatgctcttaaagttttcattacatgtcaatcctttacttagcagccagaagaatgcattcttttctgtgatgctttgttatcattttttggctttctaaagagtctttggtttcatttggtcaactcagcagacatatattgagcatataatttgcacttgggacagatctcatttaatttttgtaataatttagtaagattgtgatacctctgattgacaaagagaaaaactaaggtatagggaaattaaataatgagctgctgatgatgatgcaaggtgctgtactaatgtttttataatattcacaacaatcctatgaattagggatattattatccccatttacagaaaaaggaactgaggcttacagaagatcttgcccaaagactgatcgccaataagtgaccaaattggagttaaccccagatcttctgaattcataatctatttcccctttctctttattattctgactccaaggggtactctttcctgtgtatcatcttcttgcctgcctacactgatgacagttactcaaactgataattagtgagttgagcatgtatctttgtagagctgtagttttagtactggaattcatgcaggggactgactctggtttcattctcaacttctacattttaccactgttgggaaggaatagatctttttgaactaaacagagtaaagcatgtccttgtgtgggcaagaacctgtgttcagtgctgtttcttatgaacaaatcaatgagaaatgaattgagtatgaaaataataacaatgactggtaagactcaggcaggaggttccgtctacaagagacttggtctactttggtttacaggcagttactgactttgtctctgataccttgaaatagcacaagtgaaaatcaatcatcctgaatcttccccagtcatctaatctgtatatccttagggagtttataagtgaaacgggtgaaggtgtttcctttacattttctaagctcagttatcactgtccttttatctctaagaatgacttaaaattagccttactttcagaaagtgtcctgtatgcgttttttcatttgtcatgtaaaccattgttactcaaagtgtggtctgtggacaaatccaaaaccaggtaagtacagaaattgagagcaagcatgtagagacgtttatagcagtataacagtgcttcagcacgaaaacattcattcattcattcattcattcattcagagacagtcttgctctgttgcc

SEQ ID NO: 80412 - DNA, 1050 bp, Homo sapiens
tgtttccataatagttaatctatttataattttacttatctccacacactaacactactagtctttttctttttttttcttttgagacagagttttgcccttgttgcccaagctggagtacagtggcgtgatcttggctcactgcaacctctgcctcctgtgttcaggtgattctcctgcctcagcctcctgagtagctgggattacaggtgcccaccactatgcctggctaatttttgtatttttagtagaaatggggtttcaccatgttggccaggctggtcttgaactcctgaccttaggtgatccacccacctcagcctcacaaaatgctgggattacaggtgtgagccactgtgccgggcctaacactactagtcttaagcagaaggccttgattttgtttccttggtacctaacacataaatgacaaatgtatgaatgtaaggctggaaagtagaaattagaatcagttcaagtaagttcttgagtatgagactcaagaatgtttgcactttagtttgctatatactaattagccgctaaaggtttttgaggataataaaacagattatatatactacagaatatattaaaaggagacatatgaatatggggaaaactcgccaagaaagtgttgaaatagtctaattggttagtgatatagttttgagctggggtgatgacacttagaacagaaaagaaacaataaagaggatgaactgattgacttggcaactggttggatgcaggttaaaggagaaaatggaatatatagttagggaaggacaatggtacaggagaaggaaagacagatttgcaaaacaattttcagtctcagagataatacctgccatttttcttttcagtgaattacttcaaataatcttaagggtaagctgttatgttgcagtcacataggatataaagtaacctataggttaataaagtataatattggctggacacagtggttcatgcctgtaatcccagcactttggaaggccaaggcgggcagatcacttgaggtcaggagctcgagaccagcct

SEQ ID NO: 80413 - DNA, 1022 bp, Homo sapiens
attgcctgaacccaggaggcggaggctgcagtgagctgatagcaccactgcactccagcctgggcaacatagcaagactaagtctcaaaaaaaaaaaaaaaagccaaaaaaagaaaaagaaaacatactttgagaactgctgcttttaatgtaacattagagtcatgtaagacagctattatatgtctgttgcattgctttctgtttttcatataatttggtcatgtttatctagattgttagcttttggaaagcaggaaaaatatattttattttatgttatttctcaaaagatcctaattgtccccctggaattagtgcctagtgaagacttaacaagagattgaaggatttcccaccacgttagggcagcatttactgtgttggctttaatataagtagctaaattttttcattcaggtggaagaacacaatggtcacatctttaaagccacccaatatagcatccctacatactgtgaatactgttcttctttgatatggataatggaccgagcctctgtttgcaaatgtaagtatgagagatctttgaggaatatttttaaccactgacatttctgtttccttgagttgtcttatatctcctttaacataaaggagttatttacactacctaaatttttaacctcatctcttgctatactctcttcacctactctttgtctctaaaccagatattttgatgttatttggtcactgagagtcttgtacatgtaattcactctgtctaaaatggtcttgtcccagattttagtatgacttaatatttcaattacttcatgcctacactcacatctcaccttctcagagagctctcttttctacccccagtttaaatgccaccttgtccccaaattcgctattcttttttttgtttttgagatggtgtcttgctccatcgcccaggctggagtgcagtggtgtgatctcagctcactgcaacctctgcttcccaggttcaagtgattctccctgcctcagcctcccgagtagctgggatt

SEQ ID NO: 80414 - DNA, 1026 bp, Homo sapiens
ccagctactcaggaggccgaggcaggagaattcacttgaacctgggaagcagaggttgcagtgagcctagactgcaccaattgcactccaacctgggcgacagagcaagactccgtctcaaaaaaaaaaaaaaatcaattaatgattaaaataaaacaatcatttaaattaatatggcggtggcttctgggcagaactgaggtttaaaaaagaataatctctaaagtatccttccattctgttgctgtcattggcaattatgttttatcagattttaaattttttctcacatttgcttattagcactgcacagttcctcttggagaataaagaaatgactattgtgttacctgttgagcaagtatcttaacatttgcaatgaagtaagaaagtatgttagtctttgttatcacaatttccatatatctcctgtccccctgtcaggtgccaaaaacagaaagaaagaaaagaaggaaaaaggaaactgatttggtaagttataatctgttttttaaattaaaaaagtaattttcagatcagttgtctgaggtatatcatacaatatatatgtggatatatttatgaaataagtttatcaggtacctaggcaataatcatatttatatctttacaaaaatttagaatgattagatgtgactggacttgttatcaatgatagcttcctaaaatggcagaaaactgaaattgtttactcatgaaagaaaaaatattatttcttttcagaactaggggtggggaaggagctcttcaggagttttctctcccttctaaagaaaacaggggttatttaggattttacaattataaatactttcaattcaaaagacatttctgaaggcatttgaacaaattttatcattgttcatgtttatatacaatcacacaatatatacaatcacactttttcacgctgacatgctgacatgtatgaggttctttattgaagaggactttgtaaaagcaaaagactgcaaacaacctaaatatatagggaaatgattaaat

SEQ ID NO: 80415 - DNA, 1073 bp, Homo sapiens
tcttaaaagatgaaaaaaacagctgtaaggtgggaaaaagctactcaaggaaattcaagggagcttttaatctgaaaccattcagtttccttgtctatccctaaaacaaaaaccattcattttccttgtctatccctaaaacaaaaacaaggcactggagaaatctcttacgaaacatggcttttgtattatcttctacagcgctatcaaatttttcatatgttgaactactaaatatctcctaacatagtccaactcaccgccaatgcagatgaataaaagctgaagatattctgccgaaattccttcagggcttttttaaatacaacatccactagtgtatccttcttgctgtcttcattatctaggtcattcacctgggaaccacaaaacgagttttagtacacaatcaactaattgaaaagaagtaaatacaacagtaggcatgtattgttgcttccacaatgactgtcctcaaagtgcaagccacaggctattataggactcaggtgaaagttatgactagacagtcaaactataattactactctatgatttctaaggttccttctaacattgtatgattctatagttctgttacaagaaaactcccgtgtgcaacaagctgtaccttcccatatgaaatttgacaattttaggaaaattaaagtcactactaaagcctacaaccttaaatcctgtctacccagtctaactaatgcatatcctattattcacacctttctggtaaagaacagatcatctaaagcatggaagcatatgtaattttgatatctagagagtatatcctgatatacacaagtattccatacacagagctgctccagggcctgacgtggcaaataaagtgtacctttttcagaagaaattcatccatgctttttaaatcactgacacttgctatgatctggacagagtcattttgccaatgcatagaatccaaagccacgttgctaatcttcacacttcgcttgcgcttagcctttggagaaggttctttgttctctttgaattccttccggcaactgccgggcagttctgggctcaaagga

SEQ ID NO: 80416 - DNA, 1008 bp, Homo sapiens
ttctctcccttgaccaagcttctcactgtgagctagggcctgcacccagcctgggtcaggcctctcacagtgactccgaaatggtaattttacagcaatataagaaaaatagcaagcaaatctgatggaaatagtctttgctaatctaaagctaaccttcacagcttcttcccatgtaatggtttgtgcatgggaaacctcagtgaacacagcaactaagctaaaccttaatttaatagaactcaaataaagggcactttaaaaagccacaaattaggcaaaattaagattatttgacttggcactaatgtagaaattttccatgttgtatcctaaaaggtctagagcagtggtccttacattttttctgtaaacggccagataacaaatattttagactttgtgggtcatatagtctctattgcaactacctaacttaactacttaactcacccactgtagtgtgaaagcagccatagacactaagtaaacaaatgggcatgaccgtcttgtaataaaactgcaaaaacagacagtggattgtatttgacctgttggccatagtttactgatccgtggtttagtttactgatccttggtctaaaataatccagtagcttttagctacaatgcacttttacattttttgcctgtaaactttcttcctccacctcactttccactaataagaaataaacatgaattttaaaacatatagtgagcaaaaagtgtcttcctggaccaacccagccaaatagaaggctatatgtaatgtgaatttgtattaatcacacaatataacattggtgttgtgtttgaataaagctgcaccattttaagctaagaatataactatatcatcttctcagcccaaatcaggtgtatatgtggtttgacaagtattatagtatattgatgggtatattaatgcaaagaattttattttggaattgtcctagaaatatataagataaagaccgtatgtctaatatgaaccagaacatcact

SEQ ID NO: 80417 - DNA, 1941 bp, Homo sapiens
gatttaaagctttaaaagaacaaaggctaagagaaacaaagccagaagttggattggtgaatattaagggatatggatctctggaaattcagggttcagacccttcaggatgggaggattgttcttttgacaacagaataaaagccatagaggaatgtaaatctgtaatagagagtaatcgaattagccgtgaaagttcagtggactgcttgaaggagtcaccaaacaagcagcaggagagagcccaaagccagagtggtgtggacttgcaggaagatgtgcttgtaagagagagacccagatccttggaggatctccatcagaaaaaagtaggccgggctaagagagaaagtaggagaatgagagaactagagcaagctatatttagcttagaattgctgaaagttcgttctcttggtggtatttctccttcagaggatcgcagatggtctacagaattggtgcctgaaggccttcagtctccacggggtacacctgatagtgagagctctcaaggaagcttggaacttctgagctatgaggaaagccaaaagagcaaactagagtctgtcatttcagatgaaggagacttgcagtttccatcacctaagatatccagcagtccaaaatttgattcacgggacaatgccctcagtgcctcaaatgagactagcagtgcagagcatttgaaggatggaactatgaaggaaatggtggtctgcagttctgagtctattacctgtaaaccacagctgaaagactccttcatttcaaatagtctacctacttttttttatatcccccaacaagacccactgaaaacaaattcccaactagacacaagtatccaaagaaacaaactattggaaaatgaagacacagcgggggaagctcttactttggatatcaacagggaaactagaaggtatcactgctcaggaaaagatcagattgttccttctttgaatacagagtcttctaatcctgtgcttaagaagttagaaaagctaaacactgagaaggaagaaaggcaaaaacagttgcagcaacagaatgaaaaagagatgatggaacagattcgccagcaaacagatattttagagaaggagcgcaaagccttcaagacaattgaaaagccaagaattggagagtgtttggtggcaccatcttcctatcagtcaaagcaaagagtagagaggccatcctctctcctcagcttaaatacctcaaataagggagaacttaatgtactggggtccctatcattaaaagatgcagctcttgcccaaaaagacagttcctctgctcacttacccccaaaggaccgacctgtcaccgtgttctttgaaagaaaaggaagtccatgccaatctagtactgtcaaggaattatccaagacagacagaatgggcacccagctgaatgtagcctgtaaactctcaaataatcgcatttcaaaaagagaacactttaggccaactcagtcttacagccacaattctgatgacctttccagagagggaaatgctaggcccattttcttcactccaaaggacaatatgagtattcccctgtaagtgaaatgtttatttatgtataaatgggaaacttcttggagtatttttattaaggtgccttgttctgctccaactatttgtgtaaagtggctgctcaacttggccattttctctttgtaaaaatattccctaattgttgactctaccatcacctgaagttggatgtagttatatcctaggaatccttgactgatcatgaatagcagagtaaatactgggttcctccccattaagtgagaagcatttgtgaagggcagtacagtgcctataaacatagtaggcattcaccgaatactggttgctttacagctgtgaagtttagtagttgaaggttgtttgtttcaggctttaaagaagttaattt

SEQ ID NO: 80418 - DNA, 1114 bp, Homo sapiens
ttcaggtacactttctgcttttgtagaaaactagtttttttatttttatttttttgagacagagtctcactctgtcacccaggctggagtgcagtggcgtgaattctgctcactgcaagctccagctcccaggttcacgccattctcctgcctcagcctcctgagtagctgggactataggcacccaccaccacgcccagctaattttttttgtatttttagtagagacggggtttcaccatgttagccaggttggtctctatctcctgacctcatgatctgcctgccttagcctccaaaagtgctgggattacaggcatgagccaccgcacctggccagaaaacttatttttaatcaccaagaatttagctgcatagccacttaacctgtaattatgacataagaaatttattctctttttttcctgtgaaaatgcagtgtaagatatgacaaccagtttctgttattttgtcttccccatagagattctggaggaattacctaaatcagaagcaagtcagagatgcagctgtgcagaaggatgcttttgttatggctagtgcagctgctcttctccaagcttcctggcgtgctcacttagagaggcagcggtacttggagttacgggctgcagccatcgttatccagcagaaatggagagattactataggcgcaggcacatggctgctatttgcatacaagcaagatggaaagcctacagggaaagtaaaaggtaccaagaacaaaggaaaaaaattatccttttgcaatcaacatgtagaggattcagagcaagacaaaggtaatctctattactataataattgctttttttcttcttcccaagtactttgtttatacctctgcattaacacttgtctaatttgtattagaattggttgtatacaatttgtcttttccactatactgtgataccgattttaacccacattgtattgtctataatggaagttaaataaggttttattgaattaaattggattgaaaatctacatggtctgtgatcataactgctaagaattaacttctacattaggctgaatcttataaaattggcaatattcaactgttgttactttcagaaactttaa

SEQ ID NO: 80419 - DNA, 1011 bp, Homo sapiens
cagtgaggtctagttgaagatggaggttgggaggagggagaggagcagaaaaaatagctattgagtactgggcttagtacctgggtgaaataatctgcacaacaaacccccgttacatgagtttacctttgtaacaaaccttcatgtgtaccccctgaacctaaaaataaaaatgaacttgtacacttctaggccttcagtccagtcacccttgtattttctgaagttaatgattcaatgaaagaagaaaatatttcattattaaattttctaattgggttcattgttaactaagatctatgacagttatgagacttgggtcatgtaattatttagatatttctgaaatatttagcaaatactcgtgattaaattttcgtttgtctttagaaaaactatttcacgtttcatttttctttgcactgatttgaaattttctgttttttaaattttgctaggtataacccggaaaaatcccagaacacctctttctgatctccagggcatgaatgctctaaatgaaaaaaaccaacagtaagtgtgtttggtttatgttttcaaggacgtatagaagaaataactaacattcttattgatatttttgtgactttaaaagtttgaagtaattcaggcttgttttgtttttttatttcttgaatcctttataagtgatgtaataacacattaataggttaaagttaacaagatttgtctacagttgcttctggtaaaatggctttacaattttgaaaaagtttcttcagaataacttaaaatgagctcatatattttaattgctgagacccttcttgcattttatgtcttttacaaaatttaagggttattccgctgctttctgtggagaaatcttattgggaagtaataattgaatagtttgatttacatcaaaccatccaataccttttttgggtgagtgcgattaccaaagcttaccttttactattttcaatgatgaattcctgagaacaatttgacagtaacaaatataaa

SEQ ID NO: 80420 - DNA, 1016 bp, Homo sapiens
tcaaacattgctagacaagtttaagcatcaacatgaagataattcttacatcgaatttccagccgtgatggagcctgctttcattataaaacattatgctggaaaagtaaaatatggggtaaaggtcagtaaatttctcactgaatatgcttacagggcagagatgtgttcttaactgtccccagcacactgccctctttgtagtttgtggaggcttttgatcagtaataactggagatattgtataaagatactactaaaacttagattctgcttttcagcacattactgtcttaggtaaggtaatgtttctgttggtttctgcctggagataaacctgatgttgtcagttgatcctgataaactttagatctgaaagaatagattgcatctgtatatcccaaactcacttgtttatgcacataatttgttgaatttttcccttctctgcactcataaggtcttcatgtctctgttcaccattagggatttgtcagttcgtacttttcatgaatatattgaaactcttatgtggagtggaatcttaataatgttgtccatttcttgtgtaatttgtgagtctgttattctttaactacttgatgtttaagcctgctatttcaggcatttaatttcccaggtaaggcagctgatgatatggagaatagtggaattaaatgttttctcctgggtcttgagtcgagtgtcttaagatcatttattcatccatttattgatttatttaagaagtatttgttgaacacagaacatgtgtcagactttgtgcttggtgtttggaatgatctaatgataaactagacagatgtagtcctgattctctatacatatgtgcatatatacatattgtgtgtgcatatatatatgtgtgtgtatctatttgtataacatagataaatgggctatgtgttataaataagttaatgggtcctatgagagaaagtagtaaaatagtggattttgaatttgtgaatacatgaacacttctctaagaaact

SEQ ID NO: 80421 - DNA, 1365 bp, Homo sapiens
gaatgaacctttgattaaaaagatgtgtgtgtgtgttttgttttgtttttattgctggtgttgattgtttttttcttttttctttttctttcacacaggggtttggaaacaatggtgttgatttttaattgctaccatgggcttggtcactgtgtgtaatgctaagtacagtcagtcagtcctccttatctttgggttttacatccaagcattcaacccatggctgatacaaaactactgatacaaacctgcatatacagagggctgactgtactaagccattttatataagagacttgcgcatctgtggatttggtatccacagggagtcctggaaccaatccctcgaggatatggagggccaactgtatgcttgtttgattgctttggtctcttagttctaggatgagatagaggagcttaacagaatctcaagtcagtacagagtgtagatacaaagaaactaggtatggagagaccaagatgggtaactagatatttcttatgaggatctcaagattgattaagttagtataaaaagagtgtgcttttggctgggagtggtggctcacacctgtaatcccagcactatgggaggccgaggtgggcggacgaggtcaggagtttgagaccaggctgaccaacatggtgaaaccccatctctactaaaaatacaaaaattagccgtgtgtggtgacaggagcctgtaatcccagctactaaggaggctgaggcaggagaatcacctgaatgtgggcggcgtaggttgcagtgagccgagattgcgccactgtactccagcctgggtgacagagtgagactctatctcaaaaaaaagagtgggctttcagtttccatgaaaattattagtgcaaagggaggggcaaacaaaatgtggactttttctccaaactaaggttgaaatcagtaataggtttacattgtaccccagaatttgtgtatgaggacataggcagacacaggtttcatcaaactgaactcaagggaaatagttaagaatagagaatgaacagaaagactacaacagctagcaggtctacagaaaagagggagaaaagatctttatatcatcaagtctcctatcattggatcttgttgctgtcttagctttttaaaaaagtgcctctattttgcttaaaggacataatggctggttaacaatagcatgacaatattagtcctggccaacttgatgaatgcttaaagttttaaacatataatctgttagctagatgctaccctagagctttggaaagatattatttgttataatattagctaacacttacgagttatgtagtgttacttatcagtcagtactgtttttattctagtttttcagat

SEQ ID NO: 80422 - DNA, 1048 bp, Homo sapiens
ctattcaacattttaaacctcatactttttttttttaataaatatttttaactttacgaaaccgtatgttctggccgggcacggtggctcacgcctgtaatcccagcactttgggaggccgaggcgggtggatcacctgcactcaggagtttgataccagaccggccaacgtggtgaaaccagtctctaccaaaaatacaaaaaattagccagaatggtggtgcatgccatggtaaacccagctgctggtgaggctgaggcaagagaatcgcatgaaccccggtggcagaggttacagtgaactgagatcacgtcactgtactccagcctgggcgacagatcgagactccgtctcaaaaataaaaaagaaaccatacgttctgacatctagtttcactcagtcttcatgaggctgataaaatatactagtttggttcttaatgaagaattctatttattgggatgtagaagtcgaaataggaaaaattgcattgtcctcttggtatagccaggagtaacctacctctcttgatccttcattgaaataaccttttgatttcctcaccctctgtttttttccattccctttaagatgttagggatttctgaggtttcttaagataaaaggccactaaccttgcttcacatatttctgtaatctatagattatatgtattaacagtttggatatatttttttaattaggataaaagtaagataaagataactaaaatacttttaagtcatgatatgttttgaatactggccaaacacaatcccctgtacactgctttagaggaattgagcattttgttacttatgttgtggatattattcattaaataaatttaaacattacttttaatcaaaactttctcttgttttacagacattgtctattggtgttcttgatatttttgggtttgaagattatgaaaataacagctttgaacagttctgtattaattttgctaatgaacgtttacagcactactttaatcagcatatctttaaattggaacaagtgagtacctaaatatgtatacac

SEQ ID NO: 80423 - DNA, 1104 bp, Homo sapiens
acctcatgttttcgctattttatttcttctctgtatttttaaaataactttgtgttatttttgtcttctgttttgtctttttgatactcctttttatttttattttattttaaatttaattttatttttgagacagtgtctcattttttttgcccaagctggagtacagtggtatgatcttggctcattgcaacctccgtctcctgggttcaagtgattctcctgcctcagcctcccaagtacctgggattataggcgcgtgccacaatgcctggctaatttttgtatttttagttgagatgggtttcaccatgttggccaggctggtctcgaacacctgacctcaagtgacctgcccttcttggcctcccaaagtgctgggattacaggcgtgagccaccaggcctggcctactcctttttagaaggcatttattgtggatatttgtggaggcctatagtttgatatatattgcaattattttctctcttagttatttactttttagatttatttataccatctttttctgattttatgttgtaatttttttgcagttaattctgtcatttttcttgtttttagttttgcattttgtatatgtattttacttacagaggaaggcctcttctagcccaagattataaaatatttattcttatatttttataattataatttttttatgtttagactttttctaactatatttttaatatggcagattataggtatttaatcatttcacatctagttgtgttttctgggcagccttcatggactagtccaccttgtcagactgattaaaaatgtcaccttttaaatttaatcctattgccttaaatgtgaaattgctcttatgttaatttttcatgcttcaggtaaactcacagtcataaaaattaatttaaattgtaatctaatttatcaaattgatttatttttgaagggcattattttaatttttttaagggcctagacttagcagaattaaacaaaatactcttagtacaggcttttaaaaaagatcttactatttttcattcatcatatcagtttgcccgttgtatctcttagcaccagtggagaaaaattattttcatt

SEQ ID NO: 80424 - DNA, 1012 bp, Homo sapiens
tggaaaacttcaattggctgggtgcggtggctcacgcctgtaatcccagcactttgggaggccaagacgggtgaatcacctgaggtcaggaatttgagaccagcctgaccaacatggagaaaccccgtttctactaaaaatacaaaattagccaggcgtggtggtgcatgcctgtaatcccagctacgtgggaagctgaggcagtagaatcacttgaacccaggagacggaggctgccatgagccgagattgcaccattgcattccagcgtggccaatgagagccaaactctcaaaaacaaacaaacaaaaaactttagttatagattttttattttgagagaaaaattcatttctaattcaggatagtaagtttctttcttgaatgggagcaaacaactttgtcatagtatcttaatcattgtcaattctacatgcacttgtaatgcttttgtttttcaggctgtgacagtgaggaactccatggctaagtctctgtatagtgccctgtttgactggatagtttttcgaattaatcatgcacttctgaatagtaaagatttagagcataataccaaggtaatgatatattggattataatatgtttttccctgaaagctattttaataaactggttaatacatgaaatttaaaaacacagaattatatagagtaataagtaagaaatcgcttttatttgttatttattaccctgttcagaagaattgttctgtgtgtctttccagaccttttttattatgtgtttttacctcccgaacgtgtatattcagagttgctttaaaaaatgtaaatagaatcatgctctctgtattctttcaaacataaatatatgtattttttttacctagaatctcttgaaatattttctgtctcattatatatctggacctggctatttaaaaaaagttataaatatatagtaagatgtgtaccataaatccatccattaaaaatagattttgttttattgttataaacaatgctgtaacaa

SEQ ID NO: 80425 - DNA, 1292 bp, Homo sapiens
attattgcctcttctaaaatttatttttgtgtcactaatatctagttcagtgccttacatagggtaggcacttgttaaatatttgttgaataaatagtatttgctggtagaattgagcgcccgtaaatgctttgaatttctgaaaccctttagaaccactcaaaatcaaacttagtatcagcacacttactgagtacagctaactctttatcttaagttaacttttgaaatcctaatcttggtgattgtgaaagggagaacaaaagtaacttattggtattttagtaagtatgtgtttagtttccatacctgtagtaagataagaggtctaatgaatttgactaggtcttactattctaccagctctaatttgcatttatacatacaggtacctatcctaaattaccatatttctgaatggcccacattattttaaaatatataatcttgatttttaaacttttattttaaataagcaggattgcttcacggtggaaggagaagatttgagacatgactttgagcgcctacaacttgccatggaaatggtaggatttcttcccaagacacgaagacagtgagtttacttgttgtatttttatatctctaatagagaacacatgatatgtctttgaaagatttctgccgttgacctttttaaatagttttctaagtggtattcttcatctagtacctcatccatctcgagcattatttctaattcctttttttatcataaattattttgagaatctgatgaaagctgacactgttgttgtaaaatgtacatccttaacaatttgcatataaatgcaggaatttatggtgcccctgaagcctatccatggaccttacttaaaacttttgctttgtaacactatttttatagctcttcattttgtatatatcagtgatctctaatcttattaaattatgcatacttatcagatgcatagtatttaattttcagtgtatttcctctgtatagtttatatctgtactatactattaagttttttaattgtaaatctaaacaatttaaaaatataaaaatttgagataaagatgagataaattatatttgaaacaaattatttaaaattaaagactcaaccttggctctcaccagaaagaaatagttacttataacttttttgaaggggagagtcgtgctgatgaatatgtcagatctgattatattgttaatttttttttctttgttttttttggagacagcatctcactctgtcacccagactggagtgctcactgcagcctcaacctccccaggc

SEQ ID NO: 80426 - DNA, 1012 bp, Homo sapiens
tcagcttctgagttttttcctccccagtttaaactatttgcattatatttgggtgattaaagattttcttttttataaagtaatattctctcataaatgagctgatagttgttagtattagagaagtctggaattttgctgttctttcagatctttttgtaattaatgaccataatatattcctgtcataatgtcaatattcataggatatgggactcagtttatataaataacagtcactggagcccatggtatatatgcgttcggtagtacagtatacagtctcccagcatgtgaatatttgcttcattatttcttgttttatgctgctatgcaaaataacttttcaatggagagcagcagtactacttgcacaccacatctaagagatcattagaagagtataataaccattacttctacctaactaatctgccttactttcagataacaaagaaacccctcagacagagctgggatgattattgctatgactctgagccggtcagtacaagtacctaaatattctgtgtttctgtcaaagggtcctcacattgcgcatttgcatccatctgaagatttagaatgcaaatcagctgaaatacaaagaatcctaggaaggaagataaatcaatgtttcatttcttttgaatgattgatttatatctgtatagtttgttgatttaaaaccagttaatttactttttttgggctattttctggtcattaagacttagtccacattcaatatttatttcgacaaacattaaattgattatattcctgattcttcatcattgctgtggatttgtatgaactatggtttttttccccttttattttttaaaattattttttagtagtttcattacctacatactatgagtagtaattattgtttatttcaaaaaattgcattctttatgttttatatatcaacagtctttacacataatgaatgcatgtatatttttctttgattttttttcccagtagccagagtctgtagcct

SEQ ID NO: 80427 - DNA, 1041 bp, Homo sapiens
gaatagggcaagtttaaaacactacaaagccatttttattgagatttagctctttttattgagtaaacactctctgggttgttgcaagctttcgattagtttccacagttctgaaaaggttaattatgacagatttgccagatttctcattggttttatggagaagagaattttcagaggtcctaactttgttaactttgctgccttcatccctctcttttgtattccacatccaaaacatcattcaatttttaggagtacttaaacgctgaatttatcacatttatattaaaaaatgaagcaaagctgatacattttactaattactgtttgcttcccccctccccctgttaaatgataaccataagtcacacattatgaaacttgtacttctttgtttcccacaggaactatcatgtattctattacctcctggcaggagcaagtgaagatgagagatcagcattccatcttaagcaaccagaggaatatcattatctcaatcaggtgagagttcataaaaagcattttgaagtatagggcagtattaaatttaatgcttgaaaaatgtcttttttctagtactttctcaaacctaggaatggattagctagcattttcatatatgtactctacaaatttaggtgatgcagttctcaaatttgaggatgattaccatcctcatataaatgttaaaagctcagataatatatgtgcttttcgttttctgtgagattctttgggaaaataataataagctgtttattgatatttctactgtattagaaaaatgctttacttttactaaagtgatttaccttttacaacccccaggatattaaatgttactaatgattaattcttgtcctttgcaagggattacttgaaacctaatttgcatgttttgaagtctcatacacatacgtctttgcatgatactatgacactgacttagagtatgactatttttataatttaatgaacaatcttcttaaatattcagtatgaaggtcatcaaaggcaaatgacttagagaatttg

SEQ ID NO: 80428 - DNA, 1060 bp, Homo sapiens
gcttcatttttaaaaacatttacatcttaaatttcattgagctatattgagctataacttacaataaaatctacacatttaaagcgtacagctcagtgaattttgataaatgtatatatccatgtgaccaccatcacagaattgagctatagattatctttatcacccattgtgcccctttgtagatatttctcaattccacccggattcccagataaccgctgatctgcttcctgttattcttgttttgccttttctagaatttcatataaatagattatatgatatgtactttgtgcctggtttcttgtgcttagcatagtgtttgttgatatcattagtttatttttattcctgggcagtattccattgtaaggtacatactttgggtgacgatttaggaagtttatagttcttattcttttgtaatgagtactctagctttgttttaaataggcataataaagtatagtacattatgtactggaatttcatttcattctattctaaaattgtaattattttgatgtaattattattttcctaactccttgttacttcagtttagcaaattttttaaaaagtaaaagtataaatatattaagacttttttgtaggggggctctggaatgtgaaagagaaatccaaactttaaagaacattacatttttaaaattatgatttattttggctgggtgcagtggctcacacctgtaatcctagcactttgggaggccgaggcaggcagattgcctgagctcaggggttccagaccagccagggcaacacattgaaaccccatctttactaaaatacaaaaaaatagccaggcttggcggcgtgggcctgtagtcccagctactcgggaggctgaggcaggagaattgcttgaacccagaaggcagaggttgcagtgagccgaaatcacaccactgcactccagcctaggcgacagtgagactctgtctccaaaataaataaataaataaataacataaaataaaattatggtttattttactgaatagcacaaaataaaatctacttgatcttctttcag

SEQ ID NO: 80429 - DNA, 1073 bp, Homo sapiens
gggcgcaatggctcatgcctgtaatcccagcactttgggaggcctaggtgggtggatcacctgaggtcaggagttccagaccagcctgaccaacatggagaaacctgtctctactaaaaatacaaaaaaaattagccaggcgtggtggtgcatgcctgtaatcctagctactcgggaggctgaggcaggagaattgtttgaacctgggaggcagaggttgtggtgagctgagatcatgccattgcactctagcctgggcaacaagagcgaaaatccatctcaaaaaaaaaaaaaattgtctttggatagaagacatttcagatattaaactataaaaacataactgtacttgatcttagccaaaaggctgagaagctatagaaatactgttcttgctattctgggcacactgcctgcagcgtagccctgctctacaaggagcagcaatttaaaaaaaaagaaagaaaaatactgttcctattcttaaacatatctttaaaaaatatttgatagatgtgagaagatgaagtaaaactaaatagaagtgtagacattatttttagtaaccaagaggacctggaagatgggaacgcaaaaaaggtggtgtggaagattgaagagtgtgacagtggtaattttttttttttaaagagaatgtctttgggtcattaatgatgcaaagaaagagatgactgtagtcattgtatatccccctataaggggagaaagcagagtcaggtcgtgtctaactgcattgtgatggttggtgaaaatatttttgctgatatatttgtatttctgcaagcttaacagctgtgcctagcatcgaaacttgtaataatgtagagaatatgggaaaaatgtttagttgtgggatgttttacaagtaataccatccaatgtcaaaaggaaagataatacagaaggacaagtactccacagtctcacttatatgtggaatttgaaaaagttgaatgcatagaaacagagcaaagtggtagttactaaaggctgtgaggattggagagatgttggttgtaggacacaaattttttagttatataggaggaata

SEQ ID NO: 80430 - DNA, 1045 bp, Homo sapiens
ggtttgcacgactttgaacatatactatccatgctgatgggacaggatccaatatgaatataaatgatggaggaagacgacgctttgaagataatgaacatacattacggatatatcctggggctatttcagaagggacaatctactgtccgattcctgccagaaaaaactccacagctgctgaggtgattgagtctcttataaacaaacttcatcttgacaaaacaaaatgttatgttctagcagaggtaaaggaatttggtggagaagaatggattctcaatccaacagattgtccagttcagcgaatgatgctgtggccccgaatggctctggaaaatcgcttaagtggagaggactaccgcttccttctgagagagaaaaaccttgatggatcaatccattatggtagcctgcagtcatggctacgggtaacagaagaacgtcgcaggatgatggaacggggttttcttccacagcctcaacagaaagactttgatgatttatgtagtttacctgatttgaatgagaaaactctcttagaaaacctacgaaatcgctttaagcatgaaaaaatttatacctatgttggcagtattctaatagttattaacccattcaagtttcttcctatttataaccccaaatatgtcaaaatgtatgataaccaccaactgggaaaacttgagccccacatttatgctgtggctgatgtagcttatcatgccatgcttcagcgcaaaaagaatcagtgcatcgtgatttcaggagagagtggttctgggaagactcaaagcacaaactttcttattcaccaccttactgctctcagtcagaaaggatttgccagtggagtagaacagattattcttggagctggaccagtacttgaggtaaatatatagaaatcttatttttgattttaattttgatttttatcctttgaggtgggggggtgtaccattcctggaggtactgcaataccaggtcgatgtgtggagtagatcaagcaagatactgttccatctcccagctccaaaaactc

SEQ ID NO: 80431 - DNA, 1106 bp, Homo sapiens
cgttacatcctcccttgggctgacgtgattacagttctcaggcaaagtctcgaccgccccctaacccattgcgtcccccatgtgcccctcgccctactcttcttagtagaacccctcccagctcgctcatcaccaagccgactagcactaaccctagccatcacggctttcagatagccgctgtcatggtgttcttactcccggtagatgtggtgtcagtccctctagacaccgtcacagactttggcttctctcccaccaccgactgtagcctctctcaacagacctctcctcaagcaaaccttgttatctttctccttagtcgcgatcctttctttggttgaaagggctttgccatgaaatcctgagggaatatttgcttagcctaatgtattccctccattgtggcttaaggggaccgaccgagacccatgtttggaggggttgggctgaaaaaagtgggaggcagagtgaagttatggaagcatgaggccagttgtgtgtgtgccattataaggtcacagagcctgcacctcgtcttgtctgttctgtgtagaacgtgtgaggttgtccagcactgatgttttagggacctctgtaaggattaaatcacgttgcactagtggatataactatgtcgtcttgtagtattacttcacctccttgtcgattgctgcagatactagaactgtttcttatttttatttttaaaggatactaggggactttttttggattcactgttttttggatttgctagaaaaataagatttgtagcattccttaatccctgaatgcttcgatgtcggtttaataataaacttctgttgcctggtgctgctgtcttgcttctccaagaagcaagtacagaaatcatgcagtgttcactgaggtcattaccaacaacagccttctcaatagcagtaaaatgttgaataaaatgtttgtagaagttgagctcctgagttgtcaagaaagaaatgtaatgttgcatcaaatgatcagtacgtaattttaatattggtataaagatgaaatataaagaggtctttgtagtcatacacacacacacagtaaaaaatgttaaagtaacaggagaaaatcac

SEQ ID NO: 80432 - DNA, 1072 bp, Homo sapiens
ggcgtggtagcaggcgcctgtagtcccagctactcgggaggccaaggcaggagaatggcatgaacccggaaggcggagcttgcagtgagccaagatcgcgccactgcactccagcctgggtgacagagcgagactccgtccccgcccccagaaaaaaaagatggaggtcatttaactacagagaggcttggagatggaatgagaaacttgagcggcgttatgtttggaataactggtctgggaaatgggagaaggagccactcttgcctttctcttcagcactgttcattcctcagtgtttatcaggtccaaattagttacttgtctctttgctctcccgttcccttccgtccaggattggtcagctgttgtctccagccttaaagctcaaaggccatccccacttctgtccccaaaatgatcagagctaagccaatttatgagatgcagagaccaacatccagagctaagccaatttatgagatgcaaagaccaacatccactctcatagagattactacatacagtgccttgccaatttagaatctttttctattatttatcatttaagttagtaatgagatataaagatatttaaaatacagctcaattaggatggaaaattaccgtattagggaaagcaggcctttaaacaaagaattcacttggcaggcagagaagctgtatgaggtaaagaccaagacagtgtatggctgctatctattaactagggttaatccaaaaacctgtctatcagacccagataagaacgagttattgttgtctagtatggctagagcatagtatggagagtagaggtgggacagagatgaagatgataaagtgggtgtgaacagattatgaggagccttgaattccatggtgaagagtttagattatattactagaagtaattaataagtacaaaaaaggttcttaacctcttttacccagtggaccttgttggcagtccaccttatagattcagtctcagaaaaatgttcttaaatatataaaatagaatacgtagtaatataaaggaaactaattttgttaagtttttaaaatatta

SEQ ID NO: 80433 - DNA, 1002 bp, Homo sapiens
ctagtcttgtcttttacagcattattactattttcttataatatgctttgttttgcactctcaatctgcatgtgacagtttattgctgtgtgattttcagaaatattgtcgtgctgccaggtcactgcataacagctaactctctgttaactctgttgagtctgttaggctcaaatattctacacccatcagacttgtctcactttgggtggtcacaggcatattaatttcatcacacaacttgtcttgcttctcctctaaattagtcattcttttatttagacaagataatgtgaatggatatttgttttcaaacctcattttctttgattggtttggagctctagctggattttctgattatcttactaatgtcatctaattgataaatattattgtacaactttttaaactcttttagtacttccaagtaaaattatttggtcttctctacaactctctagggtatgtaaggtgggtatatgccttttttacagatggcatacaaaaatgattaaatgattttatatgccatctgtaaaaaaggcgtatacctttttagaaaaacaaggacaaagtcatttaaatgactgctcaagatgataccagcaaatcagtggtaaaactaggactagacccaggtttccagaatcttatcccatactaccttttaaaagaagtcaaaagaagttctaacttatattgtaaacattacttcatctttatcataccccttgaagctaaagctatgaaacaggcaaacacatgttatatcactcatgctcatagcagggcagaatcaggaatgaatttcatttgtattagtctcatgattctctgtttttaaaattacagttccttttaactactaccgtaatcactgtcacgttccattatggaaggaggaagcaatattttatcttatcttttgaaaattaatgttgaggccaggcgcggtggctcacgtctgtaatcccagcactttgggtggctgaggtgggt

SEQ ID NO: 80434 - DNA, 1402 bp, Homo sapiens
gtgtgtttgtgtttctgggctgcaagggtggagagtgcagtttctagggcatagaaatcccaggctcttctccaacctgcccttgtttggattagcattttctcttagacacagaatcgccgaaatctggctcctgtgaagtgtgatttcatgatggcaacaacactctttccgctcctacctttatttagagagcacgggctgggccccagagcagagagttttaacgtttaacagttccacatgccctgtccgctgacagcgagagggtgggaggcatttaagcctctgaaatgatattctagagaaacctgagttcatccgcctgcgtgcctgacctccacagagccaaggaacacctggtacccagcagagccctgctttcgctgctgccttcgtgctggcagggctccttgccttcccggaatgtgttccttcttgtttgccactcagtgcctggcccaaagccaaacctgggctgctcggaatgccatgcccccactcacttctctctcaggatctgagacaaggctctcttccgcctggggaaaggccaggctctcgctgcagcctcgtcccactgcgcaacttctctaggcacatcagactctccaccggctgaaagcagaagcacttagggagaggacagcagggtccccaggaaagcagacggtgtggcatactgatatcctattggcagccttctaaactgggccagagttggcaaagtgttattcacaaggtgttcattaacttgctaaatgcaaaaaggttgggttgggcaccactctgggaaaacatgacacccctgctcctggattcagtctagcatgaaggtgtgttaattggtgtaggatttctatgcaagtttttctttgctgttagttccaaataccagactagtctgtgtggcatgctctccccaatatataaccacatttaaacaatttattaagcaccttctatgggctcctgaatgcatgcttctatagatactatgacactataattttctgagcacttaattgtgtaccaggcactatatagagtgctttttatactcattatctcattgaagagaatctcaatacactaatacagttttcacactttacgctgtgtaaactgagatcaataggccagaaatacaatatggactccttcagggagtagctgaggaagcgaggtagacagaatagcaatgtaacagtgtaagacgggtgaatccgtgtaagtgcaaaaggcagtggtatgggcagacttaatgttacaggggcatgcagcatgcgtgggcctcaaagaatgagtaagatttggatctgaggagagaggtggggaggatcttcccaaaatgtgtgtttgcggggtaacatcagttaaagtatggtagtgctgagggcgg

SEQ ID NO: 80435 - DNA, 1403 bp, Homo sapiens
tgccggcccctcatgaggtggctggctgcattatggggagatgctgcccacggcggagatggtggcagtggctgtgaagaacagaggtacctgaattctgtgtcctcagctgtcactttccggtgagacaagtggagcagggcctttgatcactgtggtcacagacctggtactgggttttgcccttgtgtgctcaaacatttctaaggtgtcccaagccctggaaatagggaagggaagggtggaggcttggatctgaggtcttgctgtccactccctgcctgcctgcccgcatctcaggcatggccaacagcagcccgttgaggggggcttgtctggacagttgcgtgtgatggtgttgagccatcacagggcagaggtcacttgtgtcacccccatagtcattgggttgcaggccatggaggagggacctccactccatggggcctattctccattaaggtggaagtgtccactgtgggcctagcacagtgcaggaaccaggccagggggtctatctcatacctctggggacaggaaaggtagaggatgaggaggttggacgtggtggtggctttgccttggatattcctcttcctctatcaaggccttctcttcttctctgtgtcccacaactctggcctcatcgccctgggactcccatctgctaagatagtggctttggaggttctggaagggcttagtgaggaggccagaagtatcagggaaagttgctggtgatggggtgggcggtgtcagaagcagccactgttttcccctcttcagacactgagagattaatcagggaatgaaatccaggtggaaattatttattgtgaagcagacgactgtctgtcctgtttatgacaaacccaaatgagaattggagggactaccagtaagtggtctcttcatgctctccccatcccagtttttaggatgaaatttagagcctggccttttgtgttgcttgcaccaaatctgtatgtctcaggtgaaactcactgttccatgaatggtcatcctttttttttttttttttttggaaccagcccctttcaccctttcatccgtcttttttttttaggaaaataacccttcttgcttcagcacttctccctggtccttgctgaaagacagagataaaaatccattctctgagccttgcttggttgtcagaggccatgagaggtgccagttataggtggatgtgccaagatgctggtgaacttggtcttcagctatacccaggctcagaaagggcaagagccatgctgcagcgtaggtgactttggaggtgcacttggggcccagggctttgagtgttgcgggtgtgcctgtccctccagatagtgctctgtttctctctgttgtccccctgcctggtcctctggggccactgt

SEQ ID NO: 80436 - DNA, 1023 bp, Homo sapiens
cagcgcttctcagacgcagcctgtgtgtttgcagataacactgaataaatacaaccagcaataccacaagctgtttaaggatgttcccttggaggaagtggttctcaaaggtgagctgtctcccggtatagctggttaggcacccagagtgcctggggccaggggcctctgctctggagcctccaaagcacgacttagaaatgggaactggctgtcctttagatgtggaccactcccctagaatgtgagaagactgggctggtgagaagactgggctggtttggacatagcattgcatttttgaaggttttcttggggaaacgtcagggctttggaatcttgtgtcctgctcttactggtgacttcttacctgctctggcctctcactgagcaggtgggggcatttgcacaatcaaggcccttggggcagagcagagcagggaaaggtcagggattctgcctgaggtggtgagaatgcaggcttggagatcagggcaggaacttgcctggaccctctggagcaagggtggagaaggaagaaacatccagcaggctggtggagtggaggagcagtcaggagaaggacccttcgacgctggggaatggactgtttggggtttggggcctgcggtggggaagggggagtctgaggaagacaggtcctgaggctggactgtggactccagaacgtgaggacccaggtcctggggcttcctgggctgaccttgcttatggccattttctctcctgtgacatcctagtgtgttcctgtgccctccagagggacttcctcctccagggccggctctacatctcccccaactggctctgcttccatgccagcctctttggcaaggatatcaaggtagtaatgagtggtgagggctgccatgaccctgtgaggggagccagcctcctgccccacgggcatgcctcaaagtcatgcctatctctctgcgtgctgggccccgggtgaagccccttgctggttggatgcgcagcttcgaggcatcccatccagtg

SEQ ID NO: 80437 - DNA, 1587 bp, Homo sapiens
caccccatgtccacctgtagccggctctaaagtctggctcctttcagagcaaagacttatggccttgctgggagaggtagaatagagggtgtctatcccattcttcagtgaggagtcagtatgcccctccttcttttttcttttttttttttctgagacagtttcactctgtcacccaggctggagtgccgtggtgggatcttggctcactgcaacctctgcctcccaggttcaagtgatcctcctgcctcagcctcccgagtagctgggattacaggtgcccaccaccacgcccagctaatttttgtatttttagtagagatggggtttcaccatgttggccaggctggtcttgaactcctgacctcaggtgatccacccacctcagcctcccaaagtgctagcattacagggactacaggtgtgagccacgtgcctggccccctccatagtcttctgatcaggctggctggagaccatgctgcagacactcttaggtttaagttttagtttgacaggcattgaggtagcctcagtgggcacctctgggacaaatgggcaggtccagaggggaaagctgacagaggccccatcgagcttccaggagagtttaggctggggccaaatagaagttctccttcccaacttccccttgggagaattttctgaatagcctgaagagggtagctcaagctccatctgtgccttgatgttgctggctgctttcaaatttctttctttttttttgagacggagttttgctcttgttacccaggctggagtgcaatggcgtgatctcggctcactgcagtctccgcctcctgggttcaagtgattctcctgcctcagcctcccgagtaggtgggattacaggcatgcgccaccacacccggctaattttgtattttttagtagagacggggtttctccatgttggtcaggctggtctccaactctcgacctcaggtgagctgctcacctcagcctctcaaagtgctgggattacaggtgtgagccactgcacctggcctcaaatttctaaatttagcaaggccccaaagctttggcacagaccagagagacttgtatgctaattcatccacctagggtgctcccgtgaccccctgaggttgaggtcggcagtacccaaggtgggttgctgccagctggcctcttggaagctctcccatgagctgctgcgctgttagtgcctcctgggtggctccaccccgcccctaacctgcttaggttcgctctggtccttgcctgccacggaccatgtttatcagctggagggaagagcctcactctggaatcagaagtgagttctaagcctcaggctgttcctgttttgctgcgacttgggacaagtcacttccgctttctgggcctgctttacaccataaggtaaggagattggactgtaggttccctaaaggccttctgcatgcagtcatccagtgattctcctaactagacacttctagcagcttcaggggaagtttgtctacactcatgctacagtattttcagcaaatgtgattggacaagtgggcctgtgccttatcttttggtggagtgaaaaaa

SEQ ID NO: 80438 - DNA, 2957 bp, Homo sapiens
catagaggccaagcgtgaagtgcagggacttctctgctgtgatgtggcttaagtttccctgacacctgttgagtgtcctcataacttcccttctggtgcccctccccagctcctgagacacagctgcagctacaagtgtgcagtgtcagtgttcaagaaagtgcctggcagaggggctttagaagggtcccctgccttccaaaggagctttggcaggcagagctgctcctgcagcaacactcccatttcctgttcttgcctgctgagtagcacctagatttctaagcctcatctagatactcagatttgattctgggcctttatagcccagttgctgggactgtttcaggagctaggggccatgtggggcagggagagggcacaaaagtagagaagcctgatgttgattcccagggggctggtcagctctgctactgctccttgcagatgtcaagagtcaggtgctagtcacgtgctgcttggcttgtcactgtcattggcagcgagaggaatgggtgctggtgacattgggccagggctgcctctctgtgtcagagttcagggtgtaggaggggttctgccaaccatgggctgtgtggggtaagtgggtgaggctgatcttgctgggtcaaggtgatcctgagcccttggcctgtggaatgggggtagagggcaaatggtaacctagcatgctgtgggggatataggatgaggggctgcccgagcctcgggaggggtcctagggagcagatgttgaagaggccagagccctcagtgagctggatgagagggtgagctgtttgaacgccctgagggtacttcctggggcctcgtgtaatggtctcttctgtatgtcccccatcccatctcaggtctgctcaccaggtggccagataccgcccacgtgcccccatcattgctgtgacccggaatccccagacagctcgtcaggcccacctgtaccgtggcatcttccctgtgctgtgcaaggacccagtccaggaggcctgggctgaggacgtggacctccgggtgaactttgccatgaatgttggtacgtggctggagcaggggctagagcctagaggagcttggggatgcttgagcattggcttctgtgggaccccgaaagtttggggaatagaaaggggaacacacagaccttagtggggcaaaaggcccagcgactgttcctctcccttattgggaatgttcattctgaatctctcattctccgaagtcctaagctgagccaggagggaaaagggtcctttgagttgtagggctgagcaattcagttcctcttctcttctagtctggggctcaaagcaaaattgtccattttttggcatctgctcattactgagagttttttttgttttttgttttttttttaaataaaattggccacagctcctgtgctgtggggtggcatacacagattacgtactgatgtggccattgtccctgtataaggtagggtatcatcagatgacaggaagcagctagctctgaccctgggcaaggctttgcaccctctccaggatagtgaatgatgtccaaaggtccctgccaaccctgccatctgagtgataaggacatttcagggccttcctcctgtttgcctgggctgtgagtttggtgccaccttgtggtgtgaggaagtagtggtcagccagcctagttcagtactcaggctatggggcagctgcccaggtgcaaacctgcctggcttggcttttactcaccaacctcccttctcttcctccaggcaaggcccgaggcttcttcaagaagggagatgtggtcattgtgctgaccggatggcgccctggctccggcttcaccaacaccatgcgtgttgttcctgtgccgtgatggaccccagagcccctcctccagcccctgtcccacccccttcccccagcccatccattaggccagcaacgcttgtagaactcactctgggctgtaacgtggcactggtaggttgggacaccagggaagaagatcaacgcctcactgaaacatggctgtgtttgcagcctgctctagtgggacagcccagagcctggctgcccatcatgtggccccacccaatcaagggaagaaggaggaatgctggactggaggcccctggagccagatggcaagagggtgacagcttcctttcctgtgtgtactctgtccagttcctttagaaaaaatggatgcccagaggactcccaaccctggcttggggtcaagaaacagccagcaagagttaggggccttagggcactgggctgttgttccattgaagccgactctggccctggcccttacttgcttctctagctctctaggcctctccagtttgcacctgtccccaccctccactcagctgtcctgcagcaaacactccaccctccaccttccattttcccccactactgcagcacctccaggcctgttgctatagagcctacctgtatgtcaataaacaacagctgaagcacctgtttcctctcttttctgctggggagggggaggtggttgaaccctgccctctgagcaggctgggaatggctgcagcctcgtgccccgcagtgggagctatggtggtgtcacctgccatcctgcccacctcctggtgcagaggcgctgggaaagcagtagcttactatcttagggttacaggttgcccccttcagtgctgcggggagactttaatggcttacgtgaaccgaagatgggaaagagcagggacaaggcctccctcccactctggtagataaacccaaattgcaaagtggccttggccatggttcttccactttggtcttcctgcattagcgtatcccttatgggggctgtaggaggagtcagctctgggcgcctgagactgggtttggctcccaggtcctcagttgtggacctaggctccccttgggacccctcctgtttgctggtgccct

SEQ ID NO: 80439 - DNA, 3542 bp, Homo sapiens
acagctttcagagaagagatgtcatttctattaaatgctctttcagtagcgaactgagttcacacttgactaaggatattttccggactgtctgtcatcagcatccttagtgggtttccccatatttaaattggtagaggccagggatggtggctcacacctgtaatctcagtactttgggaggccaaggtaggtggattgcttgagctcagaagaccagcctgggcaacctggtgaaaccctgtctctactaaaaattcaagttagctagctgggcatggtgatgcacttctgtagtcccagctacttggagagggggtgatgctggggcagcaggatcgcttgaacccaggaggttgaggttgcagtgagccaagatggtaccagcctaggtgacaaagtgacaccctgtctcaaaaaagaaaccaaacaaacataaaaaaaaaaacaaaaaaatcggtagagagtgatttctctcccaggcccacttaatgtagactgggcctggctgacacctcaccattcgtgtgatgtgattgctgttctgatgcttagatactcttggcgcagtctcacaattgccaccatggtaggaaggtgtcccaggagacggtgcaccttgaaccagtcaccactaaagtggctgcctttctgggtctctccacacatcccctctctctaatttccctacttaatcgtgtgacttcatggtctcaaaggaggaacagaggctgatcttgacttagatatactgaaccatgaaatcactgcatagaatgtggggacttgaatgtgtctttgggcaagtcatttaacctcttaagacctcatctgtaaaatggattagatatgtttaattatagccttagcattaaatattcattgctgttattattaagtgtctgataagtctctgtgtacatggatgtaatcttcctaactcccattacctccatttatagatgagggttatatggccaataaagcctgggtttgaatctaggtctactgcctccaaagccagtcttctctcctgcaacatcatgctctgtctagcaggagatgagaacaggtctccatttggagcctgtcagtggggtcagagactaagattcaggctcagggtctaaattccatatcctttcttccataccctggtgtttcctatgaacagatagatactttagggctgcaaggtttggattgcatggcactgctcagaagataagttacaggtctgggctaggctgtagctgcccctccaggtggctagacctttcctttctgtgtcaccagttaacactggccaacagttccttccattaactgttcactgctttctcctgtgtctaactgatgcagtttatgacccataactaagagcagtaccaggtatggctctgtttcctgttcatgtcccctgtcctctgggctgcatgcattccgttcttacagaaagaatacctttaacctagtacatcctgccacacatctgcttctactgtgaaattgatgagggggtattaccgattcttccctcacccatcatttactgagatgctggtgattgcattataatcctctaaagcttacattgtctttctgattcttggtcttatctgagcaagtgatctataaataactcagtggctttctcatgactgttttaattattagattttaatcaagtgtcttattaaatatatctgcatgcttccacaggcatctgtctcttcacatggctgttcagtgtgcctctcacaagttagcccacgttttctgttctcctgcttcaaactcagttgagctgccttgctttggctttgatcccagctttccagcgctgctcaatctgttgccatggcaggccattggaaaggctcagtgcatccccgtgcctgaagccaagtgagcgctcactccatgcatgcatggaggctgggcaggagcctgcctaatcaaccagccatgtgaggagggagggcctgttccttcctgtaagctatgtcatgaggcagcgtggtcaagtcctctgccagggagtggcctgggcccagcctgggcatgttttcatgccagggtgctagagcctactgccagattgtctccctccacccccaatgaaaaaatccttccagaagggaagagccaatttcccctgtattggaggggaagtggcagcacctcctgaagcagttggactttcatcaccctacctctgcatctgcctgaaggacagatttagccaattaacctaaggttaccttcctctctgataaattccccattctgtcttcccatgtgttgtgtctcgtttttttcctcctccttccctcttccttgccccctcttcccctaaaccttacagatagctcgtgaggctgaggcagccatgttccaccgcaagctgtttgaagaacttgtgcgagcctcaagtcactccacagacctcatggaagccatggccatgggcagcgtggaggcttcttataagtgtttagcagcagctttgatagttctgacggagtctggcaggtagggccctaagggcaggtaacactgttaggataaccagcctcttgctccacctgctctaggagaagacagccaggcccaacctggcatctgggcacagagcctcttctcgtctgtaggaacaccgccagggaggtcatggcagggcaggaccaaagggtcctgtggctcagtaggcacagtagatgtcacaggcacttggtgaaggactggtttctgtggagtcttgatcttggctcagctcagaatctccagtgattgggctcctcttggcctttgttcccaggaacatgttcctcaccagctgtccggtgactcttcccctccctctccttttgtgacaaagctctgacaaagctctgtccccctctcgtccctctggacggatgttgctcccctagattgcccgtgaggcagaggctgccatctaccacttgcaattatttgaggaactccgccgcctggcgcccattaccagcgaccccacagaagccaccgccgtgggtgccgtggaggcctccttcaagtgctgcagtggggccataatcgtcctcaccaagtctggcaggtaggaggcggcagcggctccctggaatgccctgctcagtggtacctcaccttgggggtcctgggagcagtccattgaacaatgctcaggtggcactgagccaaggtaagacccctctgcctgccaccttgggcctgcagggaaggattgagcagagccccttccctgggcccaaaggactctaggtagcactcataaggaatgtcagaacatttggatcaaaagcaaatttatgctggagatttattacataacagtgcacaggctgactacaaatggttatttgatattgaaaatttagtcctctaaaattgtaaaagataaccacttttgcttattccagttactatgtgctctttaaaaatttcagttgggaaatgaatttatttaaatgctgtttactgtgcctccatttggcacactagtccctgctgttttt

SEQ ID NO: 80440 - DNA, 5497 bp, Homo sapiens
agaggcaggagaatggcgtgaacctgggaggtggagcttgcagtgagcctagatagtgccactgcactccagcctgggcgacagagcaagactctgtctcaaaaaaaaaaaaaacaaagcgattgagaaaatcaggtctgtgtgaccttagcaatgagttatttagcttgggccactgttagcttaagtcaataacttcaagtttgcgttgtagttggaatcaatagaggaaaagctctcagcattaccacatatatcagaatgtgacattgattgccagaccagccttatccaaacacaagtcctaggctttttgccctgtttatgagctttatatgctgagggtatttgatgagtcttagggaaaaaagaacagccctggggacacagctgcttttatgatgagacatgtttgcacccataccttaatgggttttggtggcaatattctgaaatttgccacctacatttcaaagatttgccctttgggtgaattagtgctgtagtagaagtgggtggaggctgaggaggttggattaagcaggtagaggatttctcagtgcatggatcgtgctgaggatggagatagagctctaagacatccacgggcctttcctgagtgatcagctttggctcctgggcaggggaattggagctggattctagtgtgggagcacgcttgtcatcttccttcttttcccccagtaccatgcggagaccatcaagaatgtgcgcacagccacggaaagctttgcttctgaccccatcctctaccggcccgttgctgtggctctagacactaaaggacctgagatccgaactgggctcatcaagggcgtgagtattctgcggagagcgaggggaaggctcagtaggcaatatgccccagagacatgtcctccaaagcgctgggttgccatgtttcttcccagtactatgaaggactgcagaggagttgaggtctacaaatgaggatttattcatcactgtaaacaatgttgatttgatctactttgctaggaaatggtaccacaaaggaaccttttttttttaccctaaaaacctaaactttaggctttctaacttggagaaccatctctttgtatctttttccccatcattaagtagcataactgaaacatattcttttcttggattatttccgtgaagtatacagagttagagaataagagcaaaaaactgtattacttttagcagtgacttgagcattgttcccgggaggaaagagcttttccattccttctgaggtgatgctgctactggtgtctccagtttggactcttgcttactctcttgtccctagagcggcactgcagaggtggagctgaagaagggagccactctcaaaatcacgctggataacgcctacatggaaaagtgtgacgagaacatcctgtggctggactacaagaacatctgcaaggtggtggaagtgggcagcaagatctacgtggatgatgggcttatttctctccaggtgaagcagaaaggtacgtatgggagctggagtccagttgtctaaaacagtcttttgtctctaaacttccttgacacaaggaagatgggaaggttggttgcctggcagtgagattgagtctgtgtgttctcaggaatcccttttataactcatttatcctcaaagataggctttaatccagcatagttacattcttctggttctggagaacacaggaacatacatacatatatatatatatatacatatatatatatatatatatatatatatatatatatatatatatttgtttcgctgtgttttgttttgttttcaagacagagtctcgctctgttgcccaggctggagtgcagtggcatgatcttggctcactgcaacctctgcctccagagttctagctattctcctacctcagcctcctgagtagctgggattacaggcacccgccaccacacccggctaatttttttgtatttttagtagagatggcgttttgccatgttggccaggctggtctcaaactcctgacctcaggtgatctgcctgccttggcctcccaaagtcagaacagtcttaattatccttatttatgggtgaggaaagtgaggtacagagaggttaaatggcttgcccaggattacacagtgtagtaggttttcaactctggtaaaacagctccagcacccataatgcaccacttcccagctcactgtccttgcgggaaaggtgcctgcttcctgttgacctgtgccctcgtgctctgcctcccctacttaccctttttcatacaggtgccgacttcctggtgacggaggtggaaaatggtggctccttgggcagcaagaagggtgtgaaccttcctggggctgctgtggacttgcctgctgtgtcggagaaggacatccaggatctgaagtttggggtcgagcaggatgttgatatggtgtttgcgtcattcatccgcaaggcatctgatgtccatgaagttaggaaggtcctgggagagaagggaaagaacatcaagattatcagcaaaatcgagaatcatgagggggttcggaggcaagtccccgttgtccctgctccagtcccagcgcagctctccgaagggcatggtccatcctgtgaatgtctgattcccagcccctagcccatcagaatgtagactcccaagccagttccaaacctgctgaatcagaatatcttaggagagtagaaggcattatgtttttttgtttttgtttttttgttttttttaaaaaaaagcttcccaggtaattgagatgctggcagcttgacattgttccctgggcctggggaccaacatttgagagaacagggtcactgctcacaggaccaggggccatgatgttctgttcctgatcagaaacactaccagtgtttgctggaatggggggaccagggggaaagatgacagcagacacttaagaaagggctctttttggcccttcctggggagccatgtggaatttcagggcctggtgtccatgttaaagcttatggcctcctggtcttcacttagaatgcagctggctcagtgatcatgctaactctggtatggtccattccactctcagaggaagatgtgtggttcttctccagtttcagattgccccaacttagcttaccccctccccaatgctcacaaagtagagcccagtgggcatggccaccatttttggcatcctgctaggaatacaactcagcacaactaagatgctagacacactcttgtggattagaagtgtgtttggggagggtgggggagcaaccctgtgcacccactgtagtggccttactgtctgagctttgtgtagatatcctctgtaccaggcaatttggggtcctcccctttgccatcctgataagccataggctagctgaacttggccctaggccaggcaaagccacattccctcttgccttcagcaggttggagtgggccacctcaaagggcagtcctcaagtgtccttgactagatgaggccatgggtctttgtggtggaagcagtcatcaggcctcaggttccctgtcttgaagtgctgattggaaaatggaggccctagagagacccctaacatgcatgggatttggagaggagaccttgggaatgagcccatttggatttgccctctcccctttcttccgtcaatgaagcatccatattggtgttgaagcccagcaggcagaattgttggcccactctgggggcctaaggtagctggactgccttgccatctgtgtgcacccatgatgatatcatggatgtctgtcctggtacaaggacatctaagttagggaatcccagggaaacttcttgtctactgccatacttgtggcctctgttctatataacctctctccccccaactttgtccatcaggtttgatgaaatcctggaggccagtgatgggatcatggtggctcgtggtgatctaggcattgagattcctgcagagaaggtcttccttgctcagaagatgatgattggacggtgcaaccgagctgggaagcctgtcatctgtgctactcaggcatgtgcccacccttccccacattctcatgtgcacactcgcatgtttgtatgggaaagctctggaggctgtctgatctcttcccatggaattgtcgcacgtaacacacagataatccccttcccccatgtacctacacaaagccatactctgtgtacctactcactatccagaggatcagcttgctgtcatttgtctctgaagacagctcaagctacatctcactaatgctctgtcccctcccagatgctggagagcatgatcaagaagccccgccccactcgggctgaaggcagtgatgtggccaatgcagtcctggatggagccgactgcatcatgctgtctggagaaacagccaaaggggactatcctctggaggctgtgcgcatgcagcacctggtgagttctggggcctgccccatcccccagggcttcggactgggcctgggatggatgcaagctctggtgcagagctttttaggtttctccatcctcttatgcacagcctttcattatcctccaagttacagcagcaagagggtgggggtggaagtggaggtggcttttttttttctcctgttctgcattcctgcccacacccccacccctccatttccttctgctctggaggcatcctccttcattggacaccacacagtttatttcacttctgacttcaaggttgtgaattcttcccatggcttaagtcctgggatacttctgcagtgaaaggaggtcttgtacctcttcctcagagtcagaagttctgagtacctttgccctattctgaaaagggctaggggctcctgctcccagctgccctcttcctttggcttccaattcagttccctctgccccgcatcctgcagacaggcgctcccgcagggggcccttgtggacctgcactggagtctgttgccttcactgagctgcctgtgctggccttgcatggtgcctgtagggggatttgctttgctgtgccattggggtacagctgctgctcttactctagaccaaaaagtcgggttgagtgactggtggcagggccacagatagagacagcggggagggtggctgaccctggcggccctggactgagcgtctggaggagtcgtggaggctctttcccttctttctcctctgagagctcgttcttcaggctcttccagcttgtcatgtcgagtgcctggccactgctcagggttggaggctcagtccctttgccctgtctgttccagctctggagctaactcagggatccctgatcagggttacataggtttggtaaaatgagtgctggaaattaactttctcccagtagtcttaggtcatgctcagtgaacttaaactttatccagatatggttttccttcagcctttctattccctttctagccagtgaaagacccgctgccctttgacctcagcccctccaagccc

SEQ ID NO: 80441 - DNA, 1233 bp, Homo sapiens
ataggtaacatttattagataattaccatgtactttgtcctaatacttcatgtattcttttactcctcacgtcaactctgaaggaaaggcaccacctatccccttaaaagaaaacaactattactattcttttttttttttttcttttagagacggaatctcactctgtctgtcgcccaggctggagtgcagtggcacgatctcggctcactgcaacttctgcctcctaggttcaagtggttctcttgcctcagcctcctgaatagctgggactacaggtgcacgccaccacgcccagctaatttttgtattttaagttgagacgaggtttcaccatgttggcctggttgttgtcaatctcttgatctcatgatccacccgccttggccttccaaagtgtttagatgacaggtgtgagccaccgcgcccagcctctattctattctattttgttctatttctattacaagccagtaagcaagaaaatatcataatttataaggaaccctataaaaaacagacaagccaagggtctgtcattaggaagtatgcctgaataagaagctgaagatttttagacacaggtttcaggcaacactgtctttagaggctaggctctggctccagctccctccagcctcctgtgaataacaggcaggcttacttgcaggtgccactttcctggacagtggtggttaaaggacaaggcccagaaagtgctgaattaggtgcccttgttaccgctaatgtcttattgatgacactatcttagagctcttttgacatcttggctctgcgtcttttttttttttttttcttgagatagggtgttgctttgttatccaggccggagtgcagtggtgtgatcatggctcactgtagccttgacctcctagacataacccacctcagcctcacaagtagctgggaccccaggcacgcaccatcatgcacagttaatttttgtgttttttgtagagacgaggtttcgccatgttgcccaggctcatctcaaactcctggcccaaactgtcctcccaccttagcctcccaaagtgtttggtttataggcatgagccactgtgcttagcctgagtccctcttttaaacaaacaaaatggtaaatggaaaggaggaaaggcttaagaaaaaagattgaagccaggatttgttgtaagcaaggagtaataaagggcagttcatttagagaaaggcatatgaccacctttcccc

SEQ ID NO: 80442 - DNA, 2470 bp, Homo sapiens
caggagcctagtaggactgtatttgtgctgggctctttattagctggctttacctatggacagaggccttgcccaggagccaggtagcagctgttgggatggctccattcctgcctccattgccagatttagaattaacccattctgaggagcttggggttccctgaggtaccatgacttatttatttttttattttataaaacaaaattttgctctgtcatccaggctggactgcagtggtatgattatggctaactggatccttgacctcccaggttcaagtgatcctcttgcctcagcctcccgagtagctgggaatacaggcatgcaccaccacacctggctaatttaaaaatttttttgggggaaatgaggtctcactatattgccttggctggtctcaaactcctgggctcaagtgattctctcaaatgttgggattacaggaatgagctaccatgctcagcctgggattgtgcctttttaaaaccttcagacttaaccataggtttcccatagatcatgggatttcgtaatggcattgataagaggaattacagaagaggcaaactttgcacctgtcttggcttctgtatttcctgttgagagtaaagaaaatgctatcctgtaaggccaattgccttacagaggttgccctctggcatttggaagttggtattaagtttggactaaaaataaagcctcaggaaatgcaatccaagagtgaattcctccttttgggaaacacaagactcttcatcatagattccctaacctgtgttcataaacagcctatggcctggctagtggctggcccttaaatgtcatggggacctgaccaagtccagcagacataccatgtaggttaagacatgtccctgtaccttttggaaaattctgtagttttccaaaagcaaggggtccttagcaggagtcaccgagaattacttgttagagaattaagtgttagcttagcttagagagagctgaagacaatgctggaggtctgttcgctgttgatccctgctgctgtagtctgccatgggctcctgcattcaggggaaggagcagaaatagatttttaagaagttgacctttaagtaggctttatggttccttcatccagtaaaataacaccacatagctctaacatggcaagggcgagtgatacctgccacacctgctggatgagagctggctccgattttggtattttaaactttaagaggcttttggagattatctctactttcactcctattcccagattataattaagatttattttttattttttatctatttattttttaaagatgtccctcttgtgtgttcattttgaagttttagaccaagatgaggttgtgtgtgggctcagcttggaaactgatctgaaattattctaatttatataatgtaatgtaaacagtttcagccttaccatacgtcagggctatcgtttcatgtgcacctttgactaggggctggggcgtacttttccagtttctgactattttaaatgctcttctgagcagaacgttgagattactgtcttccctctcactctgacagagggacatcaaatgtctgcatctgatcttttaacagctttttttttttgagacagaatcttgctctgttgcccaggctggagtgcactggcacaatctctgctcaccacaacctctgcctcccaggttcaagcaattctcatacctcagcctcctgagtagctgggattacagacctgtgccaccacgcccagctaatttttttatatttttagtagagacggggtttcgccatgttggccaggctggtcttgaacttgtgacctcaggtgatccgactgcctcggcctcctaaaggcgtgagccaccacgcccagccctcttttaacagctttggcaactagtcttcagccctcacttttggcagttcacatgggcaagatgcattcttgctgaacatgtggttccatatgccatgttttccagatttatttatttatttatttatttatttagagagggagtctcgctctgtcatccaggctggagtgcagtggcacgatcttggctcactgcaacctctgcctcctgggttcaagagattcttctgcctcagcctcctaagtatctgagattacaggcacctgccaccacacccgactaatttttgtattttagtagagacttggtttcaccttgttggccaggctgatctcgaattcctgacctcaagtgatccatccgccttggcctcccaaattgctgggattacaggcgtgagccaccacacctggcctagaaataatgacttttaaacaacctaaatgtagagccttccacaggacagcattgatggatgctttaccacataacatcccaataaagccacagctgaagtggaagactcagtacacctcccagagatgctctaagagattatgatatatgacatagattt

SEQ ID NO: 80443 - DNA, 4733 bp, Homo sapiens
ggagttgggtgtggttcgtgcctgtagtcccagctacttgggatgctgaggctggaggatcgtttgagggtgcagtgagctataatataatataatcacaccactgcactccagcctgggtgacagagtgaaaccctgtctgaaaaaaaaaaaaaagaaaaaaaaaaagttggagggaggagtgttgggtattttttatgatttttgtctcctggtttctgaagaatggccaaaaaattgtgtctgacacaaaggaaactaatataaaaagccaggagctgtctgagatgagaaaggaaagggagaatagggcacttggagctgagctgtgattgtgcctgttccaacctgtcactccagactaaggcctcttagagatggtgtctcctttctcacagaggagacatggctctgaggaagatcttactgcaggggctcgggctcaagaataaggctcctggacctgggcatggtgtgtgctgctatcagtggatacgccaggcttccactgctggctggaggttggctctgcatgtctgtgccttcctaggaggaggatgcaatagtgagtcagactggcatgggtggggccacatgtcctggcaggcactgtccaggcagctggcatgagggagaggagtctttcccagaagtccgccctgagaaaccaaggctgggctgctctcctggagccaggggagtccagtgagtgttttacatacaactctaggtacgtggttggtgggatgggcagtttgtgctgggaagaggcttgtggaggattttggagaaggcaggagagctctggccctccctgcaagggaggcttcaggtcagagcctgaggaaagacctgggcatgagatatgaggtctctggctgggtagagagcatgaaggacacatgagatctggagtctggatgaacttgctgacaagcaagctttttttgactgctaatgcgtaaatccactatagaaattttcatttgtcatttttgtacttattggcaaaaaattagagcttataggcatcagatttaatttgagatagttgaaatagggtttgtgtttgaggccaatataattttatctgctaatggcatctcgtggacttggaggcagcccttctgtaccagaacattgtcaaaagcttttactgtaaagcttgagaacaaactagtttgctggatttgggcatgtaactaacaggtttgaggcatgggattatcctgtggacttttttttttttttttttgctttgaggttctgaatgtattaaggttgaccttcttaagccgttgaaactgttctgcagtacatttgtgatgtagggcctaagacttgtatcgttttttttttttaatcacaacccagtgtacagaacttgagacatgcgtcttttctctgccaccttttaaaagcagattattcttgaagtgcatagagcagcaattgattaatggaattggtgtcttcacatttcatttacttcctcccaacaattttataggatgcatataaatatttccaaaagaggtacacataatttcttactataaaagtatttttatatttatatcagtaaatttgttaataaagaggatttttttttttctgtaatcctaccaccccaatgacgtcctattaaaatttcagtatatatcctcccaggtcttttaggtatgtttaatttggtgtcccttccccgctcccaaaaggggagggaccaggttcttgtatagaatagtggaatgttagtaaatcacaggtttaaagagacataacagtggaatctctagagcagctgtcacctggatacctggttattaaggtaatttttccattaccccaaagagctttagttacactcagctttttccttaatccttgtgcagctctccagggcacaccgtattcagctctgagcggtctttgctagtgaggccaaggagccaccctgagccaaaaggggagcattatgtcaccggaagcccaaccccagagaaccaaaggtatgacctgatattcagtggccccagccaggtctttacaggaagaccctcatatctcaggtctaagaagagccagctgatggtttttaaaaagagtggaattagttactccaacccacttattcagatcttattttgttcacaatacagtccctagattgtaggcccattggaggccacagcaaagcctttgtgttccagttggcctgatgtgccatctctcagtaatgttcccttaacagccagacttccctaagcccagctgggagctctgaaggtatgcgagccctccctcaaccatgagtgtagggaaagggaccaggggccccaggctttcctgtcagtaatgcagaagttcctcagatttagggaagggggagcagaggcataactttgattctgacaaagaggcattcagagagactgaaaggtcatttaacaaacactggaatgcttccacatactaggtgctaggagatacaaaaccatataggtcctggaagggaggattgattttttcattttggtacgtagtagatattaggggcttaggaaatacacatcgaaatgaagagtgcatttgccatgttgaaccgttagccggtatcttatttccccattttaaaagttttagaatctgtggttgaggacttgtggccatcagttttccatagccaacagactgttcactactgccttcagagctccttggacctcagcgggccttctttggagatggcagagatggatttagatgtatactctactcgagccacccagagagcccacaaagtcagagatggaacagggtaaaggagtaagggtcatatgtgtgagatgccttgatttggaactttgagatttaggatgaggtggggaagggctaaagaggagcttgttcctgagccttgcttggccgaagcatttaggctcaagcgttttagaaagagtagcccttggtctgagaactcaaggaaacagctttctgatgagacgtgtagcaagcttctggttcacatccttacctgatagttcttcaaacactgcctggtctggttcacatccttacctgatagttattcaaacactgcctggaagcttctcctgagtttttgtctctaatcagctaactaacaggctgagtgagtttagttgtaagtcattaatgaagaaagcaaaggttggggccattgtcagggttgtgacctgggctagttaattacctggaactgatggtctgtgttacagagtggtggtatacttgtcaggcttagaaaagaaatcaggatgtgtatcaaaaatcatttggggaaaagatttgaccagcaactttaatttctctatgtttgcaactatcctgttaatgtagttgtgataatttcagaattataccagtgcccttatgttatccttgctttgcaaattgcaaattgctttgcgtgtcctgacatccttctggccaacagtagatgtggttttaggtttagactcctgggatggaagcttttgcattcaggggaatgactttgggtttgggtgaggattgtaaagaggcaatatgggtgccccacgacaaagcagctatttgtagctttgtgacagcttgacatgcagagatctaggcttatcaaggcactaagctaggagtcagttgtttgtatcactggaagattggttacaacttccttcattggaagctccttcagtgcatgttaaatgatgttatttatagatagggtggtgagaaagctgtctaggtagatgtcagtcagcccagtgtaagagagacctgcttactgtgggtgcttgggactatgtggagtgggtgggaggttttaacttgttcagtaaggtcctttccattgttcacaatctggtgaaccctttttctaacatgaggagcacccacataaccagatcatgtctggcttccctgtggcttgtgtacaaagcgtgcttattgagttaatgtgtaagcaggagacagccttctgtgctaaatggtatattaaccacttctcagtcttaccactctctttcaatttgtctcgacccaggacctcagcagccatgtcgaagccccatagtgaagccgggactgccttcattcagacccagcagctgcacgcagccatggctgacacattcctggagcacatgtgccgcctggacattgattcaccacccatcacagcccggaacactggcatcatctgtaccattggtgagtgggtgtgccccttcccccaaaaaagggcttcatgggcagtgacctttctctcctgaaaagagtaactaaatgtcctaacaaacctaggtgctacatgggatactacacagattcttatgaaaggactcaggtcataggaagttgcagtaaagaattagtatgtgcataggatggcaaatacagttaataagagagtattagacatttcaaaattgctaagatggcgaggtatggtggctcccagcactttgggaggccaacgtgggaggattgcctgagcctcgaaatttgagaccagcctgagcaacttagaccctgtctctccaaaaagtgaaaaaaaaaaaaaaaaaattagctgggcatggtggcatgcacctgtagttctggctacatgggaggctgagacaaagatcacttgagtccaggagattgaagttgcagtgagccatgatcacaccactgcactccagtctaggcaacagagcgagatc

SEQ ID NO: 80444 - DNA, 1140 bp, Homo sapiens
cgggcgcctgtagtcccagctactcaggaggctgaggcaggagaatggcctgaacctgggaggtggagcttgcagtgagctgagatcgcgccagtgcactccagcctgggcaacagagcgagactccatctcaaaaaaaaaaaaaaaaagaaaaaagaaattaaagaaaatacagctcagcctttatttgtgtttttttttttttcctttttttctgagacagagtttttcactctgttgcccgggctggagggcagtggtgcgatctccgttcactgcagcctccacttcctggattcaagcaattctgtgtctcagccacccaagtagctgggattacaggtgcgcgcctggctaatttttgtatgtttagtagtgatggtgtttcaccatattagccaggctggtctcgaactcttagcctcaagtgatctgcccgcctcagcctttcaaactgttgggattacaggcgtgagccaacacagccagccatggctcagtgttaatggtcagttctgggtggtagagaggcagatgttaaaacttttttttctttaattcgtaacatagaagcaaacctataaaggctgccgtaggaagaccagtcatagtaactagttcagtgctcttggagagttggcactgcctttcctcctttatccccccgactagaatgcagggcagcccttccagtaaatgttgagccagtgcctcactttgctgaggccatcacccaccttagttgcacttaagaggaccctaaatcagggtcccaggtcccttgctgattttagagtgtggatatcatacccagaaacaccgccctacttttaatcctagtaaggaggcaccatgtcccaggacaactaatgcttcccccaaaccacctccttcaggctgaaaccagttctctgcactgagcagctgggatggaaccaggaaatcctcggcatctgaggacattgaggggtctctgacttagggcttcttcacctgaagttgagtggtctttgagggaagtaggcccatttagcatcagctgctcttccctattccacactctagttggaaataggaccttaggttcctgttgacaagtcatttactttcagccccgaagaaataaaagagccaagattt

SEQ ID NO: 80445 - DNA, 5231 bp, Homo sapiens
cccggaggagtggggagtggcagggcggggccgggagaatgctgccccggaacccataaatctgggccctgcccaggtaggccgggacagctggggtggcctgggccgagagccaagaaaagacaccccatctggcagcccaacttggcggcaacaggtggcccggcgcccgggggtctgggaggaaagtcgctccgggggcgggccccgttgccccgccgcgtccccattggtcatcaggtttcttaaaatgtgactctgaatctgtgtccttccgccgcagaatttagtcccaccgaaagggcaacctgcccgcgcgttccgccgccgccgccgcgcttcctcctgaaggtgactgcgcccgcggggacgcagggggcggggcccgggtcgcccggagccgggattgggcagagggcggggcggcggagggattgcggcggcccgcagcgggataaccttgaggctgaggcagtggctccttgcacagcagctgcacgcgccgtggctccggatctcttcgtctttgcagcgtagcccgagtcggtcagcgccggaggtgagcggtgcaggaggctacgccatcagtccccaccaagggccagtcgcccggctagtgcggaatcccggcgcgccggccggccccgggcacgcaggcagggcggcgcaggatccagggcgtctgggatgcagtggagctcagagagaggagaacggctcctcacgcctggggcctgctcttcagaagtccccagcgccgttccttccagatcaggcgggtccgccggctcctttcccgccccagccctaccccctcattctggtcccatcctcttcctcctgccccaatcctcaatgcgcctccatcctcgcctgccttctctcggtccctcgtgattgattccacccttgcttcccctttctccgcgccgcctgttccgtgctcgttttcccctcttcctccttaagtctggtccttccaccccctcctcttcaagctgtgcgtgtcccctgattctaatgctttctgtgtaactcattgaaactgcgttctggttcccctcccgcgtccattctccattcatgcgcgaccgcccttcccgcgccccagttccctctcgccgcccctccccctgcttgctggtcacgtccgctcccccgcatccccttcctcgcctggcgtgtccgctccctccctccctctctgctctggtcgcgcccgcccacttgctccggtctccgagcgcggtcccaccccccttttccatcaccgcctcccagctcccagcaggctcgggcggtgctgaggccccgtgtccggggcgggcgggcggagggctgggctgggtgccccgcgcggcgggcgggatgcggcggcccgggggcagctggagacttacgtaacgttggcctgccccgctgccgggaggcagggcggttgcccctgcggcgcggtgccgtcccctgtggccgggattagatgggcggcctgcgagggcctgggaatggctcggggcccgagagctcgaccggcccttgccgggtggccgccagggaccacgctccatctcgccgcggccgggctgcacgtagcggccgcgcccagggcccaccccgcttcaccgggcgatggccttgggcctcgtaacgggcgggataaacctctgcaggctttgctggggcctcctggccctcgcccgttccgcgcctctccggcacgtttctttcttttcctttcttttttctttcttttttttttttttaattatccggcacattttttaacaaatgcgtcctgattgtggaacgcggaggccgcggggtggggtggggatctggttacggagggggcaggaaatctgtcgcgttcactgaacgcaaacggtgtgggtcaagggctgtttgggggtcagagttagagaccaggatgactagacgagtcatagcccaccgagctcacaatcttaaaatgtatctcctgtaatgctgggagtggggtacgagcttcctgctgtgggagggagggggacaggaagcctcgtaaggtctcaccaggtggcaagcacactggattagaagatgcaggaaagcaccttccagtctgaagatcatttaaagactcagtcatgtaagggcatcccttggcttcttaatctacgtactccagacccagggcttggacctttgctggtacgggttaaagtgaggccgacagtgaaggtccacgtggagagagacattgggaagttgtcaaaaaggcgtttagaatcaggtttgactcattaatttcctgagactctgaaggagttcagcctctacacctcagtttcccctgggaaaactgggagtaacattttcctcatgatggttgaaaggattcatgcttacgtggatgtggcacactcagtaagtgtctaatctctggcgaaatacccagaagaaaagcctgtgactgaatatattatttttgagcacaattacttagtccacaattgagcataagggccttgatccattgtcttcctactgtccccaaacgcctacagctaatcgtgaggaatcaggctctctgaataaccacgtgtctcctggaaaccagttccccaagggatctggtttaatattgacaaagtaactgataatgtaactttccaactctctgcttggagcagatgctttttggtcatctgagattgggacctgtagacaaaggcaggcaaggaggggctgagttaagcctttggtgttccgctgtaagtagaatactacctaccagaggaacattccagcccttgacttgctctgcctgctggtgagattaggattggagccagggtcagtagcccccagttggccgtcttgagggtgtggccactccctaggtcacagaggagatggaggtcaggactcccctgctgcagcgttgttagcaaataatttgccctttggtggcctgaggtgctgtgggggcaggagtgggctgtcttgtggggaagggaaatgtaacgtatcaccaaatctgtgggggagtggggctctgtggggaagatgactcaacctttcaattattctgcttttgagagaattatcttcgctgggtgagtggggaaactacattgtggttcttgcaggcttaaaaagtcccttctcccctttcagtgagtcagataatgaagcatgcatttcccctaattaaaaatgcctcaactacggagcttgcagtgagccgagatcgcgccactgcactccagcctgggcgacagagcgagactccttctcaaaaaaaaaaaaaaaaaaagccacaactaattaaaaaatgattggtccgggtcacctggttctctgtactgccttaagagcttaagtgtagactggcagagcccggtgcccagctaatgccgtctgtgcagcttcattcctggcccttttgtagcgggcacagccgcctctcctgggacttgattaatgatgacttaaagaaggttcttgaactcatttctcagttactgacttgagccaaaatgtatggatgttggtctcctgtctagcacaactgctttcattttaagcattgcattagaaataatgttgtattcatattttagcaaagagcatcattagctctttaagaaccgtacccccagtgacttagcaaatttggtggcggtgactctaaacagctagcactttatgggagttgcttctgtgccttgaatgttgtgacactgatgtggggtcacaggaaaaaccattttatttcctaaagctgtttatttcttaatattgaggcaatggaagaaatgaggaaacggccgtgggcaggaaggtagaagaaaatgcagcacttacattacaaactcactttacttgggttttagtttattttgcttcagttttttgttttttttttttttttttttttttttttttgagatagttttgctcttgttgcccagtctggagtgcaatggtgtgatctcggctcactgcaacctccacctcctgggttcaagcaattctcctgcctcagcctcccgaagtagctggaattacaggcacttgcaccacgcccagctaatatttttgtatttttagtagagatggggtttcaccatgttggccaggctggtcttgaactcctgacttaggtgatccaccggcctcggcctcccaaagtgccgggattacgggcgtgagccactgcacctggcctgcttcagcttttatgaaggcaagtcaggatgtgttatcttggccaagagctaagactgagaccggagtagaggaaaatgactcatttgacattacccttctttctgaatcactccaaaagtccacagtcaaatctcaattagctggtataacacaagaatgcgttgaccctgtgagcagagttttattgcatcttcaagggtcttcgtgagattggtttatttggtatgaggtcttaaggattttaagttgtccctttaagcatcagttctgatacagatgggaatagagctaaacaaccagatatatgaagaccatttttgataccaccatacttgcggggagcttgcatttttttaccaaggggcagactggataattgagtaatttaaatacttgggactttgttaaagaagctgttgggggaaggtgagcctgggtgagtggtggagggtgatgtgcagcatctgctgggccttcctgcctcttggtatgactgctcagctcaggagttgggtgctttagggcccctaccatgcagtgcggtgaagccccgcccctgcagtggtttgtgcttgtctgcacgtaggagggaacaagccggctgcagtaccttcggtggcctctgagactcacctcccccacttctgtccatagacaaagctcctggggagccctaagcctctttcctcatgccagcaagcagtcttggaagcaggctggggctgcagtgggagagatgccaagaccagttattcaagggcagtgaggttgccagtcctagcatttcacactgtggaccagcacagctgctggctgaatactgcagtcaagattctctgaagggagtcctatcccttccaaacatcttcagtttacttgcagataatgtttcttcattttttattttattttattttattttatttttttgagacggagtctcgcaccatgacccaggctggagtgcagtggtgcaatctcagctcactgcaagctccgcctcccgggttcatgcc

SEQ ID NO: 80446 - DNA, 1090 bp, Homo sapiens
gcctccccagccatgtggaactgtaagtccattaaaccctttttcctgtataaattaccaagtcttgggtatgtctttatcagtagtgtgaaaatggactaatacactatattagactgacagagtaggccttgcttgaatgacgggtctctgagggccctatagatatgtgagtatgtataatgggatgttgggggaaatgtgtgcaaatgttccacttactgtagttactccagcatttgaccaactgtcttgtatgttttcttctacgctattctgctctggttttctgttttttctttctcacactatctttagcctaatggcattgagtgccctctggaagtgagggttggtgtaaatagcgttcatatatctagttccagtgacttggctataaagttcaggttgaaataggggacagtgaaaaaggaggtgatatactccatctgtttgtttagtcttgtttagggacttctgataagtgcatactctggacacagaacatctagggattattctagccaccatgatctcaggttctgggctcaggaaatggacaatcattggatcagtgtggaaaggatagtgtacaacaggattgagttgggacaagatttgggttatatcataagggccatctctaagacctgccagagaaatcagattgttctttattatcttttatgtgcctcctctggagtataacctgaatgggaattttactttttgtcactgacatacccagtttgagagaaggtcatgatgtttgggtggagagctgaacctagttaaggctaatggggaaggtgaaaacaggggttatgagtacctgtcctgtaaaaggaagaaatgggcaattcaagccttgaggctcttggtgtcctgagttttgttcaggccctacctaaatctgtcacgagacttgagtgtaaatgcatgatgaattgacagcctgagcagtgaagaatgtcagttcaacagctatcagtctatttctacaccatggctatgagaaaaccaagaactgatcagagtggagttaatagtaatagaaagttccagggtagagtggtgagagtgcttatga

SEQ ID NO: 80447 - DNA, 1176 bp, Homo sapiens
tcgagaccagcctgaccaacatggagaaaccccatttctactaaaaatacaaaatcagctgggcatggtggcccatgcctgtagtcccagctactcgggaggctgaggcaggagaatcgcttgaacccgggaggcggaggttgccgtgagctgagattgctccattacactccagcctgggcaacaagagcgaaactccgtctcaaaaaaaaaaaattacatgtattgtgtacaacatgatgttttgaaatatgtgtacattgcagaatggttcagtagagctaataagcatatgcattatctcgcgtatgtattttttgtggcgagaacacttaaaatctaccacagtgattttgaagaatattacacattgttactaactatagtcaccaccaataggtttttgtgtcctttgcatgtagaaattaacactgttaatttcaactaagttttctttgcatccagagacgtctgtctcctcctgctatccccttgccctgtctctgggcctccttgatgatatagaatgtccagagccttgaggcactattgctgtgctcttctcctagccaagattttgactgtccctgctgccatccattcctgatctcaatttctattgttttcctgacatagctttccctttttagtttgcctccctcttcctagtcagccttcagtacttcctcagtgcaacagctttctccctcttagcctgaggaataaccaggcatagaccatctgaggtggcatcacaggtacatagatgaggcacaaaaaacaaagacaacagcaaactgtatccacatgggagatagtgctctcttgctgagccctcagtgttttatgtctgttctcttctatcttctgtgttcagcctgtatagagcttagtctgtccttgactcctaaggaagttcattctagtttcttctgtttctttttccagcctagacagtaactttctctccgtttctccccattcctgagagctttcatgttttctcttaagctaaggaaggatggcttctgagcccaggtctgaatctgagtctaaatcccaggtataagttgtcaccattctaattcagacctcttgctgttttttcttttctttttttgtaggtgacctctgtgctcttccttttgttctaccctttttactccctacttgtag

SEQ ID NO: 80448 - DNA, 1042 bp, Homo sapiens
tttgtgtctcaatctttacctttgctgttaattcctttacaagttgttcatatttaatgttttgccataattcttagggagttaagaagtgaaggaaagacctctgcccagggttgggagggtgaggaggaggggggcttgaaggtaaggaactagacacaggggcctacatcttctatccttctaggggtggggcagccacatggagcggtgaccatcctttgactcaaggctgtccctcaccagacttccccacccctcgtctgcaatctctgcatgaatagacattcatttgtactcatttacaggtgggcctcttctcagcaaatcctgtatatcacagttgagatttacacataagatacacctaggaggaatgatttacttgtcaggaggacgctttgcattatttaaagatttaccacaggattccttagcctaatcttcttgggacattgattttatttattttttgatttataatcaactttttagggctgtaggaattgcataaaatgagggagacccacctgcatgttgttttgtaagcatcttcagtcattttcatatttatttatgagtcttcccagcctgactagggctccttgagggtgggaaccctatctcctttttcctctgtgtggcctttggtgcctaccttgccctggaccctaatagtcactctgtgaaaagcagaaagcaggtaggctcccacctctccaaggagataacgttatggccattgtcttacagggctcatatttggaaatcaagaaacagatggacaagttggatcccctggcccatcctctcctgcagtggtatggatagaatggctcatccttcttgggttatggggagggagggagttattggacatggaacctgtaccttcttttagtggtggtttcaacatccttcccaaggttataggcagtaatgggtgctttttcttggagtttgttggcataccttgccttgaaaataacacatcctacaaaacgcccacaaattctgacatgatttttctttcaaaaaaatt

SEQ ID NO: 80449 - DNA, 1004 bp, Homo sapiens
gggtgcttttgtaaaagtcaagacaagagatgctaaaggccagagctaaagtgtgattataggtgagaatggagatgagagacagattagaaagatttgtgagatataaaatcaataagacttgaagactgatttagatatattgaatatagccataagggccaaagagtagtggaaaatacatttaggtttccagcctagatgtctgggtaaattgtgataccaccaatgtaaatagggatatgagaggggagcaggtttgtaggatgatgataggtaattagttccatttttgacatgttatttaaaggtaactttcagatatgcaggtagagatgcttatccgaaatgtcaatttgctacttaccagagtatatgtcaatttgctacttaaaggagaggttagggttgaagatatgcatcaatgtgtgtgggaagaagttacagtcagtgaatatgagattgccaaaggaaggcatgatagtgggaaaagaagataggatcaaggacaaaatacccttaaacactcagatgaaatcccaaagaaaccagcagggtaggcagaggaagaagaaacactgcaggtaggtcagagtagaataggaagataatggtggcacagaagacaaaggagggcaggttctgcaaggagggccagatgccagagaagataagagaagaacctgggagtttccatcggatttagcatcaggatgagaacaattatagtggtgaaggtaggaaccagaatacagaaagtttggaggtgagtggttggcaacaacatagaaacaatgagtatgggttgagaaatttgtatggggatgggaaggcaacagggagaggttaactagactaaggtgcagaaagttgacatcttttgttgactttgggaaaggaactgacaggaaaggggaatgattgacacatcatggtccctaaaaaggcaatcaaaggattgatcttaggtagaagggtcaccttacctccagagaatggaggga

SEQ ID NO: 80450 - DNA, 1113 bp, Homo sapiens
ccatcactacccagggcacagtcctgagcagaagtacccagactctcagaatgctcttcacttagaaccaatcttaggaaacctgtaactcttcagcctgttctgagttgtcatagaaggtatcctggtcaaggtctgagagaaaagctggagatttaaggaagtgaactccaagcaaaagcctacatttggtctgctgaacctttttaaagtcatgatgagatggagacctctgttaatgaaatcccttgctagggtcaccactgagaaccccttcacataagtggcttttacttcccctatactgctgtctgatttctcctgttcctggtgtcttttcatattctttttattatctctctctttccctcgtctttttccacctctctccaccaccatttttgctgctatctcaggggagctgtgcagctgacctgtatcgacacccacagcttgatgcagacattgaagccgtgaaggagatctacagtgagaactctgtatccatcaggtgggactctacttcaggggtggcaggggagcaagtcacttctttctgagttgttaaaaggctagaggtttttctttttatggtatgatagtgggataaattatgaacttaatgatagaaaatgctcagaataaatgagcttggctgagagtagagagtaaggccacttttcttaggaattccctcttatcctagacccctctgggccagtagtttcacctttcaggtaagaaatgcttttggcctggaagtagatcctgatcaggtaagtggtgtaaggctatagctaagaccctaggtacaaaactgtcatccactcttccctttcccctgtccccaggctcagttctctttccaactcagtttctattcccttctttctcccttaatgagtctcacctgttgtcacctgtatctctatagagaatatggaactatcgatgacgtggacattgacctccacatcaacatcagcttcctcgatgtaagtggggctagtacctgccaacaacatgtctagctggacttgtggaatttgtcatgtaggccaggagtcttgttcccgagtgctgtatttggagcacatattcttcatctctgtc

SEQ ID NO: 80451 - DNA, 1145 bp, Homo sapiens
tggcctaacgctgccgtcatcctacccctcaccccagggcaacccaggctggacatttagtgcctccctctttattcctctgtgatcatccagatcagcacttgactgtttattttcaaatctcacgaacctcaccccaagatcttcacattctggatctcagctgctcttgaaggtgaagttttgctttttaaaatcatttttttgtgtgatttttgtctatgtgtagaaacatgcaggttattgtatatatctcccatttgacttaagtatccagcagagggttcattcatttattctctcattcaagaaatgtgttaagggactaagaatgtagactgaaagcagtcaaagcctctgccaccagaggttacattctgataaacattttatatgttagaacatggtaagtggaaaaaaataaagctgggaagggagatagagagtgctagtgtgtgggtgttgagttgtttctgttttaataaataggatggtcaaggtggcctttgagcagagatctggaagagtgaaggaacaagccatgtggatatctgggtggaaagcattccaagaaaggggaacagcagggacaaaggctctatggcgggaatatgcttgggaatatggtgggaagatgaaggccctatagtgggaatatgcttgatgagtttgaagaacagtaatgaggcaattgtggagtgttggttaatcttcctgttaacatttagacttgactttgaggacagcccattagagtagcttctgattttttttttaaactttttattttgaaacttttcaactttacacaaaagtagggaggtagggattaccagaaaaccatcatgtacgtcacatagcttcaccagtaatcaacattttgctatttgctgtatttatttcatctgttatcctccctcctttttttatgtgtgtgccagggtagtattttaaacaaatctcagtaatcgggtcattccatctctaagaactttagttatactttccgtttgcatgttgtttctgaaggatcaggcaacactatgagctggaagactcctatgctggctctgctctggcatggtgtcttttgtccccatcctggcttagttaccagacttaagttggtatctaaggaatgaacc

SEQ ID NO: 80452 - DNA, 1242 bp, Homo sapiens
agaggtcccctaaggagattggtcaggttatagactgagacccaaggacaggatttcgcatccatgttcatggacaggacagcacctaagtcccccagtgccaccatatttacagcattttagagtcaggaacagagggctaagtagaccaagagcattggctgcctttcagacatccatctatattctaaagggattgagttatttggggttagggtacagagatgggcaggatataaatagatgtcgccaacgtttctggatctccaagacctgtatcagaatcacctgaggcacctgttcagcttgcagattcttgccaatactttgccccaccccaggtgagaatctctggaattgagattcccaggtgcatttggtgtacagtgacagtttgagagtcaccgaaatggggaaggagagactgttgactggtgtgaaaagtgttgctggggccccttctgaggggcttatcttgccatttcttcatgtcctcttgcaggcgaggtgtccaggcccaacccctcaatgtaggcttctgtgagcaggagtttgaacagacctgagccccaggcaccgaggagggtgctggctgtaggtgaatggtagtggagccaggcttccactgcatcctggccaggggacggagccccttgccttcgtgccccttgcctgcgtgcccctgtgcttggagagaaaggggccggtgctggcgctcgcattcaataaagagtaatgtggcatttttctataataaacatggattacctgtgtttaaaaaaaaaagtgtgaatggcgttagggtaagggcacagccaggctggagtcagtgtctgcccctgaggtcttttaagttgagggctgggaatgaaacctatagcctttgtgctgttctgccttgcctgtgagctatgtcactcccctcccactcctgaccatattccagacacctgccctaatcctcagcctgctcacttcacttctgcattatatctccaaggcgttggtatatggaaaaagatgtaggggcttggaggtgttctggacagtggggagggctccagacccaacctggtcacagaagagcctctcccccatgcatactcatccacctccctcccctagagctattctcctttgggtttcttgctgcttcaattttatacaaccattatttaaatattattaaacacatattgttctctaggcactgtggtagtgggtttttttgttgtttttgtt

SEQ ID NO: 80453 - DNA, 2269 bp, Homo sapiens
tttttcttcctaaatcatagatgagggtcttctgggtctgtgggaccaaggttaccttctcctttattgttgatcagtaagatcccagtctcctgtcacatgcaaggactcttcaggaaccttgtcccgtccccagaaacatctggagacttttggacatggcagctcctgggtcccactgcttgcctccctcagctcacagctggtattactagctctgtgtggacagggaggctgcagagggacggggaggagagctgcagggaggcctcttagggccctggattccttggcctctgtcctgaggtgtgagctcaatggtcaggagtcacagagacatactttgctgctggggaacagagggagcacatacctgttgtcccatgttgcctgtgtatgaataaggcccaggaatctcctcagctttgtgtccttactgccatttgaccttttataacagattcagccagacacaatcatacaggtgtggcgagaggatattccagtgaactatatgaaggagctggaactggtcaccaaggccggcttccgggcccttctctctgccccctggtacctgaaccgtatatcctatggccctgactggaaggatttctacatagtggaacccctggcatttgaaggtgaaagcagagagctctccttgctaaccaaaggaggctgggttggggcacaggatgggaggcaggaaggtctgggccagacatttccagttagtaaatgaaacaacttagctggggtgagggccacattgggaaggtggttgagagggaccctggagttaccccaccatcaccagactgttgttgcttgttttccctcaggtacccctgagcagaaggctctggtgattggtggagaggcttgtatgtggggagaatatgtggacaacacaaacctggtccccaggctctggtaagggttttcgggggggaggtggagggttgggcctgagagcaggagttctcccttagagacccaatcccatctagccacctctggactagtacccttctttcaggcctgagagagagcaggccgtgcaacgagccttctgaagatttgtgtgcaatattcactctccacatgacttccgtctatatccctccagctgccctttggtatgtgggatagggattgttaaccttacttcccagagagataatgaggcctggagaacataggtgagttgctcaagacccagcacaagcatccatgattcctgtaataaggcttccctctgctgttttcactgcagccttaccaagtatggttgggtgtgcaaagtttacattttaaggacctctgctgctgccactgtcattgtggttaatgatggctttaaggtttattcttattcccatatctttgagagaggaagagagtgggattgctacccacattttaatgaaggtggagctgagccgtagaactctctgggagccatccaacctggctgtggctcataacaaggtattgatcacttcctttggcctgagtgagtccagggtgcctagacaagaggtagcagcctgtggatgtccagcacctttgcagggaatacagggcccaatctggcacatgccccttttcctccaggcccagagcaggggctgttgccgaaaggctgtggagcaacaagttgacatctgacctgacatttgcctatgaacgtttgtcacacttccgctgtgaattgctgaggtaagcaagctgtggggccttcgcaaggcggagcaggccagatccagggctggggaaccccttagagagaggaagacaataattaacaatagctaacacttacagaggcttatagtcagccctcatccacggattcaaccaactgcgataaaaagtattcaggaaaaaaaaaatacaacaaaaaatggtacaaataaaaaatactgtataacaactatttacatagcatttatattgtattaggtataagtaatctaagatcatttcaagtatatgggaagttgtacattggttatatgcaaatactatgtcatttttatataagggacttgagcatccttggattttggtatccacgggggtcctgaaacaaatcccctgtggatactgagggacaactgtattttgtggcaaacactgtgctaagtttgttacaaatattgtctcatttagtcttcaccacagccccatgagacaggtgcattttagagatagacactgaagcacagagttcaggaccttgcccaaagtcactaagaagcag

SEQ ID NO: 80454 - DNA, 1130 bp, Homo sapiens
aaaaaaaaaaaaaagcctttcctggggaagttcctaactctcttgagtttaatgtgcagtcttatctgacagttcccaatccagttcctgtgtctgccttttcctttgctcctgtgacggaaccaaaggaggccacacatctgccagcctttgcttctgagattatgagttaagaggctactaagttcccaggaggtctcacagttgggcttaacatcagtcagacaaccgaacacaaatggcaagaggaagtattgatcttcaggcttttggaagattccaggctaccacagtagctgcagccctcctcttaatgtggccagaatttatttcaagaagaggaaagaccacttctatcatccatctttggatgtgttctgggaaaagtagaagtgtgctgggccttccctccatgccatccctccctgatgggaaggtttgatagaccccataaatacttaattgagagctgaggcaggtcaagcctgtaggggtgtgtggagcggcctgagagctcgcccaacatcgcaagtttgaggctgaaaccggagagactgtgatgggttcacagtgtgcactttaacctacaggatgtcatggcgtacaataaattgaacgtgttccactggcatctggtagatgatccttccttcccatatgagagcttcacttttccagagctcatgagaaaggtatgttcccgtttcactcagaccaagtttatgggtcaatgtctgaatctggctgtggccctgctggcaagaacagggtctctcatcctaaccagccagttttagaccaatataggggaaggacactggatttggagtcaggagacttgagttcaagtccaaaactttgccgataatttgccttgtgaccttcaggagagaatctcttctggccttattccctttttatgtatttatattctgttaaatggacatagtattaatacctaccatgattatctcactggcattatgatactcagataaaacagatgtgataacttctgggaaattatgatcaagttttttgaagatagtccctgacaccaaagggctatgggcaggttttctgatatctggggagtcttgtgggcattttgagtatcttctactctgcta

SEQ ID NO: 80455 - DNA, 1520 bp, Homo sapiens
tagagaggggttcattaagttaaggcttggggctataacaccagagccaccctgaaaatcacagggaagaaccagcaggagggtgagaagagacagtgtattcatattttggctttggcattttttctgcatagacaagggtctgtaaagctatattagatactatgttggttcaaccctccactattagggtaaaatctaccttggatagagaacctgtttgggaagaggaaggaaggaagcaagatgggtgggtgaccctgatcttctctgaggtatcagttgcatcatctcaggcctcctctgcctgatccttctgtcatctgctccattagctcctaggcttttgcaaaactggaaacccttcatctggagccctcaagagcagtactacttaatatgccaatcttcaatgagataagaagcatatgtaccagaatgtaagactgatctcttcatcaagaaaatcttgtatgaaaaaatgttagaactagacagtgtgtttactctgacataattgatttacattcaggcttcatataagttttctatatagtgaccagccagtaacacagtttgcaaattggcagctaatctgcagaccatacttggagtagcagtgctctagagctgcctttcattcagaagcagttgttgaggtcatggagttgtttgtttggtacaggccaagggcagtcagaaatatagagccctggttaagaagagctgtcacccagagcattcagacatgggtcagggcagctactgaggagaagaggggcacaacgagagtgagacagctgaacagatgatcaggcactgcctatgccaagggtaaatgccatgtcctccctttcctttaccacaggcgtgtgagctgagggactagagctagggtcttggttttgcctgttgcttctaatggcaggttggccgcaccaagcttaccctgtcttcctagggaaacggcatacactggagaagaatgtgttggttgtctctgtagtcacacctggatgtaaccagcttcctactttggagtcagtggagaattgtaagtaccatcctgttccctgtcttagaagagcaaacacttgtctgaagctgtaactctggatggcctggcctaaactgctgatgctcggcctggagtcccccttgaccctggggaccgagggtcaccaagtgctgagagccatggaagatgagtttttcctatgcagaaacttaaccagtgctaaaggttggctgtggaacatcacactggctcttcactgagtcccacaggacttctacctggtgtactgaatacatttctattttaggaaagtgtatactttgctacttttctctaatagaccctacactggggaaagcaggggttctggtcacttatactgagatgaagttaagtcattagtccagtgactgcctcctgtcttccctgagcagcatttggggacttctcagtctccaaagtgaacagttgagtttggctccttcctcacattcttggagga

SEQ ID NO: 80456 - DNA, 1016 bp, Homo sapiens
ctaccactttataaccgaaaccaatgtgttttttttccatagtgctgggattctgtgaatcaaacacattgatacgatggaagtgttttgattcaggagggaacgggtggtagagggaaaggctattgtgcactgaggtaaagattgatagtttccaggttaccctaatagttattagtgaccctaatacagcaacgagttcttcctctcagagaagtggaaagacctaaatcttagaatttatggatccagaggtcttcagagcagtgtctgaaaaggcactttgtgtaagtctgggcgtcttcttagcatcgcccaccccagtctcaggatttcagaaatactaggtttggggatataaaagtaatctctacattaactacttgctatttatgcctgattatcacatagcacaatcataaaatatgcattttttgaattccaacatcattcattttttcagcaaacatgtactgaatgactgctgtgtgtcaggcactgggaatacaaagacactgagattggtccctcctgttgaggaactcacaacctaggtgaggagatagacaaataaacagcatatcttaagaaaagtgttttgaaaaatgtatgtatacattgctgcatgatcacataggagggtttcttaggaaagagggggggaataacagaaaagtttcctaaaaggaaaatagagctgtttcttaattaggggagatgtggcgggaaggcaaagtttgtttcaattggaggaagcaatatgtgcaaagaaaaatatggagaaaatatggcattttcagggttctgttaagagttcattgttcattgtgagagttcctgcacaggagcagaaaaagacaaggcattttcttatgattacccagtgaattctggactgtattctgaaagctatgggagccattggaagattttaagcggagactgtcatgctcttatcttcatattctaatatctctgaggatagtagattgacatgggtattcctggaggcaggg

SEQ ID NO: 80457 - DNA, 2050 bp, Homo sapiens
cctaaaataccttctttggccatttcttctgtatctggaacgttgtagatatgtagtaattatttgtaaaatatattaacgttaaagagctactttgtgtaaacatttgtaagaaggctttatgggtttgggttttgttttcttttttttttttttttttttttcttttagagacagggtcttattttgtcacccagtctggagtgcagtggcacaaacacagcccactgcagcctcgacctccgaggctcaagctgtcctcccatctcagcctcttgagtagctgggactacaggtgcatagctaatttttgtagagatggagtaccaccatgttgccccagctggtctcgaacccctgggctcaaccactctgcctgcttcagccacccaaagtgttgggattacaggtctgagaagatcatcaaaaagatatgatttgcaggttttcattgaggattacctttcctttcaggttaccaatttggagtgtaagtgtgtgattccaggcaaaggataatcacactatgctgcttattgtgtgatcccaactcgtgctgctcttaactcagcatgcagtgagagatgcattgggattgcatctaggagggaaacagataaggtcaagcagctgggctggggagaaagaataaggccgattagttctctccactttaattgggctagcggctaactatactttaacctttcccacggcaaagacaaggcatattcctgccaaagatgattgccactaagtttattgttttaaaagcaaagaggaagaaaacaacacgggaagaaggttttgtagtagaattactttttctcatgaaggggtttctggagaacgagggatacataggagaaatacagtgatgaataaattgtctttagaaagaaggtgatggcagaagcacagtttttagttgaagggcaaaataagtgtcatatttcattttgaatcccagggcctagattagcttggcctgcagtcttccaccagcctctcttctcacagccctgtttttttcttttcttttctttctttttttttttaagaaacaggtctttctctgtcattcagactggagtgcagtggtgtgatcacggcttacagcaacctcgaactccaggactcaagcagtcttcccgcctcactgatgagtagctaggactacagacgcatgccaccgcacccagctaatttttttattttttgcattttgtagagatgggggtcttactgtgttgcccaggctggtcttgaacccctggcttcaagcgatcctcttgtctcggcctccccgagtgctgagattacaggtgtgagccaccatttattacctaaagcatgatacttttctagtatccctgtatagtactgagtccaagaagctaaacttgatcaaggtgtatgtgggtagcctgggcctggtttatgaaaaatttgagttttatttctgtgagctgtaggtgttcccctgctttggatattctgtttgaacacagtatacattggaggactcaggatgtggaacatgattcattcaggagtcagctgagaaagtgtttattaaccccttaactctgtgccttcagactaattgcctaatttccaagctgttgctgctacttccttttttttttttttttttttaactctgcctgccttccagacatttccgaggataacaagaaaatagttatgaatgttttttcagtctttaagggagggtataatagtgggaagaacttggtgattttaaaaataaaacaataaaaattaaaagtccaagccccagagatgcctttccttccatttccttctaccccagttccttacctccaaacaggagcgagaagcatagcattggaaggtttttgacaatggataccttgtcgttttgttgttgtttgtttttaaccgtctcatgctagggcatgttgtctgtttcttagcctgttcaaggcataagcctcaatccctttcctgttgttatatagagggaaaggagttttacagccttaccagtacttcttttaagaaa

SEQ ID NO: 80458 - DNA, 1484 bp, Homo sapiens
gacttgtggttttaatcctccgtttttctgcttctgaagttacttcagcctggcaagtcctttacctccccgtaggcctggcgagctgcatcacaacattcaagattcaccctagagccatctgggaaactttcttctccaggtcgccctgcgtcctcgcctccccaccccgttcttctcgagtcgggtgagctgtctagttccatcacggccggcacggccgcaggggtggccggttatttactgctctactgggcccgtgaacagtctggcgagccgagcagttgccgacgcccggcacaatccgctgcacgtagcaggagcctcaggtccaggccggaagtgaaagggcagggtgtgggtcctcctggggtcgcaggcgcagagccgcctctggtcacgtgattcgccgataagtcacgggggcgccgctcacctgaccagggtctcacgtggccagccccctccgagaggggagaccagcgggccatgacaagctccaggctttggttttcgctgctgctggcggcagcgttcgcaggacgggcgacggccctctggccctggcctcagaacttccaaacctccgaccagcgctacgtcctttacccgaacaactttcaattccagtacgatgtcagctcggccgcgcagcccggctgctcagtcctcgacgaggccttccagcgctatcgtgacctgcttttcggttccgggtcttggccccgtccttacctcacaggtgagtcggacttgtcccgccctgttcctgggccctgagagtgcctgcctggggacagttcccccagggctccagagacgccctatgggcttttgtccagccctctgatcacaggcactccacttcctcctcgagctgcattaggttttcatccaaagataactactataggactacggttcaatcaggagattaatttatggaaaatactgtgccagcagaaatctaaggtgatccttctgaccgtgttcaagctagccagggtcctagtgagactgtgagcaagggctgagtagagaccagagaaaacactcaaaattggggagacataatacaagaactatgcaaagttacatacaagtttctggcacatagaatgtttggcgggcggatcacgaggtcaggagttcgagaccagcccggccaacatagtgaaaccccgtctctaccaaaaacacaaaaaattagccaggcgtggcggcgcgcgcctgtagtcccagctactcgggatgctgaggcaggagaatcggttgaacccatgaggtggaggttgtggtgagctgagatcgcgccactgcactccagcctgggcaacagagcaagactccctctcagaaaaacaacccccccccccaaacaaaacaaaacaaaacaaaaaaagtgtaaattgtgaaagaaatcatagaacataaggaagtgagtttccagcggccacttggaatgggatggtagatgtaattag

SEQ ID NO: 80459 - DNA, 1046 bp, Homo sapiens
taatatttgatggtttttcttttttttctagttgtcaaatgatcctttattgaaatattttcctttgtgcttaactagctgggcattccacagcaccactgttgatgtcatctatgatgtcatgagggtgctggccatcaacattacagcccacagactgggcagtccccaggatctctttaatggttccagagagttctctggctaaggatcagtgccgcatctgttgagcaatgttgacgatctcatcaaaagtgatattcccactgtgtttaatgtttttctgtttctttctctctcggtggttctttgagggctttgatgatcagagcagaggcagaaggcaccacctcaatctgggcctgtctgttctgagtggttagtttcactgtaatcctcaggcccttccagtcacccgttgccttggcaatgtcatcaccaaccttttttggagacagacccagggggccgatcttgggggccagggcagaagtggcaccgacttcacctccagtgcacctcaggtatacaactttgatctcgttggggtcaaactttggcggcatggtggaggcagctggtgtcgaatgaacccggattcgggatgaccgaagaaagttgcaccttggcctcctccgagccaaaagctgagagctattttttctttattaaaggcagcttgttaaatgaataaaaacatgatttaattttcatatctatagcttctaataaaattaatttacatatcagaaaaataattcactgtcagacaatgtgttcaggtttttggctcataaattaagggatcagaaagaagcaggaaataaataatttgcctcaggaagtcttttacaatggaggtgaactttgaattgactcccaaagcatgagttagccaggcagggaaggggagcataggcaaagcacagagatgtgaaagagatgacatattgaacaaagggtttatggggctagcaaaagaaaatgtgccacgattacctcacttcctggtcctctaccatactctcttctctctgcaatgcctt

SEQ ID NO: 80460 - DNA, 1802 bp, Homo sapiens
ggagcggattcaggcggcacgcgcggtcccgagggacaggcctgggcctggtgcgcagcctagcccggtgcctcccggccttgtcttctccgctgcctctgctggggatagagggtgtcgaaagcagaggttcgccgattagccgggtgtggggaggtgcgctgggggcggtgcttcccaagtcctgctatggcggaggccttcggtcgcctaagccttctcttgcgggcaatttctgccagtccctgggccgggtgtcctttctctggccgggcgatcgcctactggggcggggcggaggaggtggggtggagaagaggagtcaggaagaattgggccctgacgggacttaccccggccgtagcctcatttgagcacttttggaagggattagagtaggcctaagagcagcttggtgtacagttgccccaagtgggcaccagttaataaagaaatggatcttggcagtctcaagtgcctacttaaaggtgggggaagggaagtatttctcggaagaggtgctgatgggccttcttttcagatggtgaggcttctgcttacatcttttttatgtctttgctgtttgggacctaattgctactttttctagtcgtagcagatgacttgcttgaagctgttggaatagttactgcatattgcatacccttccttgtagctaaaacaacaacaaaacgcagtgttgtctaatattggacaagactctattgtgagttagaaagcagaggttttctgcttgtgaactcctttctctgatattttctattttgtggtaagttaggcttggtgtaagttgataaccacatctcatttaaccatgtgcgtcagattttgcatttttgagctttagaaactcaaaagttttcatttggggaaaaaaaaaacctcagttctcctgaggagtcagggatatggctgaagaataaaaatgaagcttgattcagtgcaatttttagaaaacctggaaggaaacatatatgagcagcaagttactattgcctcttttatcagtattatttcttttttgtttaacttaaattggttggctaaatattcattgacaaattagaagtatgtcactgtcaactcgttgactttctattattaactgatttttatagtattataagtaacagttttaaaaattgaagcatctattcaggcactgtttcaatacagtgttttgcataatagaaaaatctctgatatctagtgccattactaaatagtggaagtcttcatttttaatctagagaacacagtctaagaaggaagttgaggattgtagaagataattttttgtttgtttgagacggagtcttgctttgtcgcccaggctggagtgcaatggcgcaatctctgctcactgcaacctccgcctgccgggttcatgcaattctcctgcctcggcctcccaagtagctggtactacaggcgcgctccaccatgctcagctaattttttgtatttttagtagagacgggtttcaccatgctggccaggctggtttcgaactcctgaccttgtgatccgcctgcctcggcctcccaaagcgctggattacaggcgtcagccaccgtgcccggcctgtagaagatgcacatgtaagaaaaatctgattaggtaagaaaaaataaaaagacaaaacaagcctgccacccagagacgtacaacaaaatgcgaactgtagttatttttctagacctttggatagccattaatatggttccacgttaataacagtggaaccatactgtatgttctgtttgtgttttcagtggaaa

SEQ ID NO: 80461 - DNA, 1277 bp, Homo sapiens
acttcaaatgtgagaaaatatgtttactttttaacctgttcaccacttcacctcttatgaaggggaaaacttagggagtgggcctcaaattacttgtcatttaatttggaaatgttcctttgaaatttggaaacgtatgtacataattttagtcactgatttgttacagaatttttaaatgtagtaattacatttcattggccctaaaaatgttgtctgtttttaataatcatctctaattgtattgcattaatataatagctgggtccttaggatatatgataatgtatgaagcttgattataatgttgcattccacccagctataaagccaaagtggtgaaaataggacttttaaatatacagaagtattctagtcacccttaggaatgaaagtataacattaagcaatatttgaagatttaaggatggcagtaagcttgcctaatctttgattcataccactgtcaacacagtttttgattcatgtagagtcaaattaacaaggttggaaggatcctaatggttatcctagccaaccacatatcaagtactacctccctggtaagtggtcctgtagactattcttaaatgtctactctggctaaaccttcacagccacttccagaagacctctgatttagagttctttcatactctgattttgtcttcctgtagctttttacctgaacctacctggttctaacccttctcatgatagcgattctataattttaaagacttatttaacatattggagactagcagtgcaataacctaatccagactaacactttttggggggggaggtcagaacccagaataaagctgctgcttattctgggtttacttcttatggattgttgattagaaagattattctgcactggtattttggattgaggcctgtgcatgtctgttcaggcaaagtttacataaggtagaacactacagcagcacatgtgcaccctgctcaattaaataaatatcaggcagatctgtttgttcataccctcattgcagatactgaagggttggtgggttttgcagtaacgaatgaataattcatcttgatattactatattaatagttttgggttctgtatatttcctccgactcagaatttacaaaaataaaagcactttctagacagttaactagttagctctgagtagaatgttttctactacctttttaaagattctagatcattttgagcaaagaatattgaaattgcattgcaaacttatctttgtgaatcaggtttttcttcattc

SEQ ID NO: 80462 - DNA, 1069 bp, Homo sapiens
gatttaaaaaaaacatatatatctgcctttatacctcaactacgtggttccctccctcacagtattattgatgtcttagtacttttctcataaatgcagaacccttccctaacctgatttttatatttcttataagatcctaaataatcgtgttatagtttatgaatttctgaggttagtgggtccctaaatataatgcttcagtttaattgggaaccatttgtaaattgagtacttgatttatttttatcagctgagatttctttagctgccacactgctgggggaatacagataatggacaactctttaagaaataatgtataaataaattataatgcgacgctttgtttcatagtagaagcataaggtcgagaaggaatatttaatgctcttctctgggaggaccgacttgctggtaggaatggaagctgaattttgaaaaatgaatggtagcttactaggcagatggggttagaggtggcattccagacaaaggaggaagaggaatggaagaagttgtggtatgttgaatgaacaataaggaattgaatattgctgaaattactgggaagtagagtggtaggagctggggctagacaggcagtgtgatcagattatgaaagcttttagcgtagtgctgttgagatggacttaattcactaggactacgtgaaacaactttaaacttttaaattaataaggaattagagtttaaaaggccactctgttggtactataggaaataaatgagaacaggacgggattaggaaactgggagagtagtgagtaatccattagaataacctgtgaaagaaatgggttagcaaggctggaatggaggagggaaggcattcaagataccgtgagaaatgatgaattattaggaaaaaaaaaaaaaacttagtgattaagtctttggtgtcatttagaaccacattcagttccagctttgccttttaccagctctgtgacttcgtatgtaaatttgattttaataaattctgtttcatcatctgtgagtattgtaattgtgtagttgaagctttaagcaactttcatttaactaa

SEQ ID NO: 80463 - DNA, 3058 bp, Homo sapiens
ttgacacaactgtcacaattctgtgaatataatcaaaaccactgaactacttttgagagttaatttcatggtatatctcaagttgtcacagaaaaaaagtctaattcagtattccccatttgtccaatacgtcttttatagcttttcttcttttggtcaaggatcatggattgcatttggttatcatgtctctttatttgtccatgttcttgatgggttaaaataataaagaatatacaaatggttagatctcctataaacaaaagaatatacaaatggttagatctcctataaacaaaagtttcctgaaacttccttaaacatgtagcatggatctagtttattttagttgcatgcaaaataaaacaattgattaaattaaaattgttctttcatggctgtaagctcttggtgaagacaggtcagacaggtatttgggttaatgtcaggcaaaaatttctgtatcaaaacacaatatttatactggcttgagctagaatgttgagacattgttttaaggtttgtttttttaaaatagcttttagaagcttattgaggtgtaactatatatgctatataaactatgatatacaaatatatatactatacaaaaatatatcttacaatttttttcctcaagagatactgtttttctgtcacccaagctggagtgcagtggtgtaatcacagctcaccgcagccttcaactcctgggctcgagcaatccttccgcctcagcctcctgagcagctgggactacaggcacacaccaccacacctaattaaaaaaaatttttttttggagatggggtctgttgcccaggctagtctcaaactcctggcttcaggcagtcctcccacttcagcctaccaaagtgttgggattacaagcttgagccactgtgcctggccatagttttgtatataaatgtcttactattatagtttggtaatcgacctaaataatactgttacatattgttttaagcccccaaagttgtcttacctagatgtggtgctagcaaacgtttttataaaggcaggaatgtagaatggcaaaatgctgaaatacaaacatactctaagcacacagaccttagtgtcacagtagaaacttcctgcttgcaataattgccattttaattttggtgcagaaagccttctatggatgtgatagtttatgtaccaaagagcaatctctatttgaagaaactgtgtggcctggttacaaaagtgcctgctgtatctgtaactgtcagtggtattaaaaatactgatttattttgcctgttgtgataatcaagaatagcttatttggatatatgcatgggatggttgcaaataccaagttcaggtattttactatggaatatagataggggtgttttcttctggttttccccacccctttatatataccttgattttaatttttatcaagtgtgtctctttggcctttgccgctgtggcccattgatctgtccatctgtctgttacagtgcatattgggtacttccagaagtatgaattcagtgatgcaaaggacaggcgggctgcagcagcaaaggtaggacagaatcattccaaagacaagtcattaaaagaccattaaacacacatacttacacacagacattggcaaccagtacctcattatttaagggcacatcatttatcctataaatctttgtgggaaagtttgttttgacatgacaaatgtgatgtacttgtaaagggcacaattttattattatgttttaaaccagaagcctacttggcacttaggcaacaaagtaaatggcatttgccactgtctttaagatgccgaataatagaagagataattaaatggaggatattaatggtattaattgattcatggagctggctgattttcagaaactatgataaaggatcctattttgtaaactgggaggagaaacagagaagatagattgagctatgtgtgtatatttatgtgttaatgtttatttatattcctgactctggaatattttgatgaaaataatctaaatcttcctgttatttcgctgacatcactatgaggaagattaagaaattctatttaaatgtttgtaccatttacttaagtatttgtatcagtttacttgctaaatgatagcagttataatagcaatttctggcttaaaaaaaaaacagggttaggatggaagggcaatagcatttttatactgaatcctaaaacatcagttataggcaagttttaaaacttaatcatacgttgcaaacacttgaagatgaaatggaaggcttataaggttaagtgttaggttttatgtgtcattctagtattggctgaaaagtgagtgctatagggatggtggaatgatgcagatatttgcatcattttctatgctgttatgcttctaaaaagaagaggctatgttttcctaaataggttagtagagtgcttctcaaggcttcccaaatgaaaagtcagacaaaaatatgtatttgttcttcagtgaagattgttgggttttcaaaccagcaatcttagctgtaaaacctaagatcttaccacagcctaaattgtgactcaaatgctgatgttagttaatacttttataaactccatatactatattgaggagatctagtttcttgaatgtggaagtgaagcttcataatataccatagtagggatgtttcgaatcaatagtgttaaaatgttttgggttttttaaagattttttttcagctggtcttggaaaccttttcagttatctgtttttgattctaccaaaggtattaggtatttaatgctccactaaatagatcacaaaaggggagtcttaaggaggtgaagatgtgaacttcttgactagatgtaaatcactgctcagaaagatttgacttttttaaatgatgcattcttatgtcaatagactttaatctgcaaccaaaatgttttttttttaaataaaaatgaggcacatttgtgctttctcacttctgctccaattctaccttattctgcaagttgctattttttcctttagcagtacactataga

SEQ ID NO: 80464 - DNA, 1447 bp, Homo sapiens
cctcccctctgttttttccctttttgcaagttgaggctcttaacaattcctgaaatagtttaccccaagcaccctatccagtggtagaaaatacagtgtactggatgccacaaagttatagtcatgcaattttagttaataacaggagacttaagtctcttgattgatggagagacttaagatttagcttattttacatatagctaaatctaaattagtgactttatttcagttgtaggcaaatcctcttgttaaaacttgtttttaatttctgagttcttttaaaaaaaaagttttacatcacatttctaagagctggagatgacagtgtctctgttttctgttttctctacaaataaacgtataacttaggatcagttaaaatatttcttttcacatcttaactcttatagatgggtggtgtctatcagcagtgctctgttaaagacagattcttaggggagtgtgggtccagagaagtaaggagtacctagattagcaaaatgtactaaggtgagtaagtgagtgtctgtatctttggcttttggaggggagtatgcatgtgtgtaaatttttctgtaacaaatggtactgtcgaaaacaattgacatacatttctttcatgacactatttttatacaagattactttaaatctgtagctaactacggtctgcttgtggtgaagtaaagtggttttagtccacagagatcttttttggaaggttatttgatgtagtaaaattatatatgagataaaaataagcagacacatgtttgagttccacttctgctattgtaactagctcttgtatctttgaatgagtcaggccttgctgacttcttaggccccgttgcattttgagttaaaattttgtgcacaaatagtgagctcactagtttcatgggaaatggagatatttgtgacagcattgaatgataaggcagtaaactttggttttatttcatagtggtaacttttctttcttgaaatagcagcctaaaagtatgccctgtaaactactatgtggtacagtattttttcattttggttaaatatctctgaagtatccttctaacttaaaagtgatttgaactcatttgaactattcagtgtataaggtattaaattatttttttaaaagagactgggtctaactatgttgtccaggcttcactcgaactctggggcctgagatcctcctgcctcaacctcctgagtggttaggactataggcacatgcgatcgtgcctgagtgttggaaattttccttttttaaaacaaatttttttttttttgagtcagagtcttgccctgttgcccaggctggagtgcagtggtgggatcttggctcactgcaacctccatctcccaggttcaggtgattctcgtgcctcagcctcccaagtagctgggactacaggtgtgtaccactacacctggctaa

SEQ ID NO: 80465 - DNA, 1282 bp, Homo sapiens
tatgcctgtagttccagctactcaggaggctgaggcaggagaatcactttaacctgggaggcggaggttgcagtgagcagagatggcgctactacactccagcctggcaacagagcgagactctatctcaaaaaaaaaaaaaaaaaaaattcttgctcacaaacctttaacctgttattagtagcatttattcagtagaaacaaaattgagaagttgcttaggcttttctggccaccagaccaggtgcttggactggttctctggtttcagggcaggattctattccattgggtttttaaaaatattttctttctgaaaatctttatagttttaaaagagaagaaattagtgggactggagaatgacagtattaatgtcattcttaatcttgttctgctctttggtttggaaatttgtttgaatggaaatttgggacacttgttaatggtgaggttgacaacttatgtttatttcattatcaattctaaatttaataaaaaattaaacctagttgttgggaactgacaacccatatattatagaaataaatggaaagtatttcccatttgattttaaaattcagagagtactttataaaacataaataataccgagaatatcaccccatttcatacaccttgtatctattaaattacattgtaaataatatctattgttactattaaattacaatttaatagtaacaactatctcaaaacaaacacatactgtataaagctttcccatggttcatgaaggataacatgttcaactagtttgatttttctttttatgcattctgaccatgttttttttgtttttttttttttttttttttttttgagacggagtttcgctcttgttgcccaggctggagtgcaatggcgtgacctcggctcactgcaacctccacctcctgggttcaagcgattctcctgtctcagcctcccaagtaactgggattacaggcgccctccaccatgcctggctaatttttgtatttttattagaaatgaggtttctcagtgttggtcaggctggtctcgaactcccaacctcaggtgatctgcccgcctcagcctcccaaagtgctgggattacagttgtgagccactgtgcccagccctgaccgtattttttgacatcagtggtgtttcttaattttggtaacatttactttcaggtttttttatttgatgacacctctactaggagaaagagtttttatcgtttacttgtgaaactctaatgaattaacactgatttactcagagtttctct

SEQ ID NO: 80466 - DNA, 1029 bp, Homo sapiens
gctcagtttttctgggaaccttaaactgtctaaaaaaataggtggtaagtgtgaatttaaattaaaaggaggtttctgggaaacttctgagtatgtgaacgtttcagtttctccttgtagtttctgtagagaagctattggatacctaaaagatttataattcagtctttaaatagtgtctttaaaatcaatatgcaatatctttttgtctcatttaatgattttcacattatattttatgttgtctgctattagcactgccacactttttttttttttaaagcatttgactgatgtatcttttccattttttaaatattcaacctttctgggttttaggagtgtcttttgtaaataccatgtaggtgccgtttaaaaaaatctgaatgaaaaaactattatcttttaatatcagagattaacatattcatgttttataattaatgtttagattaaattactgtcattttaagttgtgctttatatttgttatgttttctgttcgcttattctgttggcctcatcagattttcctttttctcgaataatttcaaatttatatatgtattctatttcagtttttctagtcacttttacaatttgtacatgcctacttacaactatataaaagtttctaacaatatttacttgaagttttaatccatcctctgtacaagacaaaaactgtagcataaatttttttctttgtcctttccttgtccctatcagcttgataagttgatgtttgaatttttttttttcttttctttttgaaacagggtctcactctgtcacccaggctggagtgcagtggtgagatcatggctcactatagccttgacctcctggactcaagcaatccttccatttcagcacccccagtagctgggaccacaggcacgcatcaccatacctagttagtttttatatttttttgtagagatggggtttcaccatgttgcccaggctggtctcaaactcctggacccaagcaaccctttcaccttgaactcccaaaatgctggaatt

SEQ ID NO: 80467 - DNA, 1377 bp, Homo sapiens
cctggagggatgggaaagtgaattgtgtcctctgtttaccttgctagctttttttttttatctccgtatccttatgtctgttctcatattacactttagtagtacaaaacttttgtgacagtcaccaaattcatttttctgctgcctcagctttgcaattgtgttttgacccagggcttctgtttactgtgcagctctagggagcatctttggaattgtactgtcattggcccaggcctgacttgcctttcttactgtcttttttcctaattttccttcaaaactcaagttaaccttttcttctgagacagcttttcttatctctcaagatctacttgctttgcactgtattgtttatttgatttagtattttaccacttctatttgaggttctttgtgcagaaactatcctacttttcttgtattcctacacataacgcagttcctaatatatagccattgtttactaagtattttaattaaatccagccatttataggttttcttttctgtaatagaattttattgaagttatgacatgaatgtaaatcagatttcattttgggagcttttagaaacagcatcaacaatggagctacttttaagttgataacaagtaaaaaaaaaagtgtctttcttgcagctcagatttcttgtaggttattaaattataataacatttaaaaactcatttcagttgatagtatggtagtatatagggtaaatgctaatgaattaattggtgtgtttgaggtgggatgaaatacaggtggttgaaaacttaaccacctataaaacttaattatacttggacaggtataattaaagaatcctgaagaaggatttcagtctttcctggactctgttacaaatagcttttcacttttcattctgaagcattaatacccatttaatgggtaggtactagtgttaatacttggatgtgattatgataacatggaactttttgtagccacattattaataatatataatttcataattagcctcagggatggtgaaagtaaatttggtttttcagaaaccttgcctttttgatgacatttatcactattctacaatacagtgaaatttttcctgtttaaacaatccacggccgggcacagtggctcatgcctgtgatcccagaactttagctgactgtggcaggaagatcgcttgagcgtaggagtttgagactagcctggacaacatagggagacccccatctctacaaaaaaataaaaaattagctaggtgtggtgatgcacacctatagtcccagctactcagaaggctgaggcaggaggattgctggagcccaggagggtggagctgtgatctgtgatcatgtcactgtactctagcctgagtgac

SEQ ID NO: 80468 - DNA, 1555 bp, Homo sapiens
accccagcaacagcacaactttaatccttaagttttagttgcagtactgttaaaatactaatagcttaatttcccaagattcagttatttaaaaccaaagtttagggggaaaaaggcagcaaaactcagtctactagtttacatacatacacacacacacacacacactcatatatatgagagtagactgaatttttgctgtttgcaatatatatatatatgcacatgtatacacacacctttatttgctataatttgtaccatgtagcttttatttcctctgaataaaaaggttgttatcttgttttattttaattcaacttcttgcttttccctatagaaagtcaggtttttggagagctctaacagtgtgcaagttgctgggctcttatcctttctgtttaaataatgcaggtactttgatggaaacctggagaagctctttgctgagtgtcatgtaattaatccaagtaaaaagtctcgaacacgccagatgaatacaaggtcatcagcacaggatatgccttgtcagatctgctacttgaactaccctaactcggtgagtatctggtagtttaaggctagtgctgactttgtatttcagagggtaaatcaacttccattatttaaacaaaggaaaatttgtgggtctgggagtagtaacctctaagccataacctatcaatgtattcagtgtgaggaaaggaagaaaaagagtaaaagcttggttcctcttacctccaacccccatttgttttttaaagcagcaacaacttgtccaagttgtcatttatagacctaaatctttctggagtttattctatcaccatgggagaattgtgtaatagtaggcagtaagtagaattctttctcatccaaattaaaatagatttaaactttaagtgttttttaaatatccagaaacactcataaaataccgttaatactatttgctagggaactctcagaattcttcagaagataagattttcacttaatcaaatccattcaaatggagattgttaaatatggtatgtggggacagagttggagcagaaccagtgatatagcaagagaaccaaagaactgatgttaatcccttaagtacaaataaccttcctaaaaatttattgaactgaagctggactcagtggctcatgcctataatcccagcacttggggaagccaaggtgggcagatcacttgaggccaggagtttgaggccagcctggccaacatggcggaaacctgtctcaactaaaaatacaaaaaaattatcctggcatgatggtgcatgtctataatcccagctacttgggaggctgaggcatgagaattgcttgagcctggaaggcagaggttacagtgagctgacatcatgccactgtattccagcctgggcgacagagtgagactccgtctcaaaatataaaatagaatttactgaactgagatgatttacttacttgatttacttgagtgtttactaaggaagtttagtcttaagatgtctaagataacttaattctatgataattacaactgtcttgttcat

SEQ ID NO: 80469 - DNA, 1093 bp, Homo sapiens
acttttgtagttttagtagagacagggtttcaccatgttggccaggttggtcttgaactcccgacctcaggtgatccgcctgcctcagcctcccaaagtgctcggattacaggcacgagccactgtacccagccctctcatagatttcttttcatgtccttgtctttgtatttaaaaaatatagttgatgtgctgtatatagaatttctgtcctaacgagatatttgtatctaatatcataagtaacatcagaaattttataagtacatgtcacataatggctaaatagaaaatctaagggaattttaaaataccctttataagagccacgaaaggaaagaataaaagagctaggaataaacttgataagaaatgtgaaagattgctatgaagaaaacttcaaatactaagataaaagaatgacttgaatatttgagatagaagaaataggaaaatattgaaaaagaagattaaattgacaggggagagctgagtgaggactagtcctgctagatacaagagtagacagagcggtggaacaggatagagtcaaatatgcatgaggagaatttagtgtattacagaggaggcatttcaaataaggtgtattatttgatacatggtagcagtggaacaggatacagtcaaatatgcataaggagaatttagtgtattatagaggaggcatttcaaataaggtggattatttgatacatggtgttagagcaacttggtagccatatggaatagaaacttaagattcctacctagcttcataaataaaagttaatgaattcacaagcggtaaatttaaacggtgataagtttcactgtgagtgaagagcttctgtatggcaacaaaatatgaacactaagaattaaagtgggggaaaagatttcccctacttataaatggccaatttcctacataagtaaaaagcctccgtaaataagtgaaaaacccacaggcaaagttggcaaaatatatcaagagagtatacagaaaaagaaatatacagtgtaaaaccttttttgaaatattataatttcatttataataaaaattcaaatcaaaactaaagaagttagtgtg

SEQ ID NO: 80470 - DNA, 1028 bp, Homo sapiens
ttcataagatcacaaagatgtatatatagtcaatgcagtagtatagtaggaaaaaaaaaggcagtgtaaaggttcattaatagtagactataaataaaattgtggtacctttctataaagaggcaaacccacaccagtgtggtaccatatgagaaatccattggatttatttttgtttttttaagacggagtcttgccctgtcatcaggctggagtgcaaaggtgcgatcttggctcactgcaacctctgcctcccgggttgaagggattcttctgcctcagtctcctgagtagctgggattacaggcatacactaccacacctggctagtttttttgtatttttgatagacacagggtttcgccatgttggcctggctggtctcaaactcctgacctcaaatgatctgcccgccttggcctcccaaagtgctgggcttacaggcgtgagccaccgtgcccagccctattggatttttttaaacaacaacaacaaaaaaaaacaaggtgcagaagagaatttgtggtactgttacagtgtgtgtgtaagtgtgtacgttagaacacctctggaagaatatgtaaaaaactggaaatagcagttgcttctgggtagaggaaacaaacaacagggatgggaatgagggaggcctgtttttttttttttttgagacagagtctcgctttgtcacccaagctggagtgcggtggtgcgatcttggcttactgcaacctccatctcctaggttcaagcgattctcctgcctcagcctgccaagtagctgggactacaggtgcctgccaccacacctgcctaatttttgtatttatagtagaggcaggattttgccattttggccaggctggtcttaaactcctgactgtaagtgatccgcccacctctgcctccagtagtgctgggattacaggtgtgagccaccgcacccggcctagggaggcttatttttcaacataaactctgaacttgtactgttaaagtaattgtttttagtaatgtctatttaactt

SEQ ID NO: 80471 - DNA, 1034 bp, Homo sapiens
caactaaagataataggctttttcctaaagtaatgtggcattccagttaaagagccactccaggtaacgttttctcagccggcatcaatattggtatatgttaacttaaacttgttgcacgattttgtcagattatctcgcttttgcctttaaaattgtgtgtttaaaaaccaattagtcaggttagcaagtctagttactttatggtgataaacatactctcacacacatttcctttaaggagaaagggaaggattgagatcctgtaaacattaaggtattcccagaacctagcaaagtgcctggcgatggtaagcattcattaaatatttgttgaatgaagacagtttaaatttcaatctttttcagactatttcgtgtcctgctcatggttgtgatatcttagtggatgacaacacagttatgtaagtatttttgatagattctgcatgtgaatattggttagttggttaaaccaaattaatttttacttagtacctcaaaggaagtgaaactttttaaagtctgaagaaactttttaatctgcgttccttagtagtagtacaaaagcccatttgtaacttggttaaatgcctgatcactattcttacaaacttagaaatgcatggtagctagattttgataaaccttgggattggagattagaatgtgtgtatgtgttagttgaggtgttcttggaagcagatcccaagatagaataaaaggtgaaactgacttattgtggaatagcatctgtgcaaggtaaacagcaggagcagatagacattgatataggcctgacatctgttaaaagacaaagaaggaagattcaataggaagagactttatatgatacagctatgagagtctttggcagccctgatgggggaacttcagtgcatagattgcccatagaggaatacctcaataagtagaaagagctgggcccagtacacttgatatgctcagttgttggctgggactacccagggagtcatggtctttgctgaaacactgctgctgatttcagatac

SEQ ID NO: 80472 - DNA, 1051 bp, Homo sapiens
ggagtacaagtggcaccatatcggctcactgcaacctctgcctcccgggttcaagcaattctcctgcctcagcctcctgagtagctgagattacaggtgtacaccatcacgtccggataagttttgtatttttagtagagacagagtttcgtcatgttggccaggctgttctcgaactcctgacctcaggcgatctgcccgccttggccttccaaagtgctaggattacaggcgtgagccaccaagcctggccaataactattttcaatttgtgatggtaacaaatctttgtcaagagaattgtcttattaatgaccagagtgacacttgctgccaccttcttgagaatgcctattcttgaagatggatgctcactttcttttacttccttatcaatatcagataaactaagggtggaaccttgtcctaataactgttggctgatgtttgctctcacgtcctggtggtccatgccaggtttagatagctttttaggctaaggccagctatcagaaatcattagggtttgtcataccagaaaagcattatgggtaatacatgtgtaaataagatgtgtgtgtttggcaatcaaggcatctgacttttggcctgatacattccttattattatttattgatataaaatctgtaatataaaactcattttaattacagttatccttagtatactggggattggttctaggacccacgtcctccaccctgaatataccaaaatctgcgcatgctcatgtcagcccagcagaacccatgtatacaaaaatttgaccgtccatatatgcaggtttcacatcccacaaataactatttttgatccctgtttggttgaaaaatattcataaataagtggacccatgcagttcaaacctgtgttgtttaagaagcaatggggttttttttgttttttgtttttttaagatggaatctctctctgttgcccagagtggagtgcagtagtggcatgatctcggctcactgcaacctctacctcctaggttcaagtgattctcctgcctcagcctcctgagta

SEQ ID NO: 80473 - DNA, 1212 bp, Homo sapiens
atgaaacttaaacttcaggattcctcactacgtgggatcctgtgaattctggaaattcttgtgagttatagtgttcagaagaggccaggatgcagtcagtgagcatttctggttaatttctaagagctctcagaagaagaaggctcttaaaattgtatcagctttaggtatcacaaaacctggatccatttcttaacatttctggcaacaatatctgtctcatttcgcatactgatttgggtggggtgtctgaaggaaggtggctgagaattgctgtcttaaggcatgatatgatatcagagtcaaaagaccctgaaatgcgcttatacttggcactagttggtaagtcattaggctgtaataaaaactgggtaaaagtagactatttaaaaaataagaaccatggaaaaaaagtctatgaaaataaaactatacaaactttgaaattattgttctgatcagtacagttatatttgttgatagcctatgtgcatttcagtatttacagcttagggcataaacatgtagccgtagcataaacagcttttgaaactatgttttataaatgtggaaaatactcttgactggaaactttctaatctatttttattcttggtttcaggcgcctgatcacagattcaaaagttaaattaaagtatcagcatttaataacaaatagctttgtagaggtaagtgatttgttttccttcttgtaagaaggaattctgtttattaatagaaatactattttaaaaattataatttattgacagtaaaaaacatctttaacatatttatgaagcatgccaaaatacctttattctcaaaagagtatgacaggccaggtgtggtggctcatgcctgtaatcccagcactaagggaggccgaggcgggtggatcacctgagatcaggagttcaagaccaacatggcgaaaccctgtctcttctaaaaatacaaaaattagctgggcacagtggcacaagcctgtaatccgagctactcgggaggctgaggcaggagaatcgcttgaaccctggaggcagaggttgcagtgagccgagatggcgccactgcactccagcctgggtgacagagcgagactccctcttaataaaaaataaaataaaataaaataaaagagtatgagaaaccagtaagtacatctctccatagatcttgaccttggataataaaattatttttactgta

SEQ ID NO: 80474 - DNA, 2056 bp, Homo sapiens
tttaaaaaaaaaaaaaaaaggcacatctgaagtgttgctatagaagaccacagcaagttttcataagcttgtgtaattatcccccatttgccccttgtaccagagaagcaatataaatagcttgatgtactaggaaatcttgcatcatgacctaatttaatttgctgtctttttttgaggcagggcctcattctaacacccaggctggagtgcagcagatgatcacagctctctgcagcctctacttcctgggctcaagtgatcctcttgcctcagcctcctgtgtagtcgggactacaggcacataccaccatgcctggctaaattcttttttcttttttttaaggtagagacaaggtcttgctatgttgcccgggctggtctggagtgcttgacctcaaacagtcctcccgccttggcctccctaagttctgggattataggtgtgagccactgtgcccagccagctgtcattttttattttctaacttgtatttcagtgcaatcgactgttaaagtggtgtcctgccccagattgccaccatgttgttaaagtccaatatcctgatgctaaacctgttcgctgcaaatgtgggcgccaattttggtaagcaagtgatttcctaaattgaaatagtgcacaaagcgtttccatttctcctgtttattcttggtagtaaaatagcagaaaaaaagtgtttaccttaggcagggagatgtttgatactggtttaaaatagtatatatctctttcagaattgaatgaaaaggtcacatcttaaaaaaatttttcctctttccttgatgttctaacttttttgaatttttttttatggagaaaatatacaactctaatcatatcttcctgtatgctccactgtaacttaatgggagcaaacttgtagatctgggactatacgtttttctttactctgccaaattttaaccttacttatgcaaaggaaatgtgcaggtaaattctgctgatggtctcctttttaactaagagttttcctgtggctcctctcgcccagctttcttggtaacttgggcttttggagttctatagtatactcttcagcctctgaattctagatttgaactgccaggaagtttccagtgccacatattaggggatgtcttaatcagttcaggctcctttataggtgttctagttttttccaaagtggataggctgaaaatttttcaaatttttgacttcttatttccttttgatgaacagtttatctctaggtcattcatctcttcttgcattttctataaacattcaagagaagctaagctgcgtcttcaacactttgcttagtaatttcctcaaccagatattcagtttcatttctctaccttccacaaaacaattcagccaacttctttgccactttatagcaaggatggcctttcctctagtttctaacagcatgttcctcattttcatctgagacctcatcataatggcctttactgtccatatttctaacaacattctgttcatggccatttatttaggttttctctatgattgaggcattccctgcacttctgtctttctgaatcctcaccagaattacccttaacaattcagttcattcacagtgatctaggctttttctagcttgcacttccaagctcttccagcctctacttactacctagtttcaaatcggctttcacatttttggttttgttagaacagcaccctcacttcttggtaccattttctgtcttaatgttcaggcttttataacaaaagaccataaactgggcggcttctaaacaacataaatttatttcttacagttcttaagggtgagaagtccaagatcaaggtgccaaaagatttgttgtctggcgagggcctgcttttctggttcatagatggtgcctacttgctgggtcctcatatggtggaaaggacaaggcagctctctgggccccttttttttttaaaaaggatgccaattccattcacctcctaaaggctccacatcctaatactgtcacattggttattaagttttaacatacacattttagg

SEQ ID NO: 80475 - DNA, 1676 bp, Homo sapiens
tacttcttttacaagtgtatatgtcatgaacttagaaaacaaaagtgaattactgattaacacatgtttagtgagtatttagtctttttgttttataccttgcccagtaccatttccctctacagggcggaggttcatttgtttaaataatgcaaagatgtgacctatttgcttcccatatattgtttactgtgtattagtactaaattatataagtaacctacaaagtcagccttttattcttcatttagggtgttaagtaaaagattaaaaatgcactgatgaagcatgggttgaaacttctcaatatagtctgaggcaccttagcaacaattattatgaaattgtcatcaaagcgtgtcttcatgcttatagtcattcttcacacatattgagtacccactatgtgctagttctactactaaattctaggtaattaactgtaaagcagacatgggttctctccttgtatttgccagtcactagaaactagtgacaatactgtggaactataaggcatgaaatgattggcttatttacttgcttacagtaggtaggccttaattctattaactctttgtgtcacttaacagctttaactgtggagaaaattggcatgatcctgttaaatgtaaggtgagtttgtctgacatttcaatttttaaataatggcacacttctaagacttagtgactaaaaatcatagctgatgattttgttatctatctattgatagatttttttttatccttttaatttcagatgatcattacatgtattcagaggtaattccttaggataagccaagtcagctcctgattgttattaggataaccatggctaaggcacctctttgtcaggctttgtaattaggggaatacacaccttgcagttgggcttctcttcaagctctaggttccccactcagcttctgccaaagaaaatcctgctttggttgattttatatatactggacattgtagctatgggatttccctggcttaagaggatgtgagcctagtgataatcttattcattggcttttacatttaagcttgactatagttaagtgctaaagtaatttgctatttttaaaagtcttttgttgtatcctaaccgttgttattttcaaacagtggttaaagaaatggattaaaaagtgtgatgatgacagtgaaacctccaattggattgcagccaacacaaaggttggtgttttccttcagtaactcttggtaataaaaatgataaggattggtactttggcattagcaaaagcaatgaggtgacctacttacaggctttgtttcatctttttctccattgagtctttttttttttttcccagaatgtttgcctgttatttcctttttctctttgagtttattttagagtattgagtactgtagtacagcatccacagttctctgccttaggtttcttctactggaaaaaaaattagtgttctgtagaggaaaaagctgataatttttcaagtgtgggatttgtgcttggctgccatttagtatacaaatgcattggagtttactccgcctagcttggttctgttaggctaatttacatttttgtttctaattttttgttttgaagtacattgctcttgatactagtttcaaaattcaatttcaaaattcactttcttaaccccagacaaa

SEQ ID NO: 80476 - DNA, 2260 bp, Homo sapiens
tattactatatatatgactaaaagtacttaaaatgatttgtctctcagccctacttaaaaagaaatcctaggaaggctgaagtggaaagatcacttgactccagaagtttaaggctttagtgacctatgattgggcctctgaatagccactgcactacagcctaggcaatgtagtgagactctgtttctaagtttaaaaaaacaagtccttaaattgttgtatgtcttaaaagccagtggtaataatggtaacagctcattttaaatagtgcttaagtgttcaacactgttctaagtgctttatatgtattaaccacaataaataaaatgtttaaaaacaaaccaaatctagaactggcttttccttaatgttagtaatgcaacctagtgtagcattgacaccaactttatagtttctcttcataggaatgtcccaaatgccatgtcacaattgagaaggatggtggttgtaatcacatggtctgtcgtaaccagaattgtaaagcagagttttgctgggtgtgtcttggcccatgggaaccacatggatctgcctggtaggttggggaaattaagggaagaatgtgtttacataagtatgtgccatgtattatgaataacatttctacctcatagatatcaccatctaacttgcaagctaaataaatacatagtgtgtgattaatgttataagtctatgcaagacatagagggattagttagatatatttcataaaggaggtaacaatttagatgaactttaaggggaccaagagttcattagttataaaagtagtaggaaaaacatttagggcaaaagttgcaacatgagcaaaggtagaatgttgtgaaaatacatgactttttcagagaataactgtattatcaaatgtgcctctctaggccaaaattgaaaactcagatgctgttggcaaaacccaacctgcaggtggttttactctgcatatcattagacattgtggaatgctttaaagccttgctaaaaggctttgtcatattttttctttaaataagcatatatatgttgctttccttgttttattgatgacttacttgaactaatataagaatcttgggccaggcacggtggctcacacctgtaatcccggcaatttgggaggccgaggtgggtggatcacctgaggtcgggagttcaagaccagccctgaccaacatggagaaaccccgtctctactaaaaatacaaaattagccaggcgtggtggcgcatgcctgtaatcccagctactcgggaggctgaggcaggagaatcacttgaactcgggaggtggaggttgcactgaaccaagatcgccccattgcactccagcctgggcaacaagagtgaaactgtgtctcaaaaaaaaaaaaaaaaaaaaaaaaaaaaagaatcttacacagcatatgaagcagttttctcactggttaagggcataagcctccactgggtgacaggcaaaagtttaagctctgaaactctgtagttatgtgaccttaagtatgtttcccatcctctgtaaattttattcttcatcttctcaatgaagaaaataatgcatatttcataaaatgtttaagggattaaatgtgttagtacatttaaagtcattagccaagtgcatggtatatagtaagcactcatgaaatagctgctcccataatgtaggctcccataactgatgtatagtaaccactccaggggaagtgcaagtcttactcatctatgctctgagctgacctctctgggtatgttttccccttcccaccattctgtatatcatgcagttttaaatgactctgaaaaactgtaatagcaaagcacatagcacagcatctgttacatggtaggctgtcaactgttggttctctgtggtttataaaagagcagataaggtgaataatcctggaaaattagaaatatttggcttaagtaacagatggcctaagagataagattatctctttctcaaaaagttgagttaggaattcagacagtcaataaaggttctagaaggacagtgttttctaataatgataggtgagctgatttgaaatggactgcctcaggaggtggggaatttcctatcactggatagagaactaatttattatagagagaattcaaacactagatagggttagaacagttcctttcagcctgctaattctgtcattatagcagtagaaccctgggtgttttaacatctcaatttctctgttataaaagataacgttggtgt

SEQ ID NO: 80477 - DNA, 1019 bp, Homo sapiens
tcagtctagtctcgaactcctgacctcgtgatccactggcctcggcctcccaaagtgctgggattacaggcgtgagccaccacgcccagcccagggaataattgagtagaacttttcaattctgaaggatttgtgaaagacattccagtaaatattggatatctatttacatttagaaagggaatcttatccaaaatatttatcaagaacattcttatagtaagtttattttcttttcattaatgtagttacatagcacattttagcttttggtagagtcttgctttcaagatccctcctaccccaagaagaacagtagtgaacagcatttgttaaatggccctggtgctatttataggcaatatcttacttacttaaattttttttaaacctttttgttcatcaagaagcgctgatgattataggtgagctgatttggtatggagtgtctcaggaactgagaaattccctattgctaggtagggaaatgacccactgttatagaagggatccaaacactaggtgtggattagattctaaagcacttttcattcctttcagtctggtgattttattgtaattgtggaaccctggaatttaatagttcctacattcacccattccatattgaaattccccagttgtcccagaaatattcttttcaaatgattttcctagccagggtacaatctaaaatatggtttgcatctgtttcttatttacttgttaacatatcttcaaaatgtatttctaataaaaatatcatatatagaaatgagtatatatgtaacctagtctgtcatattgctagaagtgaaagttttgtctttccctttttaaaaagactgggaaatacggccgggcttggtggctcacacctgtaatccctgcactttgggaggccgaggcaggcggatcacctgaggtcgggagttccagaccagcctggccactatggtgaaacactgtctctactaaaaatacaaaaattagctgggcatggtggcttgcacttgtaa

SEQ ID NO: 80478 - DNA, 1503 bp, Homo sapiens
taaaatagattatttttctgtttcacatctgttggactaaactagaatcttctataactgtgggagtacaaagaaagatttcctatcactccattggttgtttggttgattgactaattgattgggagccacgcctccctgaaaggatcacaccattgcatgcctatctggcctcctcatctttccccactcccaagctcttggcctagcatttactgggagttgtagtctgaaaaattactagaaggttgacacatattcaaaagatccttgatggtaccttgactgccctgcaaaagatgtacctgtgttatagaaaattgttgactcattatattgtaccacagtgccgacagttgtggatatttgaatcttcttgtcctctagactagggtcagcaaactttttctgtgaagaatcagatggtgtatatttttagctttgcgtactacataatctctgttgtgacggctcaactctgcctctgcccttataatgcaaaagcagccatagacttaaatgagtaggtataactgttccaagtaaattttatttactggctgggcatgatggctcaaacctgtaatgttagtgctttgggaggccaaggccaaggatcacttgaggccaggagttcaagaccagcctgagcaacatagtaagacccccccgccgcccccgcccatctctacaaaaaaaaaacaaagaaggtttttaaattagccatgcatgttggtgtgtgcctatagtctcagctatttgggagctgaggtgggaggattgcttgagctcaggagttccaggctgcagtgagccatgatgacgccacccctctttagcctggatggcagagaccctatctcagaacaaaaaaacaacaaagaaagcaaaacagttttatttacaaagacaggtggcagctggatttgtcatgcaggccagagtttgtatacccctgttctaagcagtcaagtttgttgtcttttccacgctccccaaactgctttcaggtcgctgattacatttctcattccagattctggcatttgattggagaatttgtcttgatcaggctcagtggctcacgcctgcaatcctagcactttgggatgctgaggcgagaggattgagtgcgggagtttgagatcagactgggcaacaactgagaccctgtctctacaaaaaatttattaaaaattagccaggtatggtagtgcacgctggctgaggtgggaggatcacttgagcctgggaagacttcagtgagccatggttgtgccactgcactctagctcaagcaacagagcaagaccctgtctccaaaaaaaaaaaaaaaaaaaaaaaaagtcttattagcagtgatggtatgggtgttcttttttcatgttgaattttagtgagaagcagtttcagaattcttagattaagtcaagtcccataacatcatacatgtcaatatggtaagggagggttttcatttcatttggggaacttgacaggctt

SEQ ID NO: 80479 - DNA, 2245 bp, Homo sapiens
ccacccgcctcagcctcccaaagtgctaggattacaggcatgagccaccacacccagcctatcttaaattttcttttatagttggttcaaattgggatccacataggtccacaaattggatttaattgatatctcttgagtctcctctacctgttgttccttctcttcccccctccttgcttttttttctttgttgaagaaactagatcgtgttgtcctgtagagtttcccacattatggattttgctggttgcaactgcatggtgtcatttaataggttcttctatccctgcattttctgcactggtgattaattcaagaaacttgatcaaattcagattcagtggttggggggggagcccagaatacttaattgattatactttctattgtattatatcaggagttacatggtatgtagttgccactgtagttttctacttaaaaatatctctgctttttgcttgttttacatcttgtggcatactgtagaacagtgccatccagtagaacatttttgtaatgatgtaaatgttctttatcaccagtgtctaatttggtagtcactaagcacatgtgactattgagcgatgaggaactgaatttttagtttcttaaattgaattttaagtagtcaggtgtggcttgtggctactgtattggaaagtacaattaataggacatttttcaagagtattaaataacaaaagtagcagtagatgtctattcctgattttagcctagatcacagtactgtttcatcagtaaatcagctttttaaattattaatatttttaatggacaaatcataattatacacatttatggagtacagtggaatgttttgaaatatgtaaacaatgcaatgattaaatcaaactaattgttgtattgccttgccttaacatttttatggtgagacatttgaaatgatacttattttgaaatatatattattattgactatattcaccctgttgtgcaataaatctcaaaacttactcatccagtctatctgaaactttgtactctttggtcaccaactccccattccctcccttcctacccctctatccccgcaagcctctggtaaccgtcattatactctgtatgtctgtgagttcaacttttttagtttctacatataagcgagatcatgtagtatttcttttctgtgcctggcttatttcacttagtgtaatgtcctccaggttcatccatgttgtcacaacagaattccttttttgaggctgagtactcgtgtgtgtgtgtacatacatgacgttttctttctgtgttcatccattgatggacactttacatggattccatgtcttggctattgtgaataatgctgtagtgaatgtgagagtacagagatacctttgacatactgatttcaattccttttcatatatacacagtagtgggattgctggattctgtggtggttttgttttcagttttttaaggaacctccccataccattttccataatggctatactaatttacattcccatcaacagtgtatcaagagtctccttctttctttatctttgccaagacttatctttcatctttttgataaaaaccattctaacaggtgtgaagtgagacttcattatggttttaatttgataatcagcttttatgtacagtttatgtgttataattatatcacccaatttttcttaatgggacagcgatctagggcagccctgcagaggtacctgttctactgtaatcgctatatgaaccacatgcagagcctgcgctttgagcacaaactatatgctcaggtgaaacagaaaatggaggagatgcagcagcacaacatgtcctggattgaggtgcagttcctgaagaaggcagttgatgtcctctgccagtgtcgtgccacactcatgtacacttatgtcttcgctttctacctcaaaaagaataaccagtccattatctttgaggtaggagtagttctgggtgaggaaaaagcccaccttgtatcataggtctacctgatctttcatatataagatacagagttttcagggttcttgtttgttcagaacatgtaggtagacgaatgtatttattacaaagatacaagaaatttctatttcttgtcctaaattatattcagatcgatgtggtttagccagctagtgattaggtatgcaggttctggagtcagccctagattttaatctttacttcattatgttttagctctgttgatttggag

SEQ ID NO: 80480 - DNA, 4876 bp, Homo sapiens
agagctttacaggtgcagttaaaccacctatgaaagttacagaatgagtgttgagagcagtctgtagtcaacaaaacagtgaaaatggtttatcttttagctttattttgaagccaaaatttactttcattcttcttacagaataaccaagcagatctagagaatgccacagaggtgctctcgggctaccttgaacgagatatttcccaagattctctgcaggatataaagcagaaagtacaagacaagtacaggtaatttttttttaagctgttgaataaaactttctgccagtgatgatccttactggtaaagttcagtgatagtgaaactgggtttagcatatccagcaactgagcttttgccatgtttctcacagattgcttctgtccgttgggcactaaattgcaggtaatagtattggtgaagcatacatagagaaggaattcagccatttattctattggctaattccacttctgttcagttatttagttgctaccttgcaaggaagaaagaatccaaaaaggccaagtggcctttaggatgagagtgagaattgaatgttggtcttagcctgagaatcctatgtatgggtcatggctattcacaaatgagctatggaaacttactttttagagtttttattacatatatatatatatatttttttaatctaaggagatacttgtcctaggagtcgatttttcaagatgtgccgcctcttaagctagagatgcaaaatgttttatttctcaacatgaagctctttctcccaaagtgacaaatgctagtgtcttttgaaagttgtaggaaacttggggagtttggaagacttggagatttagtcctaaccaatatcttcccttcccttagccaattttagctaccatattttgtttacagtacttttacagttgacagagattttaaggacgtgaataaagaacccatgaaattatttctgaacctgtttatctgcagaactgtgggattgaattatgatttctaaggtccatcagaacttgtaacactttattgctttaaaattaattcccatggaatcatggctttcagaaaataccattttaatattagaagcagtttgatgtgtctgtacatctagacctgaacatgtgcctattaaaataaaaaataggtgcttggttccgagtctggataaactatagggatgccttaaaaataagtaaatgcctctttttttattattagaggctgacaacaagtttttttttttttctctttgattacagatactgtgagagtcgacgaagggttttgttacagcatgtgcatgaaggctatgaaaaagatctgtgggagtacattgaggactgagaatggccctgcataaaatgaactctgaaaactttaccatctagagtgctcatgcaattaaaacaaaacaaacacaaacaaggaggcactaagcctattctgacaccactggtctgtagtaccagaattgttttgttaatggaaagtttaagtaaattatattgtaataaaaaggtagataaaccattgtacaacagtattctaggccaccaacaaaagtgtgacagacacactaaaagccctccaactttaacttgtaacgtagcttcattctcaaagctgactccttttttttctttttccttttcctgagtgtagtacagttaaaatttcaaacagctccttgacactgcttttcatgttcaaaccagccattttgttgtactttggtaaaggacctcttccccttcctcccctacacatacagatacacccacacacagactgactctctttctctcataccccaaggtcatgagtgaatgatgcttagttccttgtaaagaaaatcttgggatggggaaaggggtaggcagcaagaggattcaacaaacgaaaaacataaaaactttgtatatgacttttaaaacaagaggacaacacagtatttttcaaaattgtatatagcgcatatgcatggacaaagcaagcgtggcacgtgtttgcataatgtttaattacaaaaaaatatttattctttaaaaatcttcaagattatgtctatttgctgtgcattttctttcagtttgcttatctttcccgggttggggttgggataaaggtgtgtcggtttagcacctctggaagacctatctagagctctttcactttcctgaggttattttgccctttctggtgttggtatgtctgttgccggccatgggcctcatgccttgaattcctgctcttgatcagggacaagggaggtcaagctctgactaatgccatgacctgattaaggggtacagcagggagttttgttgctacagctcatgaattaacctgtcccaacctaatccccctccatggcatcatgcctctacccaagcctttgtgtgcccatgttatgcacacagctgtaggcattcttaagtcccctgtcgcatccagtggaagcattttaaaatttcttttactttttggttttcccttaattgctgcttttcagattttagttatggctcgtctgctcaccccttctctacattagggtgtcaaagagaatgttttgctttaaatataaatagccattcatttagtctcagattgtgaatttaaaatggtggataccgaaattgcttgtgtgtgttgctgtgggtttggtttgaaggcaaacacccctagaacatgatattcccatctagtgcatttaaatagaaatcactgagtttgctgcttttttattgtcagcagataggagaattaataatgcattttagctgtgatgtccatttttatgaaattcctactaagagctatgttaaaagtaaaggatggtggtggttgtattaactatatacctgtttaggccattctggctgtggtatttttcaataggtcagcatctgtaaatctgtcagttttatacaggagtgcagagtgaactaggcaactagattaagaggtctaaatatgaaataccagttgaggctgaggacctcttcgtcttcctttaaatgtcttttgcctagggagtgtttaccatttgtgaggcagctttgtctgctcttacactgtacatcctattactccattgggaagtaggttcactttcctctggccttttgcctaagttaggctttgctgaatcaaccctacttttccttttagaaaaggttgttacaggagatttactggcaactgttcttttcccatcaaaaatcagtgaatgtttgctgagtataaatgctgcttccttaaaccacttgtcgctttaggatcaactttacctgtaccttttctcctttcctcccttgccacctcaggtgcaaatctgaactcagtgtctgcttcttccattttctcgtctctctcccctcttcccccattatccatatgacattattttacttcaaatgacagcatcaatcttaaaaagatatacattaaaactaaggagtttttttaaagaaagcctgaataagttcctttccctggtaactttgaaaagcagtcagagttgctatatagatatatgtggctcctttaaaatgctttgtgtatgtgtggtgtttaaaaaaaaaaaatcttaccagttaactttgcagtgtctaggtttgagtgtcataaatccacgtgttcctgttgcaacaaatacccaaaaattgtgtgtgcacttcctaataccagtcttcacccatggaggaacagtgctttttagagatgctttctatttcaatgttggcatactgcctgagggtattgcagttgtgggtgcattccctaatttgtatgatcaagatgaactggcccttttctacttccaagcttttaacagataccaccatatttgacagaattcccagagtgaattgcttgtgttattagtagattcagtgcccccagctgggataggcaagccatgacagcttccctgtttcacctacagaagtcttatctgagggatctattcacagtaagcaccaaggtctccatgtcttgaggtcagtttcattgtcttttgaaaagtgcatgcttcatttgaacaattcattcagcagcagatggactttcagtgatttaaaataaaattttgatccaaagctcaggacacaaaccacagtggtaaaattgagtagcatataatatcagactaaattatctgtaattttccacaacccagattgtatgtgttttatgtgtgtttaaataaatatgttagatacacgtgtatacatacacccatatacaacagatccaagactggctgacttcatttgaaatggttgaatctgctgtgtaataaagtggttcaaccatgattaggaactgaaatttagtagaagagggaaaaggagttaatgtaacaaattattttagctacaaaccccggtaatagagcacttgggggatgggatggggtgggttggtgagacaatcagaatggtaaattgattaaatgctcctaaccctgtaattttgtgcatagagcaccctatgctgtggaaataactgttcttagatttcattgtaactggactgttcaggttgcccagagggaaagaacattcctaattctaataaaataaacttttattttgttattccattagttacttatgtttatttttatagttaaaaaatgactaaaggtggctaatagccacccgtattatgtgccttattcactgttcccacttaatataaaatgtcaaaaattggttgtttctttgcagggaactgtgaatgagcccattcccccaacatttaacttggttaatgaagctttcagagcattttctgaaagatttccaatttctgcatctcagatattgaatttaaattgtttgtgttgtaa

SEQ ID NO: 80481 - DNA, 1064 bp, Homo sapiens
cctgttctagaagaagtaatcacaacaagggagttgaaattttaagaaactgaatgaactaatactttactaggcattattaatactctaggtttttttacatatgattcttgtccacgtctgctttttcattactatttgttttcttttttttttcagacagagtctcactctgttgcccaggctggagtgcagtggcgctatcttggctcactgcaacctccgcctcctgggttcaagcgattctccttcctcagcctcctgagtagctgggattacagacacgcaccactactgcccggctaatttttgtatttttagtagagatggggtttcaccatattggttaggctgatcttgaactcctgacctcataatctgcctgccttggtctcccaaagttttgggattacaagcatgagccaccgcacctggcctgtccatgtccactttttcttaaagacacctgaagaaacttaaccactgctcagaagcatttttctccctctttcaggctgttatcaaagaacagcttcaagagactcagggattgtgtgaatatgctatctatgtccaaggtaagacacatacttcttgtcttcttgctagagaaatacacttttcctaggttcttgaaaaagatcaggcaattgaagaaacaagttcaagtacagtcatgcaccacttaacaatggagatatgttctaagaaatgtgttgttaggcaattttgtcattgtgtgaacattacatggagtgtacttacacaaacatagatggatgatatagtgtactatacacatgatatagtctgttgctcccaggctacaaacctgtatgagcaggtgttataccgaatactgtaggcagttgtaaaacagtggtaagtgtatctaaacatagaaaaggtactgtaaaaatatggtataaaagataaaaaatagtatacctgtatagagtacttaccatggatggactggaagttgctctgggtgagttagtggtgagtgaatgtgaaggtctaggacattattgtatactaatgtagactttatgttgtatact

SEQ ID NO: 80482 - DNA, 1120 bp, Homo sapiens
tgcctataatcccagcactttgggaggctaaggtgggtggatcacctgaggtcaggagttcgagaccagcctgaccaacatggagaaaccccatctctactaaaaatacaaaattacccaggcatggtggcacatgcctgtaatcccagctacttgggaggctgaggcaggagaatcgcttgaacccaggaggcagaggttgcagtgagccgagatcacgccattgcactctagcctaggcaaaaagagtgaaactccgtctccaaaaaaaaaaaaaaaaaaacagtctggccaacctcacccagaacagaaatgctctggcttttttgagttctcttgactttaaaaaaaaaaaaaaaaaaaaaaaaagcagctacagttaccagataataaagaaagaaaactaaaaatccccagtcatggttttccttctatttttgttaatttgtcacctgataaggtcaaagtatctatttgataagaaccatctctgccacactagtactgttccacattaatgcctctttgcaggaaatgagctgggtatcctcatctcccgtggagccaacctcccaagccaaagcccaggaagacccagggttaagctcctgattccttttaaagaaaaatgaaatagacataaaggccaccacagaggcagggctggaggcagaatcagctgaccaaggaacttggcaaatgtgtatattggggaagagggaaaagccccttggatacctgggccctgggtcctcagccagagaatcaatggagctaaaagaatcccattcacattcaggaatgttgaggggacagaaaacttcttattctagataaaagtatactttgccttctctctttccaataagactctggctgggaagaaagatcaaaagaaatggctttgccccaaagccctaagtgctcacttgtatctgtttctctcctcacaacaaaataacagcctccaagaccagagttatttctcatatatgctctttcctggatagcataagaatttttttttttttctgagacaggatctggctctgtcacccaggatggagtgcagtgactcaatctcagctcactgcaacctctgccttccgagttcaagcaa

SEQ ID NO: 80483 - DNA, 1037 bp, Homo sapiens
tcagtaagcctgaatttccttttattattattctaggaaagtttttctcaggctgttattaattgatgaactcatgctgctaggaacatcaaagccagaacagccatgaacgtgtaataccttggatttggatgatctgggcttgatttttaaaagtctcctgagagcttacttatgactcttgggagctaataaaagacatacctcagagtcaaattccagagagctattgtccttgagtaggctgactttcttctccatctcctgatattgggccagggcgttcttcttctcgccctggttgtacagcagcacagcatagttcaggtttactaaagggttacacctgtggcagacagagattctatggagctgggggctctgcaacaaatggtcatttagagatccttctcattacacaaaaacaaaacaaaactggttaagtagagatttctccattatgcagcaaggtaggtacatacgtgctaagcagacctgtggagaagaatcaaggagttaatggcctaacaagcaaagctggtattgggaccaaatctggcatctcagccctcaacagagactacctaggccagggttgaaaaagggatctctaccctgctgtctagaagatgccagcggagtaaatcctggaagagtcaagttttatcttgaattaaacagcccagagtcccatctgatattccagctagcccatagctatcagcaacccaagcccactgccagttctgacattctctagcctcctgattactcagtttaggactggaaacattttctcagagtgtcaattcctgctgagccaccacatacttaggagacacatccctccacactgaggtctgctatgtactaatgccatagaggaacagctgggctgacacaggcagcaccaatgctatgtatggcaccacctcatggctttggagagtccaacccccgccagtaccattctcaacaaagtgcatacttatccaggtggactgcttctgcgtaggctctcttggcattttctatat

SEQ ID NO: 80484 - DNA, 1093 bp, Homo sapiens
aaatcattcttttttgctgttagagttcaagaggaaaccccatattttctggaaccagtgggactgacccattaactataagggaagactataactgagaaataaagcaacagtcaagtttgccttcaatgagtcactgaaaaatatttacgtgtcaacttctgataaagcagtaaaaattaaacattgcataacaggatatacttaataacatattgctaaaattggaaagaccagtgtatagaccatccaactaagtctgtgagtagctgttacctactacatagctcgccttaaggaaacaagtgccaatttagccaccctgtgttttttttctccccttgtggccaatactacgttggacatatgagtctgaagagaacctcactgaaagctataatctctgctgacagacacatgtggcttgtacctgccaggtcttcatggagctctgtatggtcctacctgaggggagcgtcctgtatgcagctgctgaagacattgcctgtcctagagcttgattagagcccagaggctgctggaaactggcaggtttgctggttgaagtggtctggtgctttgatttgggatctttaactggtttggtccagaccagtgcctccccaacctggagagcagctcccaacttctgagccatctccaccatcttgtgtccacaaaggaagtaaaagaatcaaaagcgtgactgtcagagacaagccaacccacttctttggtcttcgagctggggttttagctgaaatagtgtctggtcgtactagcagttgaggcaggaagtacttatcaaacagtagagattacagattgcctttactggatggcatggtggttcacataggatctcaaaacccaacaattcaagcctggtgcattaccgggccaaacagtgcatttcctacaacaagtgaaatagggctgggcacgtggatcacgaggtcaagagatcaagaccatcctggccaacatggtgaaaccccgtctctactaaaaatacaaaaattagctgggcgtggtggcacgcgcctgtagtcccagctacttggaaggctgaggcaggagaattgcttgaacc

SEQ ID NO: 80485 - DNA, 1343 bp, Homo sapiens
ctgcgccacagaaaccatagacaccagccgagtgtctctgagggcaccccaagagttcatgacttcccattcggaggcaggctccaggattgtattaaacccaaacaagccagtagtagaatggcacagagagggaatatccttccacttcacaccagtattggtgtgtaaagaccccattcgaactgtaggccttggagatgccatttcagccgaaggactcttctattcggaagtacaccctcactattaggaagattcttaggggtaatttttctgaggaaggagaactagccaacttaagaattacaggaagaaagtggtttggaagacagccaaagaaataaaagcagattaaactgtatcaggtacattccagcctgttggcaactccataaaaacatttcagattttaatccgaatttagctaatgagactggatttttgttttttatgttgtgtgtcacagagctaaaaactcagttcccaaatccccagtttatgcagcgccatcaggtattttaagctaaacttcttcacccctgagagcatgtcagctggagaaaagcagttcttccttgcccacttgagaagtgcacgcccactcacccaacatcctggtctctaggaaagcctcatgtgaggttcctctttctttcagctcagtgcccatgggcaaggatcatgatttccattccgtgttacaatgacaatatttaatgagcataaccttctcagtctcctgctctcaaatttaggacagagccgctaaggacaaaacaatccctcccgtgctttatgatggcagcaggggctggggagcctctgagggactctttcattctgcagttgtctggaagcctgggtggcgtcatgagctgaaggatcatgctttcctgtcctggctccataggttataggctggctggtgaaaggttcacgtggcccaggctgaacttcattgcctagctttggatgtgctttctgccataaagactgatttttgttcgttctgagccttcaaggaatttgttttttacaactggaatatgctcctgtgtgtgttaacagatcatggatgttttatgttttcactgatcatttaaagagtttgacctcagagctccaggatcatcagtaaatttgtcatgttatatatttatttttttataaatcaagacttctgtgtgctcttaaatatattaaaaacaatttacatttcaggaattctgtctgtaattgatttttgtctccatcaccactctggaaccagataagataaaaatcattctgatcttcatttgtgatgtgcatgttactttgctcttgaggtgcttgcagtc

SEQ ID NO: 80486 - DNA, 5163 bp, Homo sapiens
ttgttgcagacaacatcccatgtctgtttgcctgcacaaggtgtgagtgagtaaagaaagtgggggtagggtctgctttggctgccatagtagcacaataccatagacttgggggctcaagcaacagaagtttattttctcacagtggagactggaaagccccagaacaaggttccagcaaggtgtggcttctggtgagaagtctcttcctggcttgcaggtggccaccttctcaatgtgttcccacatgtcctgtccttggtgcatgcggtggggggagagagattgatctctctctcttttcttataaggccaccagttctatctgattaggacctcacctcacccttatgacctcatttcatattaattaccttccaaaagccctatctccaaataagccacatgggggtttgggcttcaccatctaaatttggggaggtgacacaaacgtgcagtccgcagcagagggaatgagatgtagcagctgcataggtgcctgacggctgtgacacagttcttttgtcagcctctcagttctgggtacattatggccataccctccagaggccttagccctggtgacatgccttctgccgcacacctccagaccaacagctttcaaaattagatttggattccaatattttgttgaaatgattagaatcagcctgaatgtactgtcctggggtgctgttgaggttctgtggggaaaggaacggggctcctgatggacttcgtgttgcttgcctccaggttcttctttgcggtccagttggtccaaagctacatgagcttcttgatgacaatgtctttgttccaccagagtcattgcaggaagtggatgagttccacctcattttagagtatcaagcaggtaaggaaatgagtaagtaatggtggcaagaccagtcaaggggctgtgtattgtcagattggggtgtgactgtgccggaaatttatctttgtaaattagcaggatcctgtttttgccatactgaaagtttcctgacctattggttctactgagctgatactggccgttgtctcaagggagactgagtattataacatggaagaaaattcccaggtctacaagcagaattgctccgaacccaagataaatcaggtcataggaaagcaagcatctcaaataaaagtgaaaacgtgttaaacacacatatataaagttttcctttatgactaagacaagagaaaggcaggtagcatccattcaactctgtgctggattctgccctaggcctttctgactgactcttccaagctgcttggggttgattccaagcttctggcaagtttctctggagcattttatttttccttgggtgtgtgaatggaagtgttttgtatttaacatcactatattgtttcccatcagatgttctaatgttaataaatccacatccactgcatcccatcccctcttcccagcagattttatatgttacgtagattaggcatctggtttctgagagaatattaaatacttggacatactttgatcctgtgtatttcctgctgtaattttccctctgctcagaactcagactcttgagtttctgattcaacacattgttaatacacattaaagactcaagcatctaaacagactaattggtaccttaaagcagcacttaatactcttcagtgaactacttccaagtcaattaagagaatcttctctactagagtaattaactttaacataagatatgaactatgttatttcttgagaattatgcctttctccaggtagaaaaaagagttgtaacatgttctggttctctttcgggtgcttactagaatcagttgggaattaaagaaggatagggtctgaaaattagggacacagcgttgacgtaggcaattcatacttaatgctacacaagtttttgagtttctcagctttagttttcccaaatgggaagtaagagtaatagtttttactgcctgatcattgtggtaaggattaagagattggttggtgtgcggaaacattgtgagcagcttggatgaaaagatgacctggccgcacgtggtggctcatgcctgtaatcccagaactttgtgaggctgaagcgggtggatcacaaggtcaggagttcaagaccagcctggccaagatggtgaaaccccgtctctactaaaaatacaaaaattagccaggtgtggaggcgggcgcctataatcccagctactcagtaggctgaggcagagaattgcttgagcctgggaggcggaggttgcagtgaactgagattgcaccactgcactccagtctgggcaacagagcgagactccgtctcaaaaaataataataataaataaataaaagaatgacctgactgtggactggaagggtctggaattgctaaagatgagcccctgaggtattgctgccatgagttccagattcgtgtcagtttttttggcacccacagcaggaactggggacctttgtgattcctggtttgtcatttttcctggtgactacagagtggagagtcttacgtcttcagcaagactttgatgttgtattggacagctgtgcctcgtatgtagttaaggagacagcacagttcaccgcacaaagagagtgtctccatccttgggtttataagcttcacacttcagtttttctttcctatgcctcttctgcatacaaagcagtggacttccattaaactttgtgaggtgacattttcctaggtccaaggagggagcctagtctagtggcagtagccctgggctcagctctctcaacagaaatccattcccagcttgtctctgacctcaatagggaaattccaagggatttgtccatttttttttccacattctctcttaccagatctccccagagaagcccattgtcaggcttgggctgggaatccagtgagtcactacgcagaggttttgctgacttactggctgagggcaggatgatacattgagaagagattgcttacaggaatgaatacaacactttgtgaggaaagaggggcgctaactaccattacaggcagaattagatccatttgcatctgccccctgcatggcctctccaacggggccatgaatatgctggaggtgtttgtgtctagcctggaggagtttcagccagacctggtggtcctttctggattgcacatgatggagggacaaagcaaggagctccagaggaagagactcttggaggtaatggcactgttacagaatttcacagatctcagctggtggttttcttcaggttccagcctctcttggcatctgctgccttgtttcctgtggaaacagcaagcagctctgcacggttcttctcatccttgccttgcagaagagcctgtttatttttgcctctgtcacttcctgaagaaatcagtgtattttcaatacagtgtggctcctttctcctaggttcagttaggtcgtgtttcctagcagtgtcactattcaagggttgagtccacgtcttgctctctggagaatgtcaatgtaatgtatttttcccatcgtacagagtctttgttgatttgcaaaatgttggatttggggttcatacccatattttttgttgtcatgggcatttaggtcatcagtctgttctcttatttgcttgttcttttgttaattcattcccatggctatatgccagacacagcatgatgcagaaggaatacgacagaggatgacacaggccctgccctcagctcacagtttactgccagagatagacacttggaaaaagtaattgcaggccgggcatggtggctcacgcctgtaatcccagcactttgggaggctaaggcaggcagatcacctgaggtcaggagtttaagaccagcctggccaacatggtgaaactccgtctctactgaaaatacaaaaattagccaggcgtggtggcgggtacctgtaatcccagctactcgggaggctgaggcaggagaatcgcttgaacctgggaggcagaggttgcagtgagctgaggtcgcgccattgcgctccaacctgggcaacagagtgaaactccatctcagaagaaaaaaaaaaaaaaaaaaggaaaaaagaaaaaggaattgcaaaatcatgtgcctcagtcctgtattagggtacagtggtggccccagaaaggaggtaatcaagtctgcttaggggtggtaggattaggaaaggcttcatgtttagggaggaactagcacttgaacttgggtctttaaacagtcattcctctaaagcaactcacatagaagcaactggagcagctagatagtctgatcctttggatcaggtgcccagaaaccactgatgggcagcagggaagaggagatgcagtgagcttggctgttgggaagaaattcagcctgcttaagttccaactgaatgaaagatgctcagggcaatgctgtgaggaagaatgtgctttaaacaatgacagcctatactgtctgcagggcgtgcgtgctgcacactgtatgctggtatttggaagtcatgctgccattctgtactgtctctcctgtgtttgagagctcaagtagggctctcctgggactcagggggagctaattaccttgaaaaaggcatatagcacccatactatgtttctgtttcttggctgggtttgggtttaggtttttggtttgtttcttgcagtgccatgctgaccttaggccattgttgctggggtctcctcagccagaaaccagcctgcttggagccaaggctcctgtgaggtgcctgaaagtgcccccacagctaggagacctaaagcctcttccttttcttcccattgtgttgactgggtttttccaggggaggagtggggccagttaaaagctccccatgccaaccgattcatcttctctcacgacctctccaacggggccatgaatatgctggaggtgtttgtgtctagcctggaggagtttcagccagacctggtggtcctctctggattgcacatgatggagggacaaagcaaggagctccagaggaagagactcttggaggtaatggcactgttacagaatttcacagatctcagctggtggttttcttcaggttccagcctctcttggcatctgctgccttgtcttaggtcctggcctcccagggacatatcttggcagctggctgtgg

SEQ ID NO: 80487 - DNA, 1049 bp, Homo sapiens
tttccatctcatgtcattctcccttctgccagaaggacttcttttaacattgcttgtggtgcgagtctgctggtgataaattctttcaggttccgtatacctggaaattcttttacagtaatatgctaagacatttgtagggcttactaagtttattcctgtttccttttttttggagacagaatctcactttgtcgcccatgccagagtgcagtggcatgatcttggctctccacctcccaggttcaagtgattctcctgcctcagcctcctgagtagctgggattacaggtgtgtgccaccacgcctagctaaattttttgtatttttggtagagatagggtttcaccatgttggccaggctggtctcgaactcctgacctcaggtgatctgcctgtctcagcctcccaaagtgctgggattacaggcatgagccaccacacctggccagtttagtcctgttttttagggatcgtcctttattgtctgatgttcacacaatgttttgaaaaccattgtttcatatattttgtcttttttgttgtttcaggcaggagggtaaatatggcctatggcccttgttgtctcatcttggaagtgaagcactagccaagaattagagaaaggaagtaaagtggttggggcaagactttttcagaattggcctgtaatgggcatgtgtcaaggcagaaaagggagaggagtatgtttttatccagaaggtgggatttcttaaataacacgaaagtacctctgtacaaagcagtctatataagcagttaattagcaagttaatgccttttgaagcttctgggtgggacatactaaatctgaaacagaccgagtatgttagctcatgcctgtaatcctagcaagttgggaggctgagttgggaggatctcttgagctcaggagttcgagactagcctgggcaacatagtgaggtcttgtctctattaaaaataaaaataaaaaattaggccaggcgcggtggctcatgcctgtaatcccagcactttgggaggccaaggcgggtggatcacgaggt

SEQ ID NO: 80488 - DNA, 1277 bp, Homo sapiens
ctgaatgatttttccacaggatagtgaaatttttcttcattttagaaggactataatgtagacgataagccctgtccacacttttcctgtttcctgtgtctcttctggctgtctgtaagctcagagctgaatttgatcaacagttaaagcaatcagactcattttcatggttgtcctatttattttcttcatcttattactcactttctatttctgtgttgcattcacttcatctgtgtgtcctttgatgtaaaatcacctcaaaatgtttttgggaaatggactataaattaatttttaaaataaaaaatgattaaacttgggtgatatagttgtattaaaatactgtctaaaagccttgaactctcttacagcactatgtaggaggaaatgcagctttaattggacagaaatttgcagccaactcagatttaaaggtaggtcaagtttttagattaaaacctatgcctttccctagtgtttcaataattttaggagcaagaatgagtatctattccttgattcaacttatggatcacctactatgtaccagaccctgggtcttttgttaggaagcagtaatagtaggagatagtagtaactaatactttgagtgtttactctgtgcctgacattgtctttagtgctttgcatagattatctaatccttgcaacaaaccctgtaaggctagtcggtactgccattgttcttcctttctgcatgagaaaacttgaggcacacagaggttcacaactgattggtaatggaatgagaaatttaacccaggcagtctgacccaataacccatgttcttaggcaccatatcatttaatagttaggagcatgtgggccttgagactaaggattatacaagtcatgagggaaaacaacggttggccgtgttggtgagcctggatccagagtgccaaaaaataaaagccactagatgagagtcagtaggggagtgtcttcaagacttaaattgtttggtttaagtagaattaaaaatcgttgccatgttcacagtaacacctgagtaagaagtttctcttgctatgagtagaataggcctgaagggggaggccaacaagaaagttatcgctgttttcctgtataatgattaaggtttggattagagcagccagagaggagaaacatgtatctaaaacctactacaatacatggggaacaaagaagagatttatcaaagatgattatggagtaaataaccttgatcagtgcagaatggttgtggccgctaacactagaaaacaga

SEQ ID NO: 80489 - DNA, 1042 bp, Homo sapiens
gttaaagggccaaatttcagcctacatatcacagaaagttttaaattatctctaaaaagctattactgtcccacctgaattcagaggttagtcagcacaaaattgggataagagtgatgtctaccatctagaattgtttactccaaccttgtccagtctgcagcccaggatgcctttgaatgtggtccaacacaaattcataaactttcttaaaacattatgagatttaacctcccccccaccctttttttttaatagctcatcagctgtcgttattgttagtgtattttatgtgtgacccaagacaattcttccagtgtggcctagggcggccaaaagattggacacccctggtttagtctatgcctctgcgtgggctgaggactaggaagctgggatagtagcattccacccaggtaacactatcaggcttttcaacttttataatagaacagcagccttagctgttatgtgtcagatttccaaggcatatggatccatccttagcaacatggaacaccaaccttgaattatttgttctccaggtcctcagctgagagatgtggtgtttaagggaaagtactgtcctatattaggggcccattatctttagaatttactcccaggaaaacttttatgtttcccaacacatcagtgtgtttcttcgtttctcaaaatttagcaacaaacatttactgaacacttcagaagaagacagtccctgccccgaaggacctagttgtgtacccagatgatagtagcccaagcagacaagagctgcattagaggtttgttcaggttataggggtaggaagagatctgtaatcctatctggtgagggcggttgtgaaggctgagatgtcagtggggtgtaaggggaacagagaaggcattacagaagaggtgacactgcagctgattcttggaaagtgatcagggttttacctagtatatgagaaagggagggtgtcctaatggaaggaaacagcatgtgccaaaggcacagagacaggggaaggctgacttggagagctgtaagcag

SEQ ID NO: 80490 - DNA, 1034 bp, Homo sapiens
tgctttcacacagtttttttcctccttctagagtcaatgcatgtgttgatgtggtgctctcaggggtgaagctcttgcaggcacttggccttagtcctgggaatgggaaagatcacagcattctgcattcaaggaatgatctggaagaagccttcattcacttcatggggaagggagcagctgctgagcgcttcttcagtgataaggaaacttttcacgacattgcccaggttgcatcagagttcccaggagcccaggtctgtttggttcagcaatagtaaattaagggtggaaaaagatgcctttttaatatggttcctagaagcaagcaagcaacttttcattccagtttgaagaggaggggagcaaaatcacccctggttgaaaactgtgggtctaggttgatggttctcagacttgagcatgtgtcagaatcatttggagaggctgttgaaacacagatttctgggcctactaccagagttcagattcagtagatgtgggatgggacccaagaatttacctttccagcaagtttcctggttgatcctgtaggtctgagaacctccttttgagaaccactggtctgcaaggtagaacctgtcgaagttagaaccttagtggtttccaagttcacctggtgattatatacaaagccctgcatggtccaggcacttcctggaggttcacgtggaataagaggcagtgctggggctggagacccaaccatggctcttcctacctcaccccagtatgcctgctcctacatgtaccctcatgcctcttgaggctgagttttggttggttggttatctcccatgtcttgcccccaccccattcttcctcctcatttaaacctccctttggctgggcacccagtctggtttggtagttctagccagggaagctcttaatgccatttttaattggcacctttcacaggcaaacctttgtgactacttttattttgatgacttaagattttaggccgggcacagtggctcacgcctgtaatcccagcactttgggaggct

SEQ ID NO: 80491 - DNA, 1047 bp, Homo sapiens
actaattagcgatcttaccgcattttgcaaataggtttaatctatctgaaaatgcctgcctagcgtggggtgcttcttaaagatcagccgcctttcttctatctagatgcaggagctagggttcagcacagggaccactgccctagccatttttcccccgcctctttacagttctatgtcttaacaattacgattagctcttataacagctgatgcacataatgtaaagctagagaaaaccttagaaaacattttacaggtgatgaaacagaagggaggagataggaaacatcgtctttgccttagaggcacttatggtctagaagggagaactgtgccctctttgccagccccccaacccattttgacattcagcatctgttgtcttgacctattttctagttgtttcatctgtgttttctccaaaatcacagtcatctaatatacattttttactgaagtgtgagcttctgcttgcatgtcagatgagcataattttgtcttctgattctttaactgtgtctccctttatttccccttgacaatacagccccttaggtaatatgctttttacattttgggatgctattgagttgagaaagtgcagagaaagattcttattctggttaaagtattataaaacagaacaagaaagtacatgtaaagtacttgtttggcatccggcatgtagtagatgttcagtgtttttttgagacagggtcttgctctctcacccaggctgaagagcagtggtgccatcttggttcactgcaacctctgcctcccaggctcaagtgatcctcctgcctcagcttcctgagtagctggggctacaggtgtgcaccaccacacccaggtaatttttgtattttttgtagagacggggtcttgctatattgctcaggctggtctggaactcctaggctcaagtgatccacccgccttggcctcccaaagtgctggggttacaagtgtgagccaccgtgctcagcctggttttttttaattataaaaagttatcaagtaaactgtgaaccagtctgaaaa

SEQ ID NO: 80492 - DNA, 1045 bp, Homo sapiens
tagctcactactttctgtggagtgttggggccgggaggggtaaagtagagcaaacttggcctgaagattaaatgacatcattcatgtaatctctctagcatagtgcctgctttaaaaagcattcgatattagctataattttggggtttttttttttttttttttttggacacagggtctctctctctgtcgcctaggctggagtgcagtggtgcaatcactgctcactgcagcctcgaactcccgagctcaagagatccttctgcctcagcctctggagtagctgggacgacaggcaagcaccaccacgcccagccaattttttatttattttattttttttagtagagtcgaggtcttgctatattgcccaggctggtctcgaactcctgagctcaagccagcctcccatcttggcctcccaaagtgctgggattaaattgtccttccttgctttatgcgcgttcattcagcagatattcaccaactacatggttagtgtcaggtctgtgctaggttcttaagatacagagatgggtgaagcaaggcccctgtctcacttgttggaaacatattattgtatcagtcatttgggctgctagaacagaataccacaaattaggtggattaaacaacaaatctgttttctcgtggatctggaggctgatagtccaagatcaaggtgttggcaggattggcttccgatgtggcctctcttcctagcttgcagccagctggcttttcagttagtctgcgcatgtacactcctggtgcctcttattcttcttatgtggacactaggtccttttggaatagggctcacccgtatgaccttatttaaccttaactacttccttaaaggccctacgtccaaatatagtcacattgggaattagggtttcagcatatgaattggtggggggtggacaattcaatccataacaattatggttagaagaggaacaacccacgaggaccaggcagaagccttaatgccttttacgaccttaccttagaagcacataggaactcttctaccagagtc

SEQ ID NO: 80493 - DNA, 1035 bp, Homo sapiens
cgtggggtcccccctcgctccgtcctggcgccgcccgtcgccccgccccttggggggccccgtggcgcacccttgtgacgtagcgcttgtgtcgacatcggcgcgcgccgagcccggaagaggcgcgggctaggaaaggagttggttcgcgcaggtgcggcgcctgggtccccatggcgctgtggcgcggctccgcgtacgcgggcttcctggcgctggccgtgggctgcgtcttcctgctggagccagagctgccaggctcggcgctgcgctctctctggagctcgctgtgtctggggcccgcgcctgcgcccccgggacccgtctcccccgagggccggttggcggcagcctgggacgcgcttatcgtgcggccagtccggcgctggcgccgcgtggcagtggggtgagtgccaacggggcctgggtctctgagcctccgaggtcggccttggaggtcgggcggagccgcgcagaaacagggcttctcagaggtccccgggaggcgctgctgtccgcgctggccccttggcgagaagtgtcggacgtctgagtggaacccggttcgtcaccgctgctctttccactcggctggcctctgcgcctttctctcatcccggtaggaccagccctaacagcttcttgctaatcccgctttgtctgacacctttctccgagccttcttcctcgttccaacttttagccccttctcttctggcgactgttgttttgcaatcaaagatacttgaccttacccactatgacaacactcttcctctttcttctgaacttcttgaagacgcgtgatgtctgcctttacccactttcgaaacgccgtgtagtctagaaaccacacgactgtactgcaactcctctcagatttgcctttttgaatcttcattatctactctgcagccttccacgcattgaacacgcccttctccgtgaaattcttttcttcccctgacttcagtgacactgcatatttaaggttcttccaaatgacactacctcctttctttgtacttttccttg

SEQ ID NO: 80494 - DNA, 1054 bp, Homo sapiens
gcaggaacttctctgcctcggctccggttgccgaagagaaaggggatcgcgcgtggtggggaggagaagggcgagagggggcgccaccggggaaggggcggctgccggggggcaggtcgggggcgcaggggtctagttcccagctttgtacctggaggcaggttcacccctcgcctctctcccctcccccaggctcatcccacttgtaagagtgggacattcttgtgctcacactagcaccagtagaggccactacacacctcattaaataaacaatcagacggccaattcattaattttcaggaaaggaaaggggagggggcttgagctcctggttccctggccagggatttcccagcttccgaagtctcgaggaagagctggctagtctcgagggactcctcgcgcggggattggagcccgagtctgcggaagagcgggggtgtcagaggggcacaattgcccgctcacaacccctggtgttgatttaacgatgaggacgccttggagagcggctcggagtgatcgtatctgttagtgtttccgttatgaaatgcctcttctttcctggggattacaactatatttacagcctattaaccactcttaaccaagggaattgtctaagcatcagattttaggtacttgtacaatgttttcagatggcattgtataaacattgaacctcaaaagccattttcagttcttttttggaatattatagattactgaaaccacctgcattcctattaaggggaccaacgaacaaaaatgccaagccttccgggaaggaccttacggtattgttgagcaggatacactcagcagttgaaaggcaaattagcatgtaatctgttaaaattatttgaccaaggtggtgtaccataaaacttgacaaaactttcactcgtgtgagatatgatatttttacatttgaaagcagtcttaccgctgaaccagtacttgtttttccctgatttatatgaaataatatttaaaatcacactgcaaggtaacttgactgataaacttttcatttccttgcagagtgtgt

SEQ ID NO: 80495 - DNA, 1068 bp, Homo sapiens
tgggtaggagtggaggtggggaggctcacaggtaattagtcgtttaattgggtctagaacatagatctcctgattctcggtccagagtccttcctgtaaaccgctctgcttcattacaaaagcgagaggaataactgcaataaggaggggttggtcagttctgccataaaactgcggaagagatcaagagactggagaactgagtaagcagcaactggaacaagctgtccgcaaatcagatgtcctttgtcagtagttttattttttttatttttgtagagtgatagacttataaatctttttataggggattatagtgaatagattgtagggaagtggacatgttcagtagtagaaggtggagaaaaatagagatgtgggacaataggataaatggaaagtgtttttccatctgaggttatagacatacggaggtggaggaaaaagtaagaagtaaaggactggtgatagaaaatggtcagcaagggaggagggttggaattgagtaggaacataatctggtattctgaaaaagggcagattactgaaaagatatgtagagaccttggggaagatgacatggcagcagcctgtgcaatgcatgtcttctctatttagagtgaacattcttcaccgaggactctgtagcttctgcctgaaccatttatttcatgatgtgattcattgccttacagggtagtccatttctgtgttgaataacttctgttagaaaatgttgctttgtacagtacatttcactgtagttttcaccctccccacccttcttacattttttcctctttgcttacctttttcagcattactctatcttcaggttaatctcttctctgattaattcttcatttgtctttctggcttttcttgaactcactcacttaaatattagtatctaaagcttatctcattatacatactctgtttgccctcagttgccacctgtaagctaaggactctcttagtccacactttctcacttgccactcggtaccttcactaaataggatcttaggttactgaagtccgaagttaaactctgtgtcattttcc

SEQ ID NO: 80496 - DNA, 1129 bp, Homo sapiens
aagggatgtagagtaaattgaccaggttacagagctggcttatgtaaacaggttttgattccctgtctgacccctttacataaagaaaaggcagagaggtatggtggttatatatgttttattttactgaatgaagtcagttcttcagttctgaggagttagcaggttggtggtctgaagtgcagattacgtgtctctgcttttccttttttaaagaaccattagaaataaccttctttaaaattatttcatagcgagaatccttacatttaactttttattaagtcagttctataggcaaagctaggagttgcagtaattttggctggttgcaaacgtttatctttgagggctaattatgcacaaaactacactgtggaaataaagatgaattggacgtgctttctgtcctcaggaagcatttggtctaatggtggaggtaagggagatattaggtaacttgatttggcgagagaaagtgccattactgctgtaggtagaaaaatacattctggaatcattgtgttactgttgatcaaggaatagtgctgctttccctcataattttggttctgtatctttagagtagtcctaacttagttttataaagccagtagactagaattctcaagaaggagttatatatcatttcctctgattactgcagtgtttgaatgtatgagaatgctcataattgagctgtctgggggtacagctactcccatgttttttggaaatctggagattgatcatactgattttcagaattgattattggtcattaatagtacaacttactaagaagtcctgagcagagtgaatttttgtaatgatactatgtggaaattgaaaacagaatgtttctgtttttctgctgtagtggtaaaaaaaaaaatcaccaaaatatgtctttatttatgaggtctagttaagataatagcattataatttacaaatttagggatagaataacaaattataagtttcattcataattttttaattcacagcatagctttaaatgtaacaagtaaaatttgaaaatctttttggttaattgttgaaagtttttgaagttggaggtaggataactagttttgtttgtttgtttgtttgtttgttttttctg

SEQ ID NO: 80497 - DNA, 1035 bp, Homo sapiens
tgggctcaagtgatcctcctgcctcagcctcccaagtagctgggactacaggtgcacaccaccatgcccagctagtttcttaattttttttttagaaacaagatcttactatattgtccaggcttgttttgaactcctgggctcaagtaattctcctgccttggccccccaaagtgctgggattacagatgtgagccactacacttggccctgtagtcatatatttatgttatgtttgtagcacgtggttaggttttgttttcttttgcctgacagtttttgtcttcttactaaatcatgtctatttaatgtaatagttcatatatttggctttaaacctcccattttattatttacttctgcttgcactgcttattctgtattcccctttctctcttttcctgccttccttggattattttaagttactctgtatttccctctcttttagcttgccagttataatttctttcactattcatttagtgtttcctaaatgcatctttaacttgttatttgtatgatttcatggacagtgcaaggcctctataacacctgaattccatttgtccttctcttttgttttaatgttattatgttattgttgtgtattttagttctctgtatgtttaagatccatcagatgttatttcatactcactattcatttagttttagttatttaaattcattaatttattcatttagatttacccacgtatttcgtttgtgagttgctcttcattttttttttttctgcatctctgatctttcatctgggatcatttctttctgcctggagaatataatttagcatttagttaggtttgttggagatgaattttctcagcttttgtctgtctgaaaacatttgtatttcaccttcatttttagatttttgtggagagggtgctggatgtagaattctaggtaaacagtgtgttttttcaacactttacatatgttgttccatgtccactgaactctatcttttctagtaagaagtcaactgtcttatttttcttcttttgtgag

SEQ ID NO: 80498 - DNA, 1039 bp, Homo sapiens
ttaatttcattttattgaccttttcagttctgtaatttctttttatttctttctttcttttcttttttttttttttgagacggagtcttgctctgtcacccaggctggagtgcagtggcatgatcttggctcactgcaggttcatgccattctcctgtctcagcatcccaagtagctgggactacaggcgcctgccaccatgcccggctaattttcttattttttgtacgtttagtagtgacggggtttcatcgtgttagccaggatggtctcctgacctcgtgatccacccacctcggcctcccaaagtgctgggattacaggcttgagccaccgcacctggcctcttttttttttttttttttttttaaatagtttgcaggtctctgctgaagttctccatcttgtgtttttattcctttaacccactccagcatgtgtgttcccgtaggagttttgcttttatgtctgttttatcacctgatttgggagggtttcttttcatgttcttagttgtgattgaatgacaggtgttgtgtatgaaaaattatcgagataatctggatgatactgtcttctcaggatttacctttacttctggtaggtggttatgctggaggtactaacagtctcctaccacattacatagggattgaggtgatttaaaattaggctttagactctatgagttgaaatagtttaggtatacctttagttcttagatgtagccctttgaggctctgatccacagtttaaggggtttaccctccctcttggcaggccctcactccagtttttgtccccttagggcttgggtctgtcgaaagctatgctcatctcagcctcttcagcagtagcctttagaatctgccgatagctctaggccaaaaggagccccacataccagatttgtccctttggcttttctttctttttgcatcttggttcctcaattcctcattgccttgattgcctttacacagatattttgtgttttgtctagtttctttagttattctcagcgggagaattggtctaa

SEQ ID NO: 80499 - DNA, 1041 bp, Homo sapiens
aataagtgaaggaggtctcttactataacagtgtttaattcaccatttcaacaaatctctccctgcagcctactaagctttttctttaattaagtacctgatttacacagcagattttactcatttgaggactcaagtcatgtctaaacagataaaggtatcagctcaggcatagttcaggtaccttgtaaatgcaatcagagttgttctgcagggtaattcagttttagacatccatttctaaaaacgggttctgtctgaaaatggaggccttaataaccaatttctcgttattcagaggccagttatctagtttatttatcaagattaggcagtcaccttgtttttcactcctttctaatctctctgactgttttgttgttttaaactcatgagtaagataaggagaagaaaaacagagaatgtacataaattaatggctaaaatgaagtgttcctttgcatgtttctttttcttatgctttatttctgtgactcatacggagctgttagaagtgacttcatataatattatacagtgtaataaaatgggttttcgatgtgtgaggataccctcatgttatttagattatggacacaattaacaattccagacagaattattttctcatgtttgaagtagtataggcacatggccctttatgggaggggggaagctcttctctgtgtgcccacttttcacatccctctccagcatgactctcccctttctgtcagtcttaccccaggagtccctggcctccttcctctccttgacactgtttgctttgcaagcatatgaaatactggcaccctatgaccagggtagactacaaccagggttggggtgcaggagccagatggagaaattcaaattatgatcatgagaacatgttcctctaggtagtggccatacttttatctctatatccttaggacgtaacacagtgcctggcatataatgtgtctccagaaatattttgtttttgaattaaagactatttcaaaattacagagtcataggaggaatcatttaatttat

SEQ ID NO: 80500 - DNA, 1025 bp, Homo sapiens
tctctgtcctttctgctaaatgaatgctacttactatttttccagtgcctagaagagtgccaggcccatagttgattttcagtaagtattggttgtatagataaatagaaggtactgacagtaagcatgagaggacctctgagtggtgtggcatttggagaaggcctgggatcttgtacagtgcaaagcttaagtaacttcattctaagtttgtatttccaactcccccaacctcagcatgttctccccacccacctcctcacaccccaaagcagtccctgtcttttgttaactgatttttttctttggaagcaagcctgatctttctcacatttattttgctactgctcaggctaccttcttttcttatctctacctttcctctttctcacaacattgctgttcctcttcaaggatttagaaggatcatgttttggtttataagacaactgtgttttcttaggtccttcttctctccagggattattgtaggaggtaaggcactttctgtggaagaactgagttatcagaaaaagttcagaaacatattctatgattatttagaggaaaactgtaggatagtgatatcttataataacatagcaatttttttaaattaattaatttatttattttgagacagagtctctctctctggcacaggctggagtgtagtgacatgatctcagctccccagaacctctgcctctcaggttctagtgattctcctgcctcagcctcccgagtagctgggattacaggtgcccgccaccacgcctggctaatttttgtatttctagtagagatggggttttgccatgttggccaggctggtcttgaactcctgacctcaggtgatccactcacctcggcctcccaaagtgctgggataacaggcatgagccaccgttttcaggttgtcataactacattctaattgactgcatatttttaaacacaaattaaactagttatgttctccaccctactcagttttggcagtataaaggcctgtttcacagaga

SEQ ID NO: 80501 - DNA, 1375 bp, Homo sapiens
ctgggtgcagtggttacacctgtaattccagcactttgggaggctgaggttggatgattgcttgagcacaggagttcatgactaacctgggcaacatggtgagaccctgtctcttaaaaaaaaagaaaaattagctgggtgtggtagcatgtgcctgtggtcccagctactcaggagattgaggcggaaggatcaattgagcccaggaggtcaaggctgcagtgagttgtgatcatgccacttgcactctagcctgggctacagagcgagaccctgtctcaaaaaaacaattaataataatgtaaaaaagactgcactgagatggctaaattcttaggactgagttctttagggatggactaactggttggtatcattgcttacaaaaatgttttgaccttgttggggagcttgtgttgagaaataaagacgatattttaaatttttatcttttaatttcatttttccacgaacgttttgaagtcctctcatatttggccagtcagagcctcttttttttttttttttttttgagaccgagtcttactcccatcacccaggctggagtgcagtggtgcagtcttggctcactgcaacctctgcctcccaggttcaagcgattctgctggctcagcctcccaggtagctgggattacaggtgtgcgccaccatgcctggctaatttttgtatttttagtagagacagggttttgccatgttggccaggctggtccggaactcctgacttcaggtgatctgtccacctcagcctcccaaagtgctgggattacaggcgcgagccactatgcccagcccagagcctcttttgagtgtttgagatgaccttagtggccattgatagttttattttctattatgatgagatgtttcatattcatctcattttctaatcccagacctggaactagccttttttttttttttttttttttgtaagttcttttcagtggaaaatgatgcgtagagaccaaaacctgagtatggaaagtgctcattgccactgggttggtcatcattactaggccttttaagtgaagtgagctaggaaatacctattttttaaagtagtaaaatgaatttatattagtacttaaaattgaaggctaaaagattatactttaatgttactgatttttacatctatagtgtttttcttctacaccaagaatatcatgttctccaaatcagtaaagttactcatttgctttatcccacaacacacacacacacacacaccctcagaataacaatactaatgctaactgcaataaaatggtcattaaaacagcttaaatttttttgcagttcttttggtccttagagtatatcctactatgtatagtttggttactgg

SEQ ID NO: 80502 - DNA, 1083 bp, Homo sapiens
aaccaggagcactaactgttacgtagcaaagcagggtggaaaatgtttgttaacgcttaagtgttgcctgctcttagttaataacatgaatgttgttgagatctttgaatgttaaattattttaattttctaattttctaaggtagttgagaatttgaagcaagatagtctgaaccgcatagtgatagtggacactaaagaatcaagatggatgaaatgtaggatttggagactgacgagaagggatgggatggttgaaagaaacattaacaagtagtaaaaaaagaaaaataggaagtcctttgacagtagtgtcttagcttatgataataaagtgatacttttcttacaatgaacattatacagaatgcttgcatttgtaggtatataaaaatgctacttatccttctgccctgagtttctgctactactaaactttgaacctcttttggcaataagacaggtttcattttacttctgcaagtattcagataccatatgttaatgttttactctgggtacaataaagtttagaattattactggtcacacacaattaagacatgcaccgagggatatgatttgttgatgttgttgggagttacaacagaaaggagttccctgtggatattttctttctgtaagatggaattctatcaagaagtgtgaagtattctatcagaatgtgaggaatagtctatcaagaagtgagagctattccattaagacgtgagaaatttgaagagacttgggaatgtagaagatattagataggatcattaaacctatttcaaaatggaatccagtgactctggccatactaaaccaaaattaagcaaatataattggctgggagtcaggtccctggggagaagtataagccagtttttatacaaagtcagctaaggagtgagtgtttgataacccttttattgtaacaaaaagtgggtaaagaaaatgatgatagatcttttagaaaataatctcctgttccaagcaaaggattgttctccaccaccaccaacaaaatttttgttactgaaaaaaaagataagaagaatgtgtatgcaattgttcatatat

SEQ ID NO: 80503 - DNA, 1102 bp, Homo sapiens
aactgataaacataaaaagatacctcttaagaatcattttaattttctgcctcttttatgttcaacagagaatttcactttgaatgcagtaacttaaagtatttataaatctgattctagggtttgaaataaaacttttattagatactcatgtcatttaacaaggcttgtttatctcaggtagaaggtttttttttcccctaatgttcttctaaatggctcaaagtttggtttcctacttgaaagtaaatcttatttattagacatttgtagtgagatgactatatttatgtgtcacattcaaagaacaacagttaataatttttggacttgttagtaatatattttctgacaaataatagaagagagatttgcttaactttgttctttttctttatttttgtaggagccagcattcgaacgttcactccattttattttctggtggagccggtggatacactctcagttagaggctcttctgttatattaaactgttcagcatattctgagccttctccaaaaattgaatggaaaaaagatggaacttttttaaacttagtatcagatgatcgacgccagcttctcccggatggatctttatttatcagcaatgtggtgcattccaaacacaataaacctgatgaaggttattatcagtgtgtggccactgttgagagtcttggaactattatcagtagaacagcgaagctcatagtagcaggtaagttttaagtgatttttttttttgcattttcaaatatttataacatacatcttgataaaagcactgttctcttggagttttcttttaattagtagcaacaaatatactcatttaacagatatcaattgtgcatatactctgcgtatgggaccttgctgtagggcttgctcagtgccgtagagaataaactgtagcgtgtttccacttgtctgatggcttaatattgctatcagaagtactgagcagttcttttctccttttaaacttggaagtggcagaggaagtggtataggaaaattaaatcactttgacggccaacttctatcttacccagcataaccatttagtatggttttgtaaaacttgcagtaaagt

SEQ ID NO: 80504 - DNA, 2892 bp, Homo sapiens
atatgtgtatgtgtcttgagacacggtcttgctctgtaacccgggctagagtgcagtggtgcgatcttggttcgctgcagccttgatctcctgggctcaagtgttcctcctacctcagcctacgagtagctgggacaaacggtacacaccaccacatctggctaatttttttgtattttttttagagatggattttgccatattgcccaagttggccttgaactcctgggctcaagtgattctcctaccttggcctcccaaagtgctgggcttataggtatgggccacagtggccagcgtgagatgtatattattagatcttgtcacacctttgctcaaaactccctaatggttttccatgtcattcagagttaaagttctgggctgtaaagatttataatcttaataccacttccttcctttctctcccctatcccatctcctactcttttctccctcactcgaagattgtgatcactttatgtttctagaacaatccagatatgctcttggccattttctctttctggaatcctctttcctcagatacctgcctgggtcactgtcttacctctctgctcaaatatcgctttatcagtgaagccttccttgaacactctgtttaaaacaacaatctttgatttccacccccagtgttttctccttctaccttcattttacttcagaacatattaccatctgacatgttctatcttacttgtctctctccctcattagtatgtaagctcaaccagagcagggaatttttgtctgctgccaaaaacactttctggcacatagaagccagtaatattggctatgaatttgtttaattgattctatcaaaattcaattaaatatacctaagtaattcaagttgaattaaaaaaaagaactattgccatataccaatattattcagtctgcttgctcacttgcttttacatgacagaggtaatacttctcaacacctagggtagcatttaagcaaatcctcaaaatctgaatccaagaaaacaagatttgtagtgtcaaaaggtgagatcactactcaacatctgaaacgaaaacataatgtggaatgttttgcttacttaagtaagggagagttgtgcttgtcaaacatagttttcttgagcaaagctaagtccttatctcctatagagtttttcagaagacattgttttgggttgtactggttaagagacagaggtggattaatgtcagtcatagaaatatgttttgtggttgattacggaggtgggagcaagttaatgtcagccttaaaagtcagtgactccaccattagttggctgacttttaaagcctgggcttatcactgattggctttcaaagccacattcacccttgtgagttgtcactaatcgattaggcaatgtttccttgttaccatggctacaagactgtcattaattggttagacaagtttaaagctagtcctggaggttgttatcatggctgtagaacatcttttccaaagcatatgggcacaagagtcacatctcttctgcctgagacctttttgtcaaaactcaatattaagttaatattaccttattgaggagagaactctgtcttctgcccacaagagtgtggccttttcatgtattcacaagaggacaactctataaagtgaacacacattaattctaatgtctgaataagaaatacaaaaatatagtggtagctagattgttgctcagttacaaaatcaagggactgacagactgagcaagttaaagagacgaaactcagaaagcttttcagaaataacacacagatacagggaaggaaaggaaacctcttatccctgtgagtaaggagaatgccatgggtcctgagcttgctcagtctccactgtttgtacacatggcttttatcttatctttcaatgtgaatgggattcatgtcaaatatctctcgattgattgacaagtacgtaccctgaaggcaggagcaataagttatacatccttaagacccctaaagagcctagcacaatgctttgcacatagaatttatttgagaagtgtttgctaatttgaatggaaatttttgtatcacttttgcttaaaatattttgtcatataaagccacacagactgaataagaaccagtcattcctcaagattaaagcagtaaagtgctttgtcgtgtgtgtatgtggtaatgatggggtcttgctatattgcctacgctggtctcaaactcctgggctcaagcagtcctccctcctcggcctcccaaagtatcgggattatgggtgtgagccaccatgtccagcctgttttgtcctttaattattgtctttgttaattttttttttttttagatcctgaggtgatatcagacttggtatttttgaaacagccttctcccttagtcagagtcattggtcaggatgtagtgttgccatgtgttgcttcaggacttcctactccaaccattaaatggatgaaaaatgaggaggcacttgacacagaaaggtaagtgttgtctgcctaaaagccttcttcagccttagcttgagactttgtcatatcccatttgggactattgactaatttaaaaagattatcaactttatttaaacacatcataatgctcatatgtcatccttcaaatatgttcatatgatatatatgatgaggatatttaaagaaaaagatactttcaaaatattaagagataattattccctttgttcctgttgaagccgcagtgtactcagcttaagtcttcaggattttcttccctaaattgttgcaagagctttggtcctgagtagcctgagtcttctcacacattctcatatgcatttttttgatagtagtttttccactgcacaatcagtatgagaaactgggctgg

SEQ ID NO: 80505 - DNA, 1139 bp, Homo sapiens
ggggtgggaggaattctggggagtgagccctcatcatgtgcaatctaatgctgtctgcaggtagatagtgttggaattgaattggagaatacccagctggtgtccactgctaggtgtgtgggggggaaactcccacataatttggtcacagaagcgttcttctgtgttgatgattgtggtggtgtgagagtagaaaaaaaatgcagcttgagagggtgtttttgaaactgtgggtgtatgtttagagaaagagagaagagacttttattataaagtattggttcacgtgattatggaggctgagaagtcccatgttctgctgtttctggagacctgagaaagccagcagtatagtttgaaggcctgagagctggagagtcagtggtttaaattctgctgtgagtctgaaggcctgagaaccaggagtgctgagggtaggagaagatcagtgtcccaactggaacaggcagaaaacaatttcagcctttttgtttctcattggactggatgatgccaacacacattgagtgccatctgctgtaactcagtccacagatccaaatgcttttctcttctggaaacaccctcacagagaggcacagaaatagtgagtaaccagatatctaggcatgccatggcccagtcaagttgacacataaaatttactgtcacacatagtatactcgtcttcatctaattacaaatagtttaaaaatctaattacaaaatctaatcactgcattggcaaaacaccatttctccccaaaaccctggagaaatcttcccatgcttatgaggtgtaaattatttgtgaagcattggccctacctgaaatctgggtcaaagggaactacagatctagagcatatcacaccagtgtgttaaagtgaaaaaataatgtaagcaagttatattggcgaaagtcgttattgtcagccccttattctgggattgtaatggttgatttccaatgattacgtaatataattatactttaaatgtaaataatgctttatattattgagggtctaaagggatttaatagataaagtgcacgttacaatacctgacttacatctgatactgaacaaaatttagttctctcttgtaaaaccctatgtagaggtattgttattagt

SEQ ID NO: 80506 - DNA, 1087 bp, Homo sapiens
ggattcaaatatattcttgctttgttagttgagtcagtaccaatagtacacttgtgattagactgtcaaacaaaatccctgaagggatttcacactgttaaatgcttggtttttatttgtttttatttgttgggtttttttttttaaacggcatagatgtaaatttgtgaattacagaaaagaagcagttttaacatgaaatggacaaaattgatttctttctctgcttacagagcttaataagaatttcagtccataagcctttcaaatgaaacaatagaaactccaacaattcagagctaatgtaaatgaaaacggttatcttccaaatcacagcataataaagtaaccttgaatcattggtgttggccctatattgttatttatttgaattaaatggcaattttcagcattatgtaacagtgatggaattaagtgatgtttctagtaaaagaattttgcaagtataatatattttagtattaaattccacttgtacatttagcaattaaaattattcctgaaatgatgatggcatttgaagggatagggagctgtcaaagaggatttgaagcttaattatctctttggtaacaaaatgcataatcttccattacaacacttattttcttatggtaattgactcatttgttctctggttatcaatttaacttcccaaccacaaacatctgctcttacaattgtgtttaattggtgtgaatactatctacagagtagttaaaatccagaaaacattttaagggcattattttataattcatgaaagggaaactaatgattaattgaacattgcttatgatgattttttctaatagtctgtgaaagtctgtttactaaaaatgcataccgaaattatctgctcccccctcctttttttttttttttttttttggaagaggcttttgctgtgttttccagagtaattatttactctgccttagggggagcctcagttcttgcagttctttagactcaaggaatatgttaatgtcttggaacatggtaccttagtagttaagagtataggctttgaaggtagaaaaaaattagtatgctatcatttata

SEQ ID NO: 80507 - DNA, 1031 bp, Homo sapiens
agttggtattgcgtgccagatctttttccaggcaaaggtgtagtttgcaaacagtgagagtatgactttccatgcgttaagttcttcatcgtgaatgacagtatgtactcttctattcagttaaattggtaccttgccaatgctttagtatgaaattgagttaacaagtacttggataatatttaataattggatcataaaaactttacttgtttttttcctctccaaaaagcatatttttgagattttgatctggtatttatcaattaaattatgtaattttatttatgcttttcttcttcagaaggaacataatcttcaagttttgggtctggtgaaatcagatgaagggttctatcagtgcattgctgaaaatgatgttggaaatgcacaagctggagcccaactgataatccttgaacatggtaagaagggctgaaatagtcagatgatagaggctgtgtgcttgatgaacaagcacccatccgtccaaataactcatgattgataacccattagtaaaggccaatatgtggcatagctaagagaaaaagaatagcagtctaaatcatttctattacataaaattacctagaagcacaattttggataatgttgaaaagaaatttttactaagaaaaggaaaactgaatattatagtcttaataaattaatttttaaaagaatttagtcatcttaatctcacaaatatatttctgtcctataaagaaaaacttcttttttttccaattctatacacttttattaatacacttacaaaaaataacattcaaacactgagaaaactaaataactttggaagcagagctcattgttttctgcttacatataagtgacaattctgggctgttggcacaaaatagtcaacattcataaaaccctgactactatatatcaaacataagttaaaatcataggcagtagtttatcaaatccacgtttcttagaaaaacttagtatttattttgcattgaaatttttagtttttccagaatacaattaatttacct

SEQ ID NO: 80508 - DNA, 2125 bp, Homo sapiens
gtaacaaaggtttgactagtaagaagtaaagagaactctagacaatataagaatggcaactatcaggagcaactacaacccctaggtctgagatagagccctcaggaagaggcccctctttttacggatgagatccagaccctgttggagagggtgtaaccatggtttactggatggcagagaagttgatgtggtgttttgctctctaaacttgctcaaaatctcctttcttgagggttggggaaagctgcttacagagaggtatctcactggaggcattctgctacaaaaccacccagtggatcaggtgtaaggggaagctgctggctataggaggctgccagggtagtacactagaaccaggaaggaaactcctttcttctgtactgtatctccattgccttctattgataaagtttaatacatatgccagctggcaaaggaaaagtatataaaggacatggctctgtttttgcagcataggcaatgaaatcagaatttggagctgagaggcagtaaattgataactggtacacacttcaaatcctaccacctgggtacactgtgtatggttttataatttcctgttttgttgcaacagcatgctgtgtatatctttctgtgtcaacagttgatctgcatcaatattgtttcttattaaataatatgtatatatatatatatacactgttttatataacagattttatattggttaacatttagattgtcacctgttttttcctattacaaacaaggatgtattgaactttttatgtgattattttcttatactaaattactagaagttgaattattggataacagttctgtgttaaattgataagggtacctgttgggtgcattattcatttgttttagcaactgaaacatttttcattttgagcatttctcaaaaatacatgaaaaagatgccactttagacatctgatcttttattcaagtcaaatacaatcaggtattggtgtgcctccaggaagaatttctctgatgattgtagtttggccagggaagctaattggcaaagatggcacctactctggcttttcactaacatggcatatatgtaggatttttgtgtgctattttttgaaaaatatacttgagagtgctgttacagaaaagcataaaatattagaactgcttttttcttcttaggtttgtatataccctcccctgtttattggaaatgattttagtagaagcatgccatttttccatcttggtgaaatgcctgagtacaattactaaataaggcactagcagaattagtgaggtagataggcttatttctttttacttgtggcagtgacttttcttagtaaacctcgtagctatttggggtatatttatttacatggaactaagcaaaggcacttcattatatttgtgtttgagattactgttacaaatctaactctaacagtagaaatggttaagtatgccaggaagttcctaaactaatcctaattgggctttcctctgaaaatatttggatagtgttaaaattgtagtcatagtgtatttgcttctctctttttgagaatagcgttttatgagctgatgaaattttttagtgacgttattgggcatgtattaaagatgcatagattataagaaggagagtaagtgtcatgttattaattgtgttttctattttgctgttttaatttgcaagataaatatttatacaggaaagctaaaagaaggaatacagtaacttactagatctgagctcttcttttttagagtttacaatataataagggatgtaagagatatataaaacttgaataccagtccagatgcataaataaagcagcatacagttcagaagagaggaattctgtctgtgtgatcagggaattttttcatgtaaggtgtcccctttgtaataggccttgaattataagatttctagatgttaattcaaaggaagacctggatcaatatggaaataaaatagaagacctgttcctgtagtaaggtagcctttaacagcagaataggatcagagtgcatgattataaataataaaaacaatgccatgtgtaatgagtatgatgataaagtcaggtttagaggaagacagagtgcaagctgg

SEQ ID NO: 80509 - DNA, 1041 bp, Homo sapiens
tactggccataggccagctggctagtgctgggctgcaagaagctgcgttggagcgtccacagtaggcctgtggtatacttaacatgactattaggttaattatcagctttaaacattaaatgaaacttaataattatagttaaaatatataaaacatttttgcatatcactggaaaacagaatttctgagcaaattgtgaagtagaatttgacttttgttcctagcatgctttcttaatcaaaacatttaaaatacaacttttaatatttaacttcacttttatgcattttcggtaacagcagctcttgattttagaagatcttgtatcttttaaaaatatttaactgaacataaaacaggattatttttatttgctgccatttcagattaacattgcctgtcattttatgctaaaatcctttgttttttataattatctattaaattacattttcaaaaaaaagcattggcaggtacattgttattattatttaaattattactggtcaattaagagtagtaggaattaaggtaaaatgtctgtatcttttgtccattaactttttattggcctttcttcctgtcagttgaatttaaaaatagattgcgaaattatcatgtgagactggaatgtgaaaacatagaaatacactttctttttctgtcctttcataccacgtctgataattgccaaattttagttctagtaaaggaagaaggattcatgaaaagggagtaacatcaacttgtttttagtaaaggaaacttacactttaccagctccttaaatgactgctgggatgttatggccatagtagataagaatacacactgagcatcccccaccctttttttgacagaaatgtttgtaaaaaattccaaatagtatctgaggttagcattgaataatagaagttctggaataagtgactaatggcctggcatgattaaaagttggctagatagcaggaaattgttactcattagtggaatattttaatttcaaagcactaggatgtacagtagttggtgttgatgtt

SEQ ID NO: 80510 - DNA, 2127 bp, Homo sapiens
agttatctagcagataccctattatataggctattaggggagataatgtaaaattatagagtctagctagaatagaccttagagagctgagtatttaatttagctgagctggaaactcagttaagtgacttgccataaaataactagttggcatcagagtcaggactgatatcttggttttcaatttcaaaattcactgtatcactttagcaagtttaatgttttcaagacaaaaatttatgttcttttttccgcttatgttctcttaatttcaagttcagtcttttaagtcagtataaataagtgttattacttactgacaaggttggtcagatgtatcattttgctaggatgaccatacatctagtgtgcctaagacaatcccccagcataattaccaaaaagtgtctcctttcacttttagtagtatctggttgtggacaacatattccatggtcaccccaattgttgctaatttattgaatctgaaagattctacacagtgccagggtaaagattttggattatgaatctaaataattataatgcaagctgtgctgaatgccaaagcgctactctaattctaaactggaagaaataatttctgctaggtttgacaggcaagggaggctgattgaagaacgtggcatgtgagccgagcctagaaggatggatgggattatagattagtcaggttacatgaagatgggaagaggtgtatatgcaagaaggctcaaagtgcatttggagaatagccagcatctcggtttaccagtgttgagagaagtatgagtacaggaatatacatctgggaaggtgtgcagagaccagattatttaataccaagtcaaagggttggaatttgttgagcagttggaggactccagcagttttcagttatgtagcactttaagaggattaatttattagagatgtgttgagtggctttagagaggaaaatatggaatctgtcctaccatttagaaggattttgtaccaaatcagatgtgatgtttaaggccctggactagtttatggcaatggagagagagaggctttctttttattccctaatggctttgtattagttcatttgcattgctataaaagaatacctaaggatgggtaatttataaagaaaagagatttatttggctcctggttctgcaggctgtacaagaagcatggcaccatcatctgcttccaatgagggcttcaggaagatttttaatcatggcagaaggcaaaatgggagcaggcatgtcacatggtgagagaggaggaggttccaggctcttttaaacaaccagttctcaaggaaactaaccgagtaagaacctactcagtgcaagaaagacatcaggccattcctgagggttctgtccccatgacacaaacactctccactaggctgaccctccaaattggagatcaaatttcaacatgaggtttggaggggacaaacatccagacgatatcaggcttatacatggtacatatttattacatgttggatagatgtttctacaaaagaagatggcacaagatttatgatttattggatacttaggataagagagaagaaaacattagagttttacactaattaaaagtagagggattttctgtataagtgtaaggatatgatctttgttctacttagcttaaggaggtttgtctccattaattttgagttatgctataatgaatgctgtttttagatagctttgaagaggtagacatataattaaagtatgaataatttgtttgatgttgaacatcaatttcatctttgccaaaggtcatggactttaagaccagaatttctgaggtccacataataatttaatgactcaatgataatttttggtgttaaataaaagtcctgcagatgacctttctggacacaaagttgaatttagaattatcaaagagcaagcttgaatttgaatttgatgctattattttgttataaagaaagaatctattatgcagtgctaaaacaccagaaggaagatagtatgtctgaatatcttttaattggtagttatatttaaaagatgctaaattatacaataatgtcatagttggcaaaatatcatttgagtctgaaagatatcactgaca

SEQ ID NO: 80511 - DNA, 1051 bp, Homo sapiens
aaatatctattggattaaacttaattgtgttcttaaaattcattaaacgcttacctaatttttgtctaccttatctgtcagtttctaagaaaatatgtttctaagaggccaggcaacggtggctcacacctgtaatcccagcactttgggaggccaaagtgggcagatcgcttgagctcgggagtttgagaccagcctgggcagtatgttgaaacctcatctctataaaaatacaaaaattagccgggtgtggtagcacgttcctgtagtcccagctgctggggaggctgaggcaggggaatcacttgaacctgggaggtggagtttgcagtgagctgagattgtgccactgcattccagcctgggtgacagagcgagactccatctcaaaaagaaaaaaatatacttctaagaaagtatgattggagatttgttcaatgttttatttatattattgctttatatattcagaagctatgttgttaatgcattaggaattatgacttaccttcctggtcaattactccatttcatcaaatctaaggtaccatgcattatgagatacaacctgattgcagagatgttaaaatatggaaaaggatcaagaaaacatggtatttgttttatcagcaggaaacatttgtgttgtcctagttaattcttgttgctttcaactttgttttgtctgatactgacattattatacctacctttttttttttttttttgagacagaatctcattctgtcacccaggctggagtgcagtggcgcaatttcggctcactgcagcctcttcctcctgtgttcaagatattctcctgcctcagcctcccaagtagctaggattacaggcacccactaccatgcctggctaatttttgtatttttagtagacacagggttttacaatgttggtcaggctggtctcgaactcctgacctcaagtgacccacctgcctcagcctccctaagtactgggattacaggtgtgaacccccatgcctgtccatgcttttataatagcattgactgaaatatattttctattc

SEQ ID NO: 80512 - DNA, 1131 bp, Homo sapiens
gtaggtggaatttgtgcagcaggctactggagagaagagaaatatgcagagaagaagcccaaggaagctatatagggttccccttgagtcttttgggtctcacattacatttagtctccttcagtttgtgatagttcttcagtctttccttctctgccatacccttgacacttttgaaaagtattggtcaggtattttgtccagtgttctcagtatggatttgtctgatacttttttgtgattacattgaggttatggattttttttggaggaataccacagaagtgatgtacccttttcaatacattcgtatcggggtacatgatatcagcatgtcctgttatttggtaacgttaacactgatcatgtggttaaggtggtttttgccagtcttcttgcagtcatctctgagcccagagcctctctgatttatttagtttctcctgagtgtaaatctcctattgccaagggtgagggatttggagatttaaagctcttcttacaggagctttcaaataattcctccatcccccatatcatcctttcctcctgaagtgctgctgattcctgaaggtcagttggcttgaggctcacctgtctgtccctttggaggtacttagattgactctttcccgtgaaataatttacttttcttctatccaccttcttctttcatatattatagattaggattacaatccaaaatatctctcagttttatcagaaatggagtttgtgttcctatttcttgtcctgtttgttgtttgggtgtatttatgaagtggtggacccagaaatgtattcgaccttccatgctaaaactgaagctaaaaatagctttttcagaagacagtatttggcatcatttctcaggcattcaaatacaaacttttgactcagcatttccacttctagcaatttgtcttacagaaatatttacacatggacccaaagataacatgtataggaaagtttatagaagcattgctgatagtagcaaaaaaaaagtaatggaaacagcccaaaaaaaaaggaaaaacaagggaatgattaaataaatggtggtatatctatattgtagaatactattcagcaattagaaataatgaggtttgtctttatgtactgtta

SEQ ID NO: 80513 - DNA, 1049 bp, Homo sapiens
caagacaggcacatcacttgaggtcaggagttcgagaccagcctgaccaacatggtgaaaccccgtctctgctaaaaatacaaaaattagccgggtatggtggcgcatgcctataatcccagctacccgggaggctgacgcaggagaattgcttgaacccaggaggcagaggctgcagtgagccgagatcacaccactgcactccagcctgggcaacagactccatctcaaaaacaaacaaacaaaaaagccagatcaggagaaacgtcatcattctttaggaacttccacggaacaattcaatttctgctacttacaaccctgtgcaggcccttaggtttcagcgactgggccagtgtgaagctgctgccaagcatttgagcagcaggtcagagcggacagcaatgctcacatttgaaaatgtaataccttttctcaaatagatttcccagtggcctttggcttgattcagatttacatggtgtttacatactgttctaaacatagtagcagtatgaacaaaggtataaaagctgtaaagttccttcttgttaagtaaccaagcaaatcaagagcacatcctgtttaggaaataagcctagaaagcgaggatgggaccagtctggaggactttgaacactgtcctgagatgtttagacttattctggaggctgtttggtacagttacaatgggtgaactttatggtatgtaaatcatacttcagtaaagctgttgaaagaaagactggatagttgaaactattaaacatccttttttttcctagtgtaaaacagcaatagttacacagtcctaggacatttcttttgctcaaaacacctgagcttaaaatctgtctgaagtcttcataaaattaaagtgtccagaaattatcaaagacttttataaatgccaaccagtcatcaagggcccaaagcaaacatgaaaaatacagatctgtaggccacatgtagtaaaaacctttgtttcttagagtcaggctggttgctttcccttctgccaccagagtagttatctcattgcgctctta

SEQ ID NO: 80514 - DNA, 1112 bp, Homo sapiens
atgttttcaatgagacacacttatttaaattttatgatagattgtgggttggagtaagcaggaatgattagtaaattaatttgtagttggaagagatacagaagttgagttggcaggggcaggtgggcatgactagtgtatgtaaaggaagaggaagtgcaaggtaaggccatctgtgtgtatgctgtgagaaggatgcaaaggcaagaaagctggccaaactggcccagagcttttggcagaaattagtaagagattagaataaagtggacgtttggagccagatgctggaatgccagtgagaatttggacataatcagataagaagggaccatttttgactgttaagaaagttgtacactgtgattttattaaacagtactttgggaacactacccaagattaaaggagagaaaaaatagagtcagggagacaaaattgggtagtaattatgttagcctagatacgtgctagtcgtcggcttggatgaagatgaaagcagcgacttgaagtggataggacaaatttgggaaatatttaaaaggaagattttgggagaccataatagttttttgttgcttcattactttatgatttctgaatagaggcaatgaaggagaagttaatttttttaagtcgtaagactatatcctggctaattgttacataaacaaaactttcttattaatcttatcggcttaaattttctcatctaaaaaacaaaagtaatatatttacttcacagacgtgtggtaagaattcaatgtgagaatgtatgccactacctgcatttacaaattcacccacttcctgcatttgaaaattcagccaccaggtggcaccatatgccttggtcatgagctgtaattcttatgggtacctgagttgccagagatttcagagggtccttcctctctgccttttcagctatgaaaatttcatctttcttaaaaaagcagtacttttctatattaaccattaagtgggaagtggaaagtaaggtatttctgctattcatagcactttaaagttggattgaagccttagagatctgttagtctagtcaaggggttagcaaaccatggaccctgtgccaaattggagcaattatt

SEQ ID NO: 80515 - DNA, 1411 bp, Homo sapiens
tgcacatgcaaggtaagtcatgacaaaaatgaaggaaatgcaagggtcctatcctgaggctgtgaaccttctgaaactgcatgaaaataaatatttgtgtctgtacatattcacatttcccttggaaaggatctgtagttttcattgtcatttcagagctcatacatcagattgttgagaaccactgcgagggtcattgtcaaatttagagatgaaagaaaaggggtgaagaagagtggatttattgagtgcccaccatgtgtcagccactgtgttaggcagtcaggatgtaaagatgagtaagacttgacttctgtccacaaggagcttacggtctggtaccatagacaacagtgtgatgtgttatcaccttaaggaaaataggcagcataaccatttattcaaggagtttggctaaaagaaaatagttgtaagaatgtaggtagaaaaggcaacaggttctggtgagggtattttagggatggagaagagactataacatgttttggcaaaagagaagcagtttctgaagagagatttggatttcatctggaggtgttcagcttgtgtgggggaggcataaatgttggaaccagcccttggaaaatattttacatatttagtttcacaaaccaacttaacattttttccatttattatgccactgtacagctgaaatgaaagaattcattagcaccttttttaggatcatatttgcctacacttggccaatgaatatattgaaaatgatttcaagagaatttagggactgttttgtttttcttctcctttaataagttagaggaaagttttccatagcagcagaagtgtgacaaatcccacctgtcaggctgcacaaaatatgcccttaactgaagtgaataacgtgattcataactaaagcaaacaactgttagagtaaccatattcagatttctctactttgatagcaaaattaatcttaagctgtggtgctgttattcaggaaagccagtgtgttttacattttgttagctttttttcccttcccagtttttaaatctaatgaatgtctattacagaaacactagtgccagagaaattgttttcaaatatagaatgtctaccaaagtgtaggcatagacagccacacaggatttgtgtataaattggaactggaacctgtcagtcagacaaaaataatacagtaaaagggtaggtgtgtgagccattgtaggagatagagccagctagacacttaagcagtcagccagtgatccagtcttccagtcacatacatcctatcgtgggtattgtagtaatctccttacgggtcttcttgagcccacgttttagaatcagcaagtactcgactcctgggtccaccgctagctaactttcccatcacttgggaaagattgttaacttcata

SEQ ID NO: 80516 - DNA, 1018 bp, Homo sapiens
gttaattagttgtcccctttttaaagagttttatatggaaattgtctaatttcagctcttctgcactggacacgggaaagaatctttatacctaataatagttagttccctaatccatgtgcttctggccttcttatactttccttctgaaaacttttctgagacttttatccaacatcatctttctggcaaaacaaccaggagatcaggggtccagagtgtactactcgaatatataatcttcccatttgatcattgagggttttagaatttaaaggtatttttgagtgattattaaataactttgtaaaactctgagtaccttgctgcctctatgttttttctctttaaacagtaaaatcaggataaaaatatttaaaacaggaccaagcttttgatatattcagccttttttctataattctgtcttgtgcagagtattatgattcactggcagccacctgctccagccacacaaaatgggcagattactggctacaagattcgctaccgaaaggcctcccgaaagagtgatgtcactgagaccttggtaagcgggacacagctgtctcagctgattgaaggtaagctaccgtgcacaaaggcaaaaggtacactgtgtctttctcagatattgaattatgctagtctaatgactgctctgaactgtcgacttatacaaacaaatttaaaatggttcagaaaatttttaatggttcaatccacttctgacttgatagagattaatggaaaacactcttaaaggttctgctatttctgagtggtgagatcgagtttgatttttcctttcttgtgttttctgcattctccatgttttcatttttgagtgtatttattgcttttttgtaatcttaaaaatgattaaagaaagttatataagcatagaaattaccccactcagtatagttggtaactgaggtctacaaagtggtttttgtaacaccgaccaccactcgtgtgtacgtggcctgaaacagtatttgtgaatagctgcatc

SEQ ID NO: 80517 - DNA, 1021 bp, Homo sapiens
tgaaataatccttaaggtctttgtaagtggacacgagagggaaaagatgactaagcaaattaaagagagaacaggctatctgggtttgagattctgtttggtttttgctgacttttagacatgcctttctgctaccccctgggctttcctagtctagggatatgcataaccatttcaaatctctgtctattttggcctcctatttctctcctatatgaataatggagttataaattctccacaaactgggcttggcctcagtgtctttttgtcttctgcacagttcactggactttgtacagagagaagggttggatttgaagagttagaaatacagtacatcaaagtttaaatagaccttgagtttgctttctttgccaaccattttaagaaaatgtttttacttcaatcctaacccattagataacaaatgagattgtgttttcccttaggatatttgcatttcaccaggcttccttacattttatactaagagaattctagtattttaggaagagttgagtaaatttaaggatgtacttaatttgctcattttcctactagtgtgttaaaagttttcagctatcacatggaaacacaggaaacgtattgtcctgttgcataaacgaacagcttcactttagagctgtaacctcaatagttggcagtatgtttgcagaataaactcatagtgaaaaatattaatctgtaaatcatctattctttgaagaaatagggcttttaaaagttatatttggggctgggagtggtggcttgcacctgtaatcccagtgctttgggaggccatggtgggcggatcacctgaggccaagagttcgagaccagcctggccaacatggcgaaaccccatctctactaaaaatacaaaaattagctggatgtggtggtgcgcacctgtaatcccagctactcggtaggctaaggcacgagaatcacttgaacccaggaggcagaggttgcaatgagcagagattgtgccactgcactccagcctgggtga

SEQ ID NO: 80518 - DNA, 1048 bp, Homo sapiens
ctctttctgtacatcctggtctttatgtcatttttttaggttttgactttgcctcttttgtgaaagaatgaatcatgacttgacttggattacattttactttgtcttttaaaaccggcaacagcgcagtgcccttttgctgtgggtcagatagattcatggttgtgatgcttcccttctcaatgtggggattaagtgccccctggtggaagtatcaggtgacagttcactgtggctctgcccaggagttcctaggagatcacatcggtaagagctaaaacagcctgtcaggcaattcctggttttcaaaactgaattattttaattgtagacccttgagggtacattattcaaatattatgctataatattcatatgatataataggtacttattgatttactgaaggcaaaaggaaaagcaggagtgagatttcttttcccattaattcctttggacaggttacatcatatattacagtacagatgtgaatgcagagatacatgactgggttattgagcctgttgtgggaaacagactgactcaccagatacaagagttaactcttgacacaccatactacttcaaaatccaggcacggaactcaaagggcatgggacccatgtctgaagctgtccaattcagaacacctaaaggtaatgctccccaagctgagggttttgttgtgtgtctctttagtggggctatgctgacactatcacttgagcatatagagtctgtggatagtatatgaagtcttaatgatgagcttgtgagccatgatgtgaagatttatcccagaatgattcctcacctactcattgaccaaatcagtgctccctgggttaccagcctaaacatatcatataaaagaggacactggttccaggctatttggggcagatcaattgcagtgatctaaaagtttttactggtcagatcagatatgattcttttggttcccatatagagaaagagtagtgtgttcttgtgatggatagttcaactcaggcaggctattaacctgaaagacttatttgtggacgtt

SEQ ID NO: 80519 - DNA, 1048 bp, Homo sapiens
ggagaaactgcaaacatactttctgttgtgtgaaagtgcaggaatataaaaatacccataatatatatatgcacagaatataaatgggctcattgttttctcacttgattccatagccagagtgcaattcttagctgcctgacacctctggtatttaaaattctttactcattgatatttttggtgctcagttcatccttggaatttcttgttcatagtttacattcaagagaaacaatgttgggaaatacaggaatataaaccatccagtttgttagcaatgtgtgttctttgacaattaggtacataatccaatgctctggatagtttggcttaaatgtagcctagctgtcaactaagtacacttaaacctgaagagccttgcaggtgctaagccatctccaccagctagactttgtcatagtgaaaagcatatgaggaacaactggactcttaatctatggtgtgtgtcacttgggagaaatgatggcatcagaagtaaggagataaagtaatatgtgtggacaatggaaaaagggccagggactgtgagtaaattctagaatatgcccttttggatatccaggaactcctgttaccttcttttggtaggttttcagtttctggaagcatagcattgttttagtcactggatttattctgttagatgaactgcatacacaaacttcagattttaatgttttcatttcattgaatatatgtatctcctgataatttatggaagtacttgacattagctctaatgttttgcagaaacacctagtttatacatttctagtaaggctttatttgtagaaataactctcatttataagtgttttttgaagcttcatgctctctgcctctttaaagagaagattatactctttcgtgaagattttttatgcttgtaataggagtggttaacatttatggaacatctactatgtgtcagtcagtattaaaaatattttatggtattaaatttccatttaatcctcacaacagctttgtgaagtggataccattattatccctgtgttacaat

SEQ ID NO: 80520 - DNA, 1020 bp, Homo sapiens
aactgatatttgcactttctgaggcctccttctggggtggtcctaggcctgaggtcagcagcctcacttagtatgttccctgatgatggattaggagacagtgtctttttgagcaactaggaggaagactgtttttttcagcctctggaatgtttaggtgactgagcaggaactgagaacctgatttgaacttccatttaccttcctgctcctgcttagcttagggtaactttatattcagaaggacaactttgtaatttgagaaaagaatctaaacaatactaacacctgctaggtcaggtattagtatccacatagccaggtcccttggaagagtatagttctttaatgtagacattaacctaattagtccccttggttgcttttctaggagaagctacttttgctgtaagtcctctgagcagtcctttgggaactgtttcctaagctagagaaatagcacctactgtcccagcttctaaacagcagtgacagtcagctcacagccgtgagacaagcgtgtcagtctttcagatgcctcattacatagaaagctataccttagtttgctttccacacatagactatagattcccatgatttatgtgctactttattttctcatggacagaatagactaaaaattgtgttttttgtttaaaacactccctagctatgaagtggactgtcacgccaaatgtgtggggtcattattgacatgatttcttctcctttagcctcagggtctggagggaaaggaagccggctgccagacctaggatccgactacaaacctccaatgagcggtaaagcctttcccatggcgttttttgcttactatggacatgaagcacttttgcttaaatttttgaaatgtcctttatagcttgtgtgtggtgggttgtagcatattagcctgttttcttttattgctagatttaagtgtttgccaaatcactccaagcccatgtgtcgtaggacccataaatcaaattgtttccccagttatccaacttaaga

SEQ ID NO: 80521 - DNA, 1008 bp, Homo sapiens
gatggaatctttcttactcagatctgaactcaaatgccatcttctcagagaagctttttctaaccattcaatctaaattggctacccagacactctgtatcataacccctcattttctttttttcacaccgttagttattaactaataatttcatatttatcgtttatcccattcccccgccaaacgttcacatctttgttgttcaccattgcaccttagtacctagaacaatgactgacacatagtaaccattcagtatttgtcaaattaagccatacttcagacctactgtttcttgaagttgaacaagagaattaactctgcgtaggctgtgtatttataaaaacagactttacttttcatgcaatttttataatctcagatatctgcctgttggggaaaacttctgctttgtatgaatgaacatttttaaatggttttgaaaaccagaaaactaaatgacttataagtggtgctttacaaaatgagtttatatatcacatgagacaccagagagccaagactctttatctgtctaagtatatctcaacctttgaaagctcttgaatgttcagtacaatttgagaagctttaattaagtactatctttgagcaggctctgtcctgagcactgttcataggacagactcttagctgtctaggagctcatcatctagagaagagagccatgttcacgcggcacttttatataagtcagagcaatgagtgttatcaagaagttcacgtgagatattaatggttctgtagcttgatagtatgcatgttttaaattctctaaccctaacacatgtaccatttctctctctgcaggcagtaacagccctcatgggagccccacctctcctctggacagtaatatgctgctggtcataattgtttctgttggcgtcatcaccatcgtggtggttgtgattatcgctgtcttttgtacccgtcgtaccacctctcaccagaaaaagtaagaagccccagatgcaccccttaga

SEQ ID NO: 80522 - DNA, 1749 bp, Homo sapiens
catctcaaaaaaaaaaaacaaaaaaagtttttgcctccctcctttataagccacagactttccctctactccattgttatgtttctacattgctctaattagaaacttgtggatgaaccttctggttatgagattatataatgaaaaatgctatcttaatcttttaacagtcaaaaaaagtagtcacaaggcaggattcaaacataaagaccctggtaagtatctctaaatatgtgtggacaaaatagagatacatttactctccccaggagcaaacttgttgttgttgttgttgttgttgggggcaggaggtatgtttttagtttttgctttttttgcttgaaacatctctcagaaaggaagttttaatcactcaagccttttgacaaatacgttcaaatgagttactttttaaaagctcctctgaacttcgtgcctaggaaacgagctgcctgcaaatcagtgaatggctctcataagtacaaagggaattccaaagatgtgaaacctccagatctctggatccatcatgagagactggagctgaaacccattgataagtctccagacccaaaccccatcatgactgatactccaattcctcgcaactctcaagatatcacaccagttgacaactccatggacagcaatatccatcaaaggcgaaattcatacagaggtaccattttaagtgcaggttttttctcaaatgttaggaaactattttcatttaaatctttttttttttccctgagtttgccttcatttggcaattcctatatgagatcagatttagagaaatgtgtatgataagatttgggaacatatgatgaagaatacctagcttcttatgggagagagattctgtagccatacgagacaatcttgcagatcttttaggtctctcatcaggcttcagcagcgtgatattcaaggatttgaggctagctagcccatgtctgtgcatttcattctgtgtcttcagctggcttccagcttgcattgtggtattcagaacattcttggtctggaggctcttatagacaccctgtgaagtatggtgggcagcattgtgacatccacattgattcagcaggaactcttgtaatgctctaatgatcattttcctctttatttcacttcttacagaaatgtcttgtccccattatgctgtttgtgaattctgaatcccctactagaaatgtttcactgttgaggctgctcagtggcatagggcacatgctggtaactaacctccacgtttaacatctagggcatgagtcagaggacagcatgtctacactggctggaaggcgaggaatgagaccaaaaatgatgatgccctttgactcccagccaccccagcgtaagtagaagcatctcttttcctcagtgctaccaatctgttcagtcatgtaggggaacaactatgaatgatctttttgacttcacttgattctaacacaaagataatctaccaaagctttgacaccttgaaggaggaagtaccaaacacttgccatattttgcaacaaacattattcttgaggctagcgtcgttatgtttatggtaaataagctgaaaagccaatgtctccagattcccaggaataggggagtaactagtctccctaaaagtgcatcatatctctatgggagagatgggaaagcttccctcctccagactagagctaaggatggtctgatgttacaagttttcattacgctgcctgacaccagtgctgatga

SEQ ID NO: 80523 - DNA, 1051 bp, Homo sapiens
ttcctgctgtagaatccgttcgaaatacccccagcactgacaccatgccagcctcttcgtctcaaacatgctgcactgatcaccaggaccctgaaggtgctaccagctcctcttacttggccagctcccaagaggaagattcaggccagagtcttcccactgcccatgttcgcccttcccacccattgaagagcttcgccgtgccagcaatcccgcctccaggacctcccacctatgatcctgcattgccaagcacaccattactgtcccagcaaggtgagtgaggatggcagcacacctggagggagcacacctggagtgaccctttggctcaagcttgggacaaagccaccccttctttgaagtatagcaaagcaaatatcctccaagcctatcttagcaattctgttagcgtagcagtgtgccattgccccgcccaggaagtttatggcctccccttttctgggaacacttacaaaccggagaataatttgctgggaaccaagggctgaccttttgaattgtgttttatgtgcagcacctttggtggtaagtccaatggcatgggaatggatagcagatctagtctgcccagacccctggaatcacctcacttcgtaaggtccctgcaaactagagaagggatcagggaggccaaggcttggactcatagggtggtgaaagcagaagtaacctcagaatagggaaaggaatcctgtgaagggaaagtcatttacccaaatccacacagctcagtaacagtcccctgacctcaaaggcatgcttgctttctgctcttccaaattgttacctattcatttgctttagaataagccagtggttttcaaaatttctggtctcagtatccctttatagcttaaaagctattgagcacctaaaagagcttttcttcatatgggttatatctatcaatatttaccatattaaaattaaaactaagaaatttttaaagtattttattcatttaaaaaagcaagtatctatcatgttaagataagtagcatatttttatgaaaaacaactattttcc

SEQ ID NO: 80524 - DNA, 3230 bp, Homo sapiens
ttgggagaaaggcattgtgcattatcaggaaacgggatcctagtgaccttgggtctatcctgctactttccactcttctgagccaccctgcgtgttagtagccagttttctggggccatttgactactgaccacatgaggctttggcctctctctgggctctcctttctgagctgctccctggatccagcccagtaacagtgttttcttttccatagagctatgaaccagatgagctgaccaaagagatggcccacctggaaggactaatgaaggacctaaacgctatcacaacagcatgacgaccttcaccaggacctgacttcaaacctgagtctggaagtcttggaacttacccttgaaaacaaggaattgtacagagtacgagaggacagcacttgagaacacagaatgagccagcagactggccagcgcctctgtgtagggctggctccaggcatggccacctgccttcccctggtcagcctggaagaagcctgtgtcgaggcagcttccctttgcctgctgatattctgcaggactgggcaccatgggccaaaattttgtgtccagggaagaggcgagaagtgcaacctgcatttcactttgtggtcaggccgtgtctttgtgctgtgactgcatcacctttatggagtgtagacattggcatttatgtacaattttatttgtgtcttattttattttaccttcaaaaacaaaaacgccatccaaaaccaaggaagtccttggtgttctccacaagtggttgacatttgactgcttgttccaattatgtatggaaagtctttgacagtgtgggtcgttcctggggttggcttgttttttggtttcatttttattttttaattctgagtcattgcatcctctaccagctgttaatccatcactctgagggggaggaaatgttgcattgctgtttgtaagctttttttattatttttttattataattattaaaggcctgactctttcctctcatcactgtgagattacagatctatttgaattgaatgaaatgtaacattgaaaagacttgtttgttgctttctgtgcagtttcagtattggggcgggtggggggctgggggttggtaataggaaatggaggggctgctgaggtcctgtgaatgtttctgtcattgtactttcttccagaagcctgcagagaatggaagcatcttctttattgtcctttcctggcatgtccatccttattgtcactacgttgcaactggagtttgatttggatctggttttaaaattcttctgtgcaatagatgggtttgaggatttagcggccctgatgtcttggtcatagcctggtaagaatgtccatgctgaggagccagatgttgtatttctaactgcctgagtcacacagaatagggtaagagcctgaccccattctgtaaatcagaaagcaaggatggagaccctttcctgctgctattattggctctctttgaggaagttggaggttaaggaaggaacttgtttgtttccgtatacgactccttcttctctctagttcagtcttcagccagtccagcgctctcttccacacttcagagccccttcagagaaagcattagcaggaatgagacaaggcagagctgcagtgccccctgaggcttccacacatctttctgaatattatttttcaagtaacaagggcagggacagcggaaacagctgcccaccccccccatcccagcagctcagctaagccctgatgagaatgaagccacaggagttgtctgaggtgaacccagccgctcagccacacatggaagccattgcctttgcacatagttcttgggttctttttcctaaaaaggtaaggagctgaggtgtgtggttttttaatattaagaatatataatggaaaacacacgactgacgctcaggcatcttcccctactccccaacagatccccagaagacagcgtggaaggcagtgtagacagtaaatcgggcttcagttctatagccaagaagagatcagctgctgaaaccaccagtgggtaccccaggccacctgcctttgaacttggggatttgccatgtttgatcttgtcacatacttgcttttttacaagatgaactctttgtatttatgatttggggggcaatgaaaggtgcaatgcaggaactgctgctgccgagctcgctggtcacatgggggtgccaggcgggattctggaaaaccagtgcacttaaactgatcctgaagagagctgtcccagcactctggccaccaggagggccagattccccagaaactaccttttgcccaaagaacatgctcagtatttggggcatttcctcccacaaaccctgactgcttctgttacctcagggccttggtacctggatactgccacagaattggggcgggtgggggaggggcctatttttaaataaaataactgttcaaagttgggggttttttaaaaaattaagaaaaaggaaagctattctgtattgcaccttttcacaatttaatacattttcttacattttcctgtgattttcgaaactaaaccattgtgtgtcctgtagtgtcctggttgagctgccgctcagcagcttcctcggggggatttggaacacctgtgtctgtcgccgcactgcctgtgggaggggcccagagggctgctgggactggcgtctgtacacacttgtttggccttttctgtagttgatgctgtaaactctatggctttttaaaaacgatttcatgtttttatttagtattggaaatccaatacacttttttaatccaatcaaactctggtctggtcaaagagttattttcctttgtccttaaaaaaaaaaaataacaacaactttggggccccctgcttcccagcctctaactgacttcacggttgccttcacaactgtaaagccagtagtctatgaggagactcagggaagggtggcaggtgagccaggaggctgcaggaggtgtttggaccgtccaccagtaccaaaaatgagtcttgtccctgttcccatccccctgttgctgccctgcagggactgagcagcctgaggaatcagagggggcccctggcagccgtccctgaatggagtgcaggccatgtccctgccgcggcagcgcattctgttagggcagactgactgtccacgtggggcctggcctccccactcccagccccaccactcatagggacctgaagctgga

SEQ ID NO: 80525 - DNA, 1075 bp, Homo sapiens
tgttaactgtagagaattttaaaaagacggtaaaagtgactaaatgtcagtttgcttcctctgatcaccatgtaccagcaattcagacagtgtcagtgatagaatgctcccagcacaggggcagacagctcctccaccccaccatgagcaccctatgcgtcagccccaagggacacctgctgtgctcgtgctgctggcgctgtgggaaggcctgaaggcactttttctccctagtggggctaaacccgactgggatttttaagggacaattgaaagatgcgtaagatccctacctggactccacgtctcttcccagccgctactcctcactcttcccaccggagagctgtgtcccctccctgtcctcatttcctcctccaccgcatggctctgacaatttctgatgaattcacctgcccacattgtgaaatccagggcctccttcccagccggcgtcctgctgtcctcttagcagggtgtgacctcctccaccaggccctcctcagcacatgggaccccatcctctgctcactgcttcacctttctcaagctcagcctcagcttgaagggctcttctttctcccaaaaggttggtgctccctgggcctctggccttgtcccccgtcttctcactccagatgcacttcctggggttaacctcacctaggcctgtggcttccccagcctggaagcaaaagcttcccagagttcccctaccccaattcaggcccccgcatgccctgagcctcggcctgggcagctgctccagggtccctcattctcttctgactgaccacggcccttttattctttcttgggtttgcagcttccagtgcactacaaagcatgccttctcctccacctgcaccccttgttgattttgctgctttaattttctttctcttgagggtggaatatttcgtacctactgaagagatacattatgtaaatcagatataaaaaataatatcaacagctatgtaccaatcactcagtttaaggaatggaacataaggaatggagcataaggaatacctttgaaggcatctatgctgttgcccaagtgtgtccctct

SEQ ID NO: 80526 - DNA, 1046 bp, Homo sapiens
actgtgattaggagatataccaataacagtaataattatttaaaaaaccacacacaccagaaaaacaaaagacagcagaaaataaccaggtattcttagagctatagatttttggtcacttgcttttatagactattttaatactcagcactagagggagggagggggagggaggagggagcaggcaggtcccaaatgcaaaagccagagaaaggcagatggggtctccggggctgggcaggggtgggagtggccagtgttggcggttcttagagcagatgtgtcattgtgttcatttagagaaacagctgccatcagcccgttagctgtaacttggagctccactctgcccccagaaaggggctgccctggggtgtgccctggggagcctcagaagcctgcgaccttgggagaaaagggccagggccctgagggcctagcattttttctactgtaaacgtagcaagatctgtatatgaatatgtatatgtatatgtatgtaagatgtgtatatgtatagctatgtagcgctctgtagagccatgtagatagccactcacatgtgcgcacacgtgtgcggtctagtttaatcccatgttgacaggatgcccaggtcaccttacacccagcaacccgccttggcccacaggctgtgcactgcatggtctagggacgttctctctccagtcctcagggaagaggaccccaggacttcgcagcaggccccctctctccccatctctggtctcaaagccagtcccagcctgacctctcaccacacggaagtggaagactcccctttcctagggcctcaagcacacaccgccacctctggggccgtcagtttgcccatctgtacagtgggaggtgagcggaacttctgtttattgagtctgctctgtgccaagcactggtttcgcactttacacacattaactccttcagtttcacaaagaccatggggtgggtactttgattctccccatttagcagaggaagaaacagttttgggtaatttttccagaatcatgtaactaggagtggca

SEQ ID NO: 80527 - DNA, 1034 bp, Homo sapiens
tggcaattaagtttccaacacacaaacttcagggggacacattcaaacaatagcaaccagttaacacttctccccaaatctcagccttctgatcaaatctctgctatccaaaaaaaaaaaaaaagtgtcctccttgaacttcactgtccctttctctccttcccatcacatctaaacctctcaagagggtgggcttcatttgctttcctttctcaactcccactcattcctcagcccatgcagtcaggcttcactacccatggtgtcttcagcaagaccacaaatgtcctcctgagtacaaagtccacctttttttcctttccttattgaccttggagcaccatgccatgctgctgaccacctcccccttcttgaaatacccccttcccttgacttcagggacacacactcttctgattttctttctacatctctggccagttctcaggatcttttgtgtcccatcctcttctactggctcctcacatgtgggtgatatccctgactctattgtatgctctttttttcccccacggggtctctctccctgaacgccagacccttggcttcagttgccattcatgccttcagcccagacctctcctgtgggctccagacctgcttatttggcttcttggatgtgttacaagcagcacacactgaaaatgtctaaacattcacactcttctccaaagacccctgctcttcctgctcaatgaacgagaccaccatcatccggtggctgaagccagaaacactggcattattcctgactccttcctctgccccaacatcccatcagttcaaaagtcttatttctccttcataaatatctctcaaatatgtccacttcttaccatatgcactgacacaacttcagatgatttcttgcctaggctatggcaacagcctcctaactggcctctctgcctccagccttgctctactataatccattatccatgatgctaccagagtggtttttcaaatgtaaatctagccatatctgcttaaaactcctaacaaatatcact

SEQ ID NO: 80528 - DNA, 1048 bp, Homo sapiens
acagaagaaaaatgacccaagcatgtcaactcacagaggctgctccccttggtatgtcttcctcagctcatcgttgtctgtctacttcactaagagaatgggacacatatgagcatgtggtctgctttactccttccccaggagctgtctgcatgcctgtcagaatttatatttgcaaaaccatcagtgatcagaaaatactatggttgattctctgtccttgctgcctccaacagaaccacaggaaaggtacaggttccatcttttcctccctccccttctattatccatctcctctcctctccatgtccctactgcaaaaattggcctctcaatctccattctaccttctcttagttagaggcattgaaaagctacacactaggtttctggattcaaagcagcttttaccaaataaacagtcaggtggcatttggaagtaagaagtgagaagaagaccatcttcctgctgttgctgataaacaaagtaaagagtacgaaggctgtggcagcatctggactcagagttccaatgtctagtgtcttgctttgtgggatgagggtcagctgtggtgttcacagaggtagtagcagtagtgggttcctaacagtttcagtggtataattatgtatttgatagcctggttgcagaaccttgacttccacatcacaaatttcttccaaaaattttttgtattacatccctttccgcataaaataattagagtgatttctgcttacttcagtaaactgattgatgcatctatcctctgctgggtcacctaaatagataacagtttgcccaggagggaattcagtttcggttcaggtcaacccagttagtactgacctccactatatgcctagttcattttctaggcttttgccttcaggaagttcctagtctgtctgggtaaatggactcacacaaaagggtctgtaatcatagatactatttattgaacaatcaccaagcaccaaggtactattgggactttacatttgctgtctttctcatcataaccctgtacgtatgtgtatcaagaat

SEQ ID NO: 80529 - DNA, 1050 bp, Homo sapiens
gtctggagctaagtccaaagatcaaagggcagcctggttctctgatagctagtcataacctgggctattggcttaagtcaatttccttatatgggaaacaaaacaggggttcttgaacattttggagtgtgtgctccagatccctgtggcaatctggtaagccagtggaccccttctcagaacaatgtttttaatcacacaaaatgcacaagtttacaaagaaaccaattatactgaattagtttattacaatattaaggcactaatttgtgaactaatatatatgcttctttattaatgtatttgataataaagatctagtaggaggactaataaacaccttaattttgaggtagtgatgagcataaacatttgagatgtcagaaacaactgaaatgtgatatgaaagtatctgtgatttccattagtgagaaggtctaaaactactgtggtctgctggccttacattcatagtggaaggaaatgatacatttcaattagaggtcagtgaaaatccatggaagttcatggaccccctgaattctatggagactctggggtctgtgtaccccaggttaatacccctccactagataatcgtctaactctcagagtctgagtccctcaaaaattagtatctttcacttaaatttcaatattatctactccatgaatgttaacagattggttttcatagttatttttgaaggaaaatgatccaggtgattaatatgactgtttctttgatgaagatcattctttacacttaatacagctagaaagcaagtaaaagggaaattttttaatattaaaaagaaaaaatgaaaatacatattcactgaatcatttgaaggtatacacctttttaaacatccaaatcgcaagacaaatgatgtactccacttccaatttgtgcttgggggatagagaatggctgcacagctccatcagacgcatactgagaaatccatcagagcctgactccttagcaatgtcctcctgctaatgaggcttctgcctctctacggtccttgtttcatgtttttctca

SEQ ID NO: 80530 - DNA, 1068 bp, Homo sapiens
aaacatctagattataacaataacataaaaccattttagaatagtttcccttttttctagtctactactctgcctagtttagaggagtcaacctacataaaagcctcccgaaacaggactgtatatattgtatacctttcatcagtttcttctgtaaagaaatgtagatgctaagcttagcacagtgacagtccttttccctcatgaaatatatataccatgttgcttccttgaaaacactcctaactacagttaacaaaatcctgtaagttcctataagcaaataaatagtccttgattttcctgttcataatttacactatttaaataaacccatcaagtaaagccatatatttagattacagaaaactcttggcatggctgagataatggtaagctatcatgtttagaagaataggcaccactgccccttttcactgccagtatttggtactctttatattttaattcatttaatttttccccctgaatataaaagtcatccattatcattatcttatccaacattggaaaaaatatgaagagtcatatatatctgtgggtgtataaaagaatatatacaaacactcatgtatatttaatttctaaaattttaggtacataggtgtgtatatatttatgaggtacatgagatgttttgatacaggcattcaatgagtaataatcacatcatggaaaatggggtatccatcccctcaagcacttatcctttgtgttacaaacaatccaaccatactcgtgtatttaaaaatttccattatcgtcatcctgttgtgctatcaaatactaggtcctgttcattctttctttttttggacccattaaccatccccactacccttcccagcctctggcaaccatccttctactctttatctccacgagttcaattgttttgatttttagatcccacaaataagtgagaatatgtgatgtttgtctttctgtgcctggtttatttcacttaacgtaatgacccccagttccatccatgttgttgtaagtaacaagatctcataatttttttttttaacttttattctaagt

SEQ ID NO: 80531 - DNA, 1050 bp, Homo sapiens
acatgatgactattagtacagtttggtgccactgcctgatctgtatgagatgacagcagccttacgatgcctttgtgtcatcaattcaaatgttgacacagtgaaaaaggcaagtgatactctttctttaaatattaagaaaaataattttgaccttgtgggccccctggaagagtcctagggaggggttcgtggaccacactttgagaaccactgttctgtagtgacacccagaatgcagctggaactcctccctgcctaatttctgaatagggagctacaatgagtatcgacctcaattttaaaaagtcaccgaacatagatgttttttaaactacaaacctaacagacttgacaaactccactgtcattttggccactcattgtgcactgcattgtcatgtttcctgtataaccaacacatcagcctacttactccaggctgccgtgggacactctttgcagaatccttcccttgactttcagttgccctgggtgggccaggaatcagctgaagctcctggatgtttccatcaggcacctgcacggttatgtattgtgccagcttctgaacacaactgcagcagtgttccagcgcctgctcctttgactctccactgaactgtactcgaaacaggcgactcttgtcctgtttgacaaatcaaaagttatcatgagagaccctcatcatataactatttactttggggtcttccactgagtgtttcctttgcttggcggaggaagaggtatagataagggaacagtcatcttcacttattgatgcaggcatagaaaagccaataattcattttcttcccccttttgggagttgttcatcatactaaaattcacttccctctgggaagtgacatcagcaacagtggaaaagctcatatcataaagacaggaagatcactatactgattgcagatcagtgttttatcgtgctttggaataaagatttcatagcttctaattccctaagtgaaaaatctgtgaggataataatacagcaagcatagtcctgctcaaaacttttctaaactg

SEQ ID NO: 80532 - DNA, 1086 bp, Homo sapiens
aaaaagaggggtggaggtacagtgaggaaggaaagaacaaagacaagaaaacaaaaaacgagcaaaatggccaaagggccaaaggactctataatcaatagtccttagacaagccccatttctctgttcagtttcttcagttttctcctctgtaaaaacaaggcagcctctagtgcctagtgtttcttcagctatgacatatgatgctttcctagaatacctatcatttcagctcacacaaagaactaatgtcaaccaaaattgtctgccataaacactaaaaaatagctaagtggaactgaagcacctgaggctagcgggctctaggattagatggtccacctctgcaacagcatagagatggaagagtctgtgcacacagtagctggagtcccctagctactttcttctggactttttgtgctaacaggaaagagtccacataggaactgcgatcctcttaactgtctttcccatccccctccctggggtgggctggttgcctttgaagtgctaaggttgagaaatgcctggttaagccacaattaacaaaattacaaggctgaggaaaagcaaaaactaaaatatgagccagtaaatgactcaagaacttgaaatagaattatctctatttgcaaagaaggaaataactattttatactaaaaaatatataggtactacaaaaatgacacacctgaatgtaagagagcagcaaaatgaccagaaccttggccatggcttgtgccgcttaagacggattctgagaaagagcacatgctaccaaaatttgtacaacagagttaagggcaaaccttatgttttgccattaggaaaactagaatgttctaggtggtgcctcacaaggtctgtaccctggtggaatttaatccaatggctttaacttatcatctgctctgcagcttcagacactgtcttatcatgccctctcttggctctggaggttctgatccttgctaattgactaggatgctgatttgttcatttgcaagggaaggcacatctgaaagggtaacattggtggcaataatagtaatgatggattttgtgattatatttgccaggca

SEQ ID NO: 80533 - DNA, 1069 bp, Homo sapiens
tgctgtggtaactcaagtaaccctccgtttaaaccaggacagacctatgctgacaaccatttttatcactcttagtggtattttctttctttgaacatgaatgcatatttctgctctttaatggcctttggtatttaagattacattcagctagtctccttattgcatgttgttttattccagtcccaccagcactcagaacaacagcaagtgtgtgtaacagcgggcacaggcgctccagacggaaggacctcactgacgcagttagctcaggtagagcttatttctgtgttcaattttcttgtcatgagaagcagtgacccctaagaatttgtatccctttgttcaattctttgttttaggagagaaacttctaaagcattactctaaaaggtgatagagacagagacgggccattttcatctaccccttgcagagttaagttttattacagtaagttgtgaggtgagacatgatggctgcaggcacatagtcaagatctaccctcctaaggaaataaaacggggaaaagtggttgaatgtccaatatagaaaatttaatcaccactttcccaaaaaagaataaatggaggactccattgtaattatggaaatgaaatttgggaactattttaagacaaatatcaaaatgaatgtggattcagatctacaacaatttctatatgggtagattgttagtactcagctaaggatgtgaaacccaggaggattcagctgttaactcagacttgctttcagacagccccttgccccctgctgcaaaacctcttcattcaaaactatggttgtgtgacgtccactctcctgggagctctgcaaggactttgtctccccctcactgcattcctcattgcaggtgttcaagccagcagcttctgcttgccacagaattctgtgtgaagttcatcaatcttcaagtatgatttttttttttttttttgaggcagggtctcaccatgcctcagcacccagcaggctggagtgcagtggtgcgatcttggctcactgcaacctctgtctcctgggttcaagtgattttcctgcctta

SEQ ID NO: 80534 - DNA, 1888 bp, Homo sapiens
gcctcagcctcccagaagtgctgggattacaggcatgagccagtgtgccccgccatcaggtgcattgtgtcacatgtttatataaatgccatttcagaagacatattttaaaatcaacacttttcactactattatatctttacaaagaggtgaaaattgtcaccttcttaggtggcttattcccagaggcctactagtcttacctcacgtctgggggcaagacaagaatggccaggtagcagcagggccagaatgtcatcttgttaggcatatggagatcagaatttcacaccacatccctgagcgtgctgtttgaaccaaagttttgtgtggcacacggtgtagttgtgagtgacagtgcataatccctttataatttccaaatacatatttctttacagatctttaggttcctgaaactggtggcaacatgacctgctaaaattttctgcttggacctctttggttctctcccctttcaagtgagcaacaccacaatgactgtctaaagcatgccttatttagcctctcctgtaagggtgatctagccaggtacattttaaacaatgcttcagtgtagaaggtgtaaactattttgggcttgatgtgctgtgaatgttgcttttttttttcctttgttaaaatatttaaatagaagtgaaaaggtcctctgaggatcagatcatgcatgcgccattttttacttaatgcagctgttaaattggcaaagctctaaaatgcactgctgccatctagtgatacacttttgtaaagtacagcaaaacctacagatatatacagtatataaatatatatatatatatatttatatttttgggggtgggagaaatccaaaataaagtaaatgcttgtttcatttttaagctgctgatattcattccttattgtatgttgtcagatgaggaaattgtgcagttctggtacataaagatgagtaatataaactgaaatctataattttaagggcttaacctgtgactttaataagctggaacagtccactgaatgggtataatgaattgcagtatatacgtatgattgctttttaagtgattatcttttcttctgttaagtcatgtaaattcataaatccttttgcactgatgtgttgaaccttattcttgtacattcattcaatcaaggcaaacttttataatttttcttttgtttccaatgaccttgaaatgttatagcatggtaatattctatgcaactatagttatactttttggtttgacactgtattttttcacattgatttactggttgatgatagattttataacctaacggttctcatgcggtgcgtaattgtagatgcatgtacttgtgtgttttgtgtaattattgaagtgcaatgatgtataaaaaagtggattcacctgtttttaaaaataaaacattgataaaaggtgtttggataatactctttattctaatatcttctttaattttaggaggaagcatttttcaatactttgaagttccttagttatatatgtatatagagcattaatttctcaaacccgccagctttttcagttccttttctacctcttccacaaatgctgggaaattctgatccataaggcacaaacgtaggaaggggcctaactcttctgcaccccatgcagattgttcatagacatggggcagctcctccgatgccagaagagtctgcagggataccagaaaagtcgttacagattacaggtaaaagcaatacctggctaatagaacacaggcaaatagtgctttaaggaaagattagcgaaatacacaccaaaaaaattagtgttaattagctttacaggcttcctttacatagttttactgttacatttacaattttgtatattaatatgt

SEQ ID NO: 80535 - DNA, 2523 bp, Homo sapiens
gctctgatatatccaagctcttttagacactttagaatgaagagctgttctaatgttccaaaatctattcgttggtcaaaacatttggtagcatatgaagctttatacagactagggatattggaaaagaaatgtgacttttaaaatgacacctaaaacatgcattcggtgtctggtctgttaactaggggccatctgggtcaataacaagttacctcatggagaaaatgcaataggaccaaacaaggaaggaaataggaagtaactcagtctctcttgggtttaatgctaacctgctaaggtcaggcaaaatttaagtggatttagaaaccataaaaccttctagtgagatgaatgcagtgacaaaggacctttgaccagagagtcaactcttcattattcggactttaaagccatctttttggaggtgatattgtattaggcaatccgttatttactagacattgcagagcaccccttctagatgatgaggcggatatagggggagtgagggctgtggtccattcggttgggaagatggaacacgcagataaatcagtgtgtgctacagttccaccggtaacttcactctcataaggtggattccagaagcatcttgtttccattatccccccagtcctcttcctctcatctagccagtggctgtaatactgaggtggagagaacagtcattgtttaagctggctatcttttggcctgagggtttggggtatgttgatatttgtcggttactatgacttcttttttttcccccctcaattgcatcaaacccttaaaacatggtggtaagtgagcgatatgcatgcttttggagtttgtttaatctccgcttcagtctatacgatgcacagttcataatgttaacacttttcttcaagtttacttcattcactttcacaactaatttggatttcagtttgctgtttaatcctcatttactttggtttctgtatcttttttctgtaattctgttctttccctctcccctgacttccctgttaggggtcaagtcgtttttttgtctgacctgtaggggagagtggtgctgcagatagtgattcagtccaggagagtggggagacatgaggctcttttgtttgtcagtgtgaaagtggatttggggagacagatgaagagggctcctgggattttgcccccttgtgaatctcaactgctcccacttgcaggcatggcagctatgccggaggcactgtcgctaaaacacctccatgcaaccctttgcatgttaccagcttgttgggctggaaagtgacattactaatcagacaccagggaatacccacactccaaaaggaaaaacagcccgtggtgtgaggtgcttgggttggtgcctacagtgtcatgctttgaaaagattagcctggctattgcgattctccctcccctgctttttattttaaatttgggagtagattggtgtattcttgattcggctctcttgcattagaattttgtattttcgagtgcacagccagagcactaaaagtattccaagtttgctcctatgtcttttcatttaaatccccaaagtgcttagttcctagcatgtagctgagctggcttggccgggatgctgagcattaggatgttgtgaggggagaatttaggctgggcttttgtgtcttagtacctggtatgtctttgtatctctccactgcatacacagcacacagatgtcttgggtgtccttaagtcttagtttgttctctgtacccgtttgatagtgtatactgttgttagtagtggactcctgtggacactagtgtgtcgctagcctattgttttggctgatgagtcattggtttgtggttagttcttttttttgaaatccttttttgctccagtcactgtgtgtgctggcggtggctttgcctctccgttgcctcgaaggaacaggtggagcaatgtctccctctgacagacattactcccgacatgtgctcctgcagatgcctacactgagactgtaatctccataactgcttcatgtgcaccaagcccccttgtggaatcctgctgagaatttttctagaagccttcagtgaaatcaaactgttctgaatcatttagtttacctgacttttgtataataaaaacaaactaagagcacttacttgttcccttccccttgtgggtctttttaaaacattctctctctgtgaatgtgtatctctgcttaaaggggatcaagttgcacttagttgaaacacgaaagacttataaatcagaatcataaagtatcaatttaagaaggcttaaactcatataatgtcagctttttgattttaaaaaagttatctcatggctcccctgggtttggcttctggttttggccagggcacaggagtgagcctgtctttctgaagtcttttctagagggatgtcaccactgttcagctttcctcggtgtgtcacagaacatcctctggtatacatacacttgttgctggcatagcccagcatggctgacccaatttaggt

SEQ ID NO: 80536 - DNA, 2749 bp, Homo sapiens
tgtatgagaagaggaagaggccagatgaggttcctgacggtaagagcatccctacaaaatagctgtactgctggggttggttccttcgggtggtttccaagtacccaaagaggactatagggatgttgggattcaatccctaaaggaaagaaggaaaattcttataccagttcctaaccccctacccgtaagagttttttatttttattttttatttttattttatttttattttttttgcattagccatctagagctgtccttagctctctccctctgtttgggtgttttccaaaccctagtcccatctgcctttcaggccccatgtggtgaatgggcagctgtcagtctctttgttcagctctgtcctccttcaatacagatcatcaggcagattgagcttgaggagaatccaagtcaagcctagaagccaccccaagatggcaggccacctggcctttcaggcagatttaaggtatctaactggttgtcacatggttgcctggtgtagcccctgtaggtaactgccccagcccagtcagactgttctcagaaaagccattggaacaagccagcttttggttccttggttggtccctttgataggtttccagcgctctctgctgggtggctttccatctgtgtctcacagacaaaggagagtctgatgtatccacccatctagtgtaagacagagatagcaaaggcggaacaaatggagtccatgccccgaggctgtgccctcaagctggcctagggtcagagaagggaggagatggtagcagcagaaccacagcacaccactgagcactggaaagagcaagagctgaaatcttaggttattggatatgcctagagtcagaaaagccttgggaaatttttggtgatcgatttttcctgtgaagggggaagctgctgatggagacttgtatctgcagtacttcaggttcccagctggctccccatccccaccctataacatgaccggcgtacagaaattaattggccgactgttaccaccactagtctgtccctggctagactagacagatgggtgtgcccctgggctcagtggtagcctacccggggtgatggtggggttgccagctgtagtccagctgttctggggcctgtgtttgtgcacctgtggtgctgtatcctgccccacagagctggctgtccagtggagaatacaaagtgacatctggtgctccctcagaaagaatgtggccccagaggcatgccagtggctttagactctctgggaggacatgtttgagagcaacagccccttccccatcttttcctttcttctcagcagttataaatctctctgcctgcagtaagtagagtgagtggctggtgaggaggtttgttgatgacactgacaatatctggtgactccctccagatgtgcactcagcagtgagctgggcagaggcgtgggaaggacgttggctgggagcagacggcctctgcaaatgaatctctagtttcctgcaacctgggagtgtccccatgagttttactttcctactttatgaagtgaacctgctttctttgggatttcatgtactcctaatgctttttctctccaggtatttctttcctgctacatattaggactcccaaggcaagagtgcacctttatttagacctgggagtaaagggaaagagttgcctgtctttcgtgtgttttcagctttggctctgtgggatcagttatgcctcattcctgaaaagggcctttttatccccccagaatgcttttgctttgccaataccaccttcctcagcctgccttttggaaaggttgagaagctaaaaagtcaggtaagagaaggcagagatggacttcagaacctgatttttaaattttaaggcaaggctggctgccactggtgagagtgatgcagcagcctagcgtgttcccagcagaggtctagtctttgccctaagaagtcaccgcgcttatgaggttgctatcacagtgcatgtggtaggttagatttgagaaatggttaggattgttctgttggataagtgcagacacctgcccagggaagcagctctttttttgtaagagttttcttggttactgaaatcaaatgggggaccagtttgttataggagacatctgtggccagcaaatctgaacagcttcctagagggaaagtacctcttttaaactaagttattatagacagtgaatgaatcctacccttaaaagagatgacggcagggtaagtgcaaagtaaaacctccttgctctagtctcttgggagagtattgtaatgaaagcagcgtttacttcgttgttgttgcattggggtgaaaaatctgagatgctggaatgatggcaatgtttgccttctctccttcccttcctgacagccagtgtgggccaggctccactctccatcttcacaccctgcccttgctccagtatttccattctgtttttctcctctgtctctttctgtctttctctcaaactccatcctgcttccacccctgcccgcttttcttctcctttcctggaagtaatcattaaacaaaagaaaaagttgaatgttctttggtgagtttccttcttctctgccttttccttctttagccagttcccctcaacccctgtgcactccataggaaggacaaacttacctgtctgcttccttcccatgtgcttctccccaaattttcatatagatatatacgtacactccttttggaataaacgaagaggtac

SEQ ID NO: 80537 - DNA, 1052 bp, Homo sapiens
cttctccctatctcaccttctcactcccacctgcccttagtaggatataaagcatgcagcatattttagtaaatatttgttctcttttatttgtttgttttgttttgtgttaagacagggtcttgatctgtctaccaggctggagtgcagcaacctcctgggctcatgtgatcctcctgcctcagccttctgtgtagctgggaccacaggtgtacaccactatgctcagctaattttatttttgattttttgtagagatggggtctcagtttgttgccaaggccagtcttgaactcctgggctcaagcgatcctcccaccttagcttcctaaagtgctgagattacaggcatgagcctctgtgcccagccacaaatatttgttgattgattgaataacctttcctctaacctctagtccttaaatgaaaggaaagttatgaatttcccccagtctgactaggagtgagttcttagcattgtttgtggaggaagtttaaggagacttcctcagaactcaccaagtgtgaagtcagtgtgctgactctgaggtcatcagagaggcctgaggtccccgaggcatgcctgactgtaggggttgtacccctccttctgccgtcctctttctgctgtggtttcttacctggtgttggaggcagcatttactaggttgttggacttttctgagtctccaggcagtaggacctgcactcacttcgtggaagtcggggaagtctggaggaccgatggtaagggaggcttgcctggctctgtcagaagttgatttgttgttgttgatactgaagggaaatcattaatgaaatgttcctagacactgcttcctcattctggctggtgcctaaaaagaacggagagcagtgtcaccctctcttgaacattagctcagttactcactctcacctttgtgtattctcacttttttgcaggacattgtcaatacctctggccgcttcttcatcatcaacaaggaaaattacactgagttgaacattgtgaacctgcagatcacggaagaccctggcgagtatgaatg

SEQ ID NO: 80538 - DNA, 1046 bp, Homo sapiens
atatactcccttattttcttcacgaccatgctaaagttcatctcatcacaaaagccttacccaaccagtctgacatatctggtgtgtagtgggtgctcagcaggtgtttgccagatgaatgaagcatggctggctggagcagcacatggtaacccttcgggcatgctgggtcctgtgtggctatggagcctgctccttggagtgcttggaatttatggactgaagtaagctctgagaaagggtgaccaggttgaacagtcagcctaagaagtgactgagtagctgtgggaaaagttcggctttgtgggaatgagatagagccaggttgaccacttccttctgtagtaagaaactttgcctggaaaaaaaaagatatttcctttgaaacgtactatctagaaaacacttcacactgagtgttactcagcaggcctcagtttggcagggactggttacagagacagcttggggccttgcccagtgcatgcccatccaggtgcctctggagggtgagtctaaaaccagtttgtgcctgggaagcacattctgtgactagtaggactttgcattgtttttaagccaagaaaaaccaagccagtcaaaggtggaacatgagattagccccaatgcaatagtacaggcttctacagtctcaagatgaatgttttgacatcctgttcatctacccaagaacactgggaggtagacaaggacacgaggtgtctccatttgataatggctgtagcagcaaagcccagaataacgaaagaaccaacaaaactggaattgggaccaaggcatatcgattctctttcctatcttggataacagagtgacatccagcctgctttgacttttattgctctcagattactgtaacccggctgggcgtggtggctcacgcctgtaatcccaacactttgggaggctgaggcgggcagatcatctgaggttagcagttcgagaccggcctgaccaacatggtgaaaccccatctctcctaaaaatacaaaattagccgggcgtgatggctcacgcctgtaatc

SEQ ID NO: 80539 - DNA, 1036 bp, Homo sapiens
aggattttgttggtcatccaatcctttgcaacaaatatgtcactgcctcttgtgagaggcacttcccagcccagaagggggttgagcctgttgtcttactaggttcatctcaccctccttattggacatttcaaatgagtttcagtcttttggctgctgagagagccaggattgatcttgtttttctcctccctactccttagctttctctatatttgactattaagaataaaggttaggatttctataagtggccttgccctgccttcctatttcctattctgtcatggtgcattacaagtgacatattaatccagactggctaaggcagtgtggtggggatgaagatcactgtgaagaacagtgatacccagaccacattcacacggcactttcagcatgcacagcatctccaccgtcctttcttcactgacagtcaggaaaggcagctagtgtgataggtgaggatgcgtagaggttgtgacatcctttaggtgagaactgatgtcaaagcaacctgcttctgactcagaattgctgtgacttgagaagtctttgaaggcataataatatcatgaagctgctagggcattttgaacattaacttcagcccaaaaaccacacctgcactttcttttcctctcttcagggtgccaccctgaccttccttaataagaataagaatagctaacattattgcacacttactgtgggtcaggcactgtgctaggtgcattatttgttccttttctctcctttagtctccacaactctatgggataagtgcaattattatctctactttccagttgagaaaattgaggcttgagggaataactggcccagtgtcacagagttaactggtgaagctagggttctcactcaggcaccctagcactagatcctgtgctcctaagcaccaagccatggtgccctgttgagcatgtaacatttaaaaggccttgactaagagttaggagaaatgtgttctaatcgtggtcctgccattaaacacagtgactctgaccagtcactt

SEQ ID NO: 80540 - DNA, 1127 bp, Homo sapiens
cctgagtgcaagcagtctccccaccttggcctctcgaagtgctggaattacaggcgtgagccactgtgtccagccttagacttgttttttatgatacctcctttaagatagcagacatccaatcatgtttctcttgggtcttgtactattgcctgcaaagtgctgagctttaacttcatgaagtttcagcctgactttataaaatgctgcttcttttttcccctcagcttatttgaagctctccaagggtgttgtgtatctctagagtttttcagggattctacatttcgtgaaataacaactgatgagttccttgggctaccaaataagttagcctgaagaggcgatttcagaaccctgcttctgcccagcctgtagggaacgttttccctttgctttaatttcttcctaatagctagtccaagggaatggtgtggggagattttcagcctataggcatggactcaagtgtgggagttatcttcccaagtatttctcaaagaacttagaagtctaagaacttcagtcttaagttcagggctgagtttgaggaaggaacagcaggtctttcttcagagcttggactcaaagaacttcagtttaagccctgaagaaagagctgctgctccttcctcaaactctggaacacttgttgataagagcagctgacttgtctgttttccaattgggagcataatgatttaagaagaggcatggtgtcacattgagaagacactgactgcttctcacagaatattgtgccgccatgtggatatcttgagacagctctggggataggctatgtctctcctcgtccatagtctcttaacctgtgtttcctttttggaatgagcaatataagatggataaatgcattaggccagagtggtcgagtttaggagtttttcttagacattaaatagtgcagtagagatttgaccatcacaagtatcatattttaacccctaagcaaaagagctagaactcagccctatataactatttatcctctcatctggaggctgatgtttttcttctttctgtaattactcactaacctttctgcatgtgtttggtgtatgtgcttgtaggccagagtgtactgagttgatgtgtagttgaccctc

SEQ ID NO: 80541 - DNA, 1032 bp, Homo sapiens
tataaatgatatggcctttgtcttcagaatggcaaggtggagcctggttgtctaattgaagccgaattgtttggtggttcttataaaaaggtggtattcaaaaacgtaagtggattattaccagtacaagcacccgtaatactcccattctttcacgtctaggccaactggtcttcaggctgttgtctgcgctagtggtcatttgcttataatcattgtttttcctttcttgacttcctccaaagtggtaaagtgaaattcctcatgtggtcctgtctgccctccctctttttctagtttccccctcctaccccgtccaactctcaggccagggctacagaggatggaaggctattgccccctatcattgtgcactcttattacagagccaaggattgtcaccagtgaagaggtcattattcgagacagccctgttctccctgtcaccctgcagtgtaacctcacctccagctctcacacccttacatacagctactggacaaagaatggggtggaactgagtgccactcgtaagaatgccagcaacatggagtacaggtgagagtggtgggcagctcctgggaaggtgggagggagtgtggctgagcttacttgacattcataatccatagttgcgccatgcagaagggacatgagatatatttggttctccctttgagagtccaatccagtatctcaggtaaggcccagtagtctagaaaagattcccaaaggattctaatgagcagccagattggagaatcatagatgatcccctcactataatcatagagaaactgaggctgtgaagtagtgatttgttcagggtaacaatgttagtcaataggagagtcacacttagaatgtagtctcttgacctaatccagtcagattgaagttaggtttgaagaaacagattgaagtctgctttgtgactgtagagcaagacatctccctaagccatctttccactgggtagatttcctgtgaattcccttttaggagtgtgtaacatcactgtaacctgataag

SEQ ID NO: 80542 - DNA, 1074 bp, Homo sapiens
cttttggaaagatcctctgggtttttcaccttctctttgaggacacaatgagagatctatagccagttccagcttaaagagctgattgatctagagaaagtaagaatagtaaaatcttactttgatgaggaatttggtaataacataaagtagtaagacatgggccttgagtctatatacttagatggaaaatagcaaattagtgtctgttctttgtagccacttgaagatcctatgggtaaaaaaagagtcctttgtagggcagtggtaggagaggctgctgcagttggcactgttgaatcaaagaacctgcttctggaaagaggaaaagaaaaccttgtctatgtgaaaatggggaacattaacccagtgattttttttttaacaatatttttaccctgcacgcctccttctcctgcccccttgctcctttccttataaaagcagaattacctacatggccacaaaggtctgtggaagtttataggtatggactgggctgggcatttgcacttatacttccaagagcctgactcatagctagaatggccatgccaaggggctagaaaaagatgaggcattggggtacctacctaccaatcccgagaatacatagcattccccagtttacttagaattgtctgcatgtggttgaatcaaatccaaatcctggctagactctcttcagacttccccatcagtcagttaacccaagttagctgttttggagagccaggaggttgttgctgctgctgctgcttttttttttttttttttaaaacaccctggatccaactctaattggactgttttatgatctcagcgtcccaaaagacattgctctatggggacatcaggtgttctatctaagaatgacctcctggtagtactttccccaaagctcattgagtatgtaaggcaagaagagaagtgtgcccagtttttaggtatctctctggccatagcatgttctttatatatgcatgatggctggggtaagggtctcctatccactgcttttaaatagacatcagtggcaggtaaacacatttgaacttctcctaaatgttcatc

SEQ ID NO: 80543 - DNA, 1404 bp, Homo sapiens
tggtagtttgtgagaccgagacatggctccttggataccactttattgggcagtgagctcagctcttcatgcaggggcttgggggctcctttctgtaattctaaagcttctcctgcatctgagaatgacatctgttgggcttcttggggcctctggtagatatttccttacaaggaatgcatgctggatctgaagaggtagtttaaaatggcatattaaaggcagaacgtttagtctaagcctgttaatcactgcattcctgtgctccccagagtctgaaaatgtcaggaattgaaagactagtatgaatttggaggtcttggcctctacttgagtaagtatagtacctccattaatgttcttagtccatggtgtggggttatcaccaaaggcaaatactgctatggatgtaaacaggaatttttccacttagtaacctccattttcagctagccctgttaacatccttggcttctggactgtaggaaaacagttccatttatttcatcctttcctctggaatgttcttaatttgatgttggcagatcctgacctcactccctgcttactgcacaggggctggcttggcttatgcagcaggcctcccaggggacgtttccaagccaatcagaatgccctcttttagtgtctctctttataccttcggatactgtctgaatcagtagaaatgctgaatgaaccctaggtggggtggaagggtaagagagagtatgcttgcactctgattttgtttcctatggacctaactccaagtttttaaactaagcctggattttttttttttttaactctttctgccatttccaccttgtcttatggaagtgtaacctcaagcaaattatgggcaattagaggtaggcatcaactttagttcctgggcagttcctaagagtgttggttgaggcctggctttcaccctagtgtttagtttaattcatcagggtacatttctcattcttctgagctggcttctagaagccaggcaattcaactgtatggagcctgtcaaataccatagcttttcagatttttctaggtaatggatctatggggttatggagggcacagtccctccattagctggcagtgagttgggttgctggtattgttggtcccacttctgagctgacccacaaagtattaatatctcactgtggtgtgaagtacagactgtcttgttctcctgagggtctgcattcaggaagaggctgcctaacgctaaacaactgggttgtttgtttgccataggcccagggaagaataggaggtggagaaagtctaatcgaacccaggatagaatcctgtgtgagagagaaatttgctactctttcagttgaaatttgaactctgaatcccaagagaaggcaccagtaggtcatttaa

SEQ ID NO: 80544 - DNA, 2915 bp, Homo sapiens
ctcaaaacctgacaccttttcttaggctgaaattaagctaatgtgacatgatctcagattccataactacatcttatattttgtaaattaacagtttggcctgttcaatatccagtatcttcccaaatattgttaagcagcctgatttataattgataggattattttctactttaaaagaattttttttgaaaaggagaatttgtactgcctctctttattcttattattcttggactttccagattattcataatatcttagatttaatggtttataactctgaaaacacttgctaattccttgagtccacatacatgtgtctgctattatcactttgttcattccagtttgctctaaagataggaaggaatgaagaattcccttctttttcattcccttctgcagttaacatttccgttctggttctcattttatttggaaggttaaggttagttttttgttgtttcttgaagaacttggattttaagttaagctcattttggatgtgaagttctgcttcccagcctgttgtggagcagtgctgcaggctgctgcccgtggcctgtttagcacttatttctatggagacatataataatagctaacattattgagtgcttactatgtgtcaggtactgttttaagctatgttatctcatataatcctcacaataaccctgtgaggtagctgctattattagtcccgttttacagattagggagatgaagctcagagaggttaggtcacttgcttacagtcatacagttagtgacagagccttatgtgaatccagacaactgattttagagtttgctgcatttggtcactaaactatgtagtttctcttggcatgaactagattcccctatttttccaaagcagaaggctggctggtatagatgcctttggtcattttgaatggtataatttcagaataaagggtggaccctggtttagaagctagtgatagggatgatcttaatttccaaacttttgtcatatctgcctgatcaaggtacctgtggaaggagcaggtttgaatttggaaaatgttttgtaattgctgccatctctacctagagatgagactaatctgtggtacctcttcctgctgcagagaatgaggttaccccatttcctctgctcccaggacttcaagcctgccttacccttggtcagtacacacagaatgagtgcatatagacttctgacctgcctttggtgttaaggaatagtgatgaatgatctgtttcctgattaacaggaaggataggcaggctctacagtagtttgtgtaggctcaagtctgtgacagcctcacagcagttaagggtcctttagacatttgaaatactcatagttcctgtattcacgtttagatgtcagtgggtcttgctcagtctttattttgaggtagacgatttgaatttgtgtgtgtgtgagagagacagaggagagaaacgctcttatgatcttggctgtcattttctctttattgcgaggaacgaaggagagaacagcatgagccagccacagggaattagaggtagagggggtttgaagggaacagctgtttttaaaagaggtgacaaaagcaggcaagacttaaaggcctggccttggcagtagtcagttgagggagagagaaagttagtctgatttcttgttctgtgggttgccctggaggtaaatgtgaaaaatcatgatagtctctcctatatagggctaggctagctttttttacttccttagggcatatatgaaagcagttttcctgggattgggctcaacttgctcttctgtgtttcctttttcttctcaccctctgctacatatccacacatccagtttttcctgccagcaagctcctccttttctccggctgctagtcccagctgtcatctttgcctcccatcccccatccccagttatgcaattttacattacgcttctcttgggtttgctgcctccatttttaatgctctgcctgctaccccctccagcatcagcttctagtctcttcctccctcaaagccagtaaccactgttcagtttccctctttatcactgttgctctgaatgcactgatattaatactttcccaaaactcttgcagatctgggcccagtcacttaagatagtgggtggagacgatggtggggaagagggtggggtaggaggttgtcttacaaaatttagggtttttccaaaatattggatgacccttgacctagagagcaaacagatgcttctgttggcctcccaactttaggcagtgtgtgctttcttgttgaaggtacatatttgtttgaaagcccttagtaatgaaaggcagggcagtgagtcaggctctgaacctcctgctgctgctgctgagagccagttcttttcctgaattgaagctaattttggatggataataaggtggatggttgctaataactttcccttgctaattgtgatttcacagtactttgtaaagagggttcttttctcttttctctttttctttttcttttctttcttttccatgctgtttggagggggaatagatctcttttcatggtttttgatgagtgttcagctatcaaggaattccttagtttgtttagaggcagcacagtttattggaaagaaccctagactaagctaagacctgcattctagtcccagccccactcaggattaactgcctaagtgattttgggcaagtcataaacctgtctccgcacctgccctatgtatgaaccttgtggaactgtgcgaatgaaatgagatgtgatgtatgtggaagctctttgcaaactgcggagttttataaaactttcaggtgctgccctttattaatttggctcctgactacagcatcagagaaatttttccagtgtcttgtaaattccttccttctctg

SEQ ID NO: 80545 - DNA, 1426 bp, Homo sapiens
gctttaatgctaactggagagtcagttgaagtacactctttaaatgttttgtaactggtattatttttcttttaattaattaaaattgtttttggcctcaaagctccattttggatgtagttctagatctgcccatagctacttttgacaatctcttgggataagagagcttttatgagcatttgcttaaatatgtaagggtttcacttacatatttgaaccagacctttcattaataactctctttaagatatagcttatttgtgtgcatttttctgtttcccctgcatgagacattcctggtttttaatggctagcaaaaccagctttttctcttagggaccagcagcttaagtactatttgtgaagttgggaagtgaattacctaaaattcccctgaaaatactagcttgacaatagtttgtggctgctgcatttttctccttggacagacacatccttagttttaaaaaagtcatggtcattttgatgtcaaagtcaaaatgggccctgatttattgtatttggccacactttcttggatctgactgctcaagagtaaattaaatgcctttttcctccctggggtgaaggagaaacattgttagtctccagcagtgtctttgataatgaagctgtttacctgagtactgtaaaagcctgcaagtggctagcattttctttttattttttttgagaagtagtttgctttgtcacccaggttggagtgcagtggtgtgatcctggctcactgcaacctccacctcctgcattcaagcgattcttgtgcgtcagcctcccaagtaggtggtattacaggcgtgagccaccgcatgatggccatagtattttctgataagtaacatacaggcagagctttcaatctgttaagagtccatgtgaggatattcaggatcataggaaggaaccctggaagacagacgtacaaaaggaatgcaagaggggttcaattgtgagctgattcttctctttgcttttaacattttccaattctttttttttttttttgaggtgagtttcgctcttgttgcccaggctggagtgcagtggtgcgatctcagctcaccgcaacctcccctcctgggttcacctcattctcctgcctcagcctcccgagtagctgggattacaggcatgcgccaccatgcccacctagttttgtatttttagtagagacgagttttcttcatgtcgttcaggttggtctcaaactcctgacctcaggtgatctgcccgcctcggcctcccaaagtgctgggattacaggcatgagccaccgcacccgacctacattttccaattctttctgtttctcaggtctgatgtcaggttctatttttgtaagattttttttttttaaccagaatttattctaaatcatttttattaatttctggcagcctta

SEQ ID NO: 80546 - DNA, 1047 bp, Homo sapiens
taaaagtcattgttttgaaatcatagtgacacagtttttttagcaactgtttttgctactctacttcttttggccatggatcacagacccagctgttgggagaatctttatatgatttcagaaacatctgtgtggctcttatgcctttgttttccttccatttaaacaagctcaaaatttgcacaatatttgcacagtttcagattctccaagatattgtcagagtatggtccctggagcagcagcacgggcatcacctgagaacttgtaagtgcagtctcaggcctcagtctgtgttctaacaggccctccaaatgattctgctgcatggtaaaatttaagaattactgctttagaattttgtcatctaaggaaagctttgccttttgtatgtaatgacaaagttctcagtgtgatttctgctataagctatttatgctttggaaatattaatagttcatcagctgggaagactaggactacggttacctaacatcctgagatgtgattcaaaacttgaatttccctctggtcagagtttttgactctgtggtttctgagaatggctgtttaaaaaaaggtggggagaagtagcttactacctctttcagttaaaatgtcttctagattatacttagactatcagcttggactgcttgtgttcattgtcatattcatgcgatatatgatgatggaagaatgagatgaattttggtatcttaacatttaagtcctgattgttactgtgttgtcagagacagaaagtaagcttgttatcagaagttacgctgaatttatagacaggtgcatttcacagaaaaagtttggcaaagattagcttttgagcagtaattacctatggcttttgagaatggtttattcaacttgctaaagaaaaaaaaatgataacgtgttaaagcatggtaagaaaggctttatttagaacatggtgatagatgtagggaccagaccactgcagtgagattctgcactggggagagagatgggctcagctctgaatacagcataggcaggtgggggtcagtg

SEQ ID NO: 80547 - DNA, 1600 bp, Homo sapiens
acacacatacagcccccactatcacattcccaccagagtggtacatttgttacagttgatgaacctacactgacacatcatcactcaaagatcacagtttaggactttgagtttagggttcattcttgatgttgtgcatactatgagttttgagaaatatataattacatacgctaatcattagagtattatacagatagtttcactgtcctaaaaatcccctgtgtactacctcttcatccctccttccttcttatctcctgggaccactgatctttttattgtctctatagttttgcctttttcagaatgtcatatatgtagttggaatcatactgtgtacccttttcagattggcttatttcacttagtaatatgcatttaaggtctctccttggcttttcatggcttgagagtttgttttgtttttgttttgttttgttttgtttttgcattgaatagtattttactgtttgggagcatatttaattttaagaaaatgttcttgatagtctgtttcgagattggcatactaaattccacaagtgggaacttttaattatttaacagtgagttgaatacgtgataaattcccatttaatgggagtgaaattgcgtattactttaagaatgattgtcttcctgaatgaacaataattatatgagttgttgagaattcagggacaaatacaggatcttcataaactgtgtcataccaaatatcaaatattctttggactctggctcagtgtaactgtataaataatttttgctactatcacaacttaagtagtgggaatgtttgcagtttcagcacattgtccatatggtccatatgtaacggagtcaaatttgtctcatttttcaagattcaaaataagactcagtaaagttctgctgagcatcctcaattttttttaaattgagaaaccactggggcctagaggggggaaaatgttcccatttcatgccattgtggaagtgaagagtctcttgttcagttgcctgtgtatcactatcatatccttattttccaaaatcatatttgtttaatctttacagaaatactggaggggaccagaagggtaggaaaaggggcataaacattgtaatatttcatgaacttttatcacagtctaaaataggggttactatttctgttaatattttctctagaatcactggtccgtggcatattggctttgtttcttttcagtactctttactgcagagtgggagttggtttagctttgggctttaggctgagattccgcttgttttcctttttaaaagttgagaaaatttggttgggattatgcgttagctttttctccacagaaagcattccatgttaagtgaaataacccaggaatggtaatttaaacactgcatgttctcactcatatgcagaagcttaaaaaaaagttgatctcatagaagtaaaaagtaggccagtacagtggctcatgcctgtaatcccagtactttgggaggtcaaggcaggaagaccacttgaggccagtagtttgagactagcatactgtacaaaaaacgtagcaagaccctcatctctacaaaaaactaaaaaacttagctgggt

SEQ ID NO: 80548 - DNA, 2783 bp, Homo sapiens
taaagttattttatttttcctatcttaattttattctcttcttacacatactttcttgatcctgtttcttctggtatcttcagttgtttctagataaacatttgccacttaaaatttttaaattctattttaatcctttttagacagagaggtagtggttccatattctaagtgtaatataaaagtttagatgactggtgtttattgagcaggagtgtttccatattgtgagtgggtatttttgcatttcctaatagctgtttaatgactttctttgtatggtagagatctttctaacatatattttttttaactcttttaatccccaaagggtcataatgcccatgtttctcagaaacagctcagctggtcttcaaggcctagtcacaaaggaaattaattcctgatggaagtgaggacatcgaggcagaaagaattccaggcaggcggctagtaatgaatattgattgtgagctatgtggtacttgcttccctgcagagctaccacttactgtggagtagcatacgtgaaacgttgtgaaacgaaatgtctgcccatggagcatagaatttgctactcagtggcaagtagacattaaaaattcaattatgaggtggagtggtgctaggggtagtcagactttacagctggaggatgaaagggcaaattttgatatgcattaaagggagaaaaaaacaccagtagagtatataaagtagtagttcttgctgtaggaacattaggttatagtgaaaattgctcagaagttatcagaagaatgagctttcctggcatttgtattttagtaacacgtgtgtgtatttcagcagctttgtaaagccgaatgggagtttgagtggaatgtgtttttagtagtgtcttagtagagtgtcaccttaccattctgcaacactatctgtttgtcacagaaagaactaaagaattgtgtcaagtcttgaactctcaaaatataccactggaaaaacttgacaggcccagtagtaggtgagcctgaggtaaccagatacataagcttgtcagccatctgtgcctagaatttagtgaagttttcatcaggtcaaatttccaaagaatagctgtaactaaccacaggagggaataccagtggttagttaggaaggatgaatcctcctgcattggatagtggttagccaacattttgatactgaattatttcattcagctttttgaaagaaggaaaaagttattggatttttaaaaattatgaaaggatttgcttacatgataacttcaaataatactttggtgtttaaaatgttgaagttcttccttttactccttgatattcctgctttttagttagcagtgttagtagtttgttgtgtatcctttcaaagcttggtttatgtaggcatgtcatttacatactgtgatgctttgcatttagtagtatgttacaattcatcttggtatttatagtctttttttgaatatagtaattggagtgacagatattttcatttatgtaaacgtatggaactgctggaatacatctgttgttactaattgtcaccaaagggaattatgttgatagtgactgcattcttgatattgaaattggcctactgagagggaagcagggaaaagcttcattaaatggaatagaaaaatatactacttcaattttatccagtttttggctgaagtcttcagtgttcacacatttaatatcttagccatgtgggtaactcctgggacagctctgctaatttttagcgaaagcattctggaaacaattttgctgtcccttttcaagacaagcagcaatattttttactggtgtttgggacactaggtaagtagtataacctgactctctacctcactgcagaggtgaaaattctacttaatcatgtagttacgaggtaatacagacctgaaacaagttgaggagagtagaaataagaagtaattgtgaagggagaatagaatagatttggacaattggctgaattttgggatttcctgagggactgaggaggcagcaggttttagtggatagagcattagtgaacaggagtcagaatatttgaattctagctaagggttctgcaactaaagtatagcctctttggcccgtggtatatctgagtgttaatttggggcaagaattagatttaggagttttcaacctttagctgcagaaagtttgttgttgttaattagatacaagtagagctgtttgaggggtagagggagtcccataagtgttccaaagaatctttagggtctgtggagccgggtttttaaattgaaaaatggatgacccctttgtagacctacttttaaagtttttgcataagagtgttttgtacctttggttcataatgtacttggtcagtcttgatacctgcacggaagaggtcctgtgcatactttgtaaaactgagaattaagatacttatatatatgtccattgttgaaataagaccaacagaaaagatgacccatttaagatagaatgtataaaatagcacaaatataattaccctatgcaaaatggattcagtaaaataatttttattacaaggcttgccaacctctggggaagaaagagctacctgtcacttacccgagttttgaaatccaggtatatgtacatgatagagtgcagaaatgtgctgttaagtctctggttggaaagaggatgaacctgctattttcatctcttcttggtgggaagaaaatcttaggggcgtatcattttagtaaccatcttggagatctgtcagtaagaact

SEQ ID NO: 80549 - DNA, 1437 bp, Homo sapiens
tttgttttgttttgaaacagggtctcactctgttgcctaggctggaatgcagtggcgtgatcattactcactgcagcatcaaccttccaggctcaggtgatcctcctgcctcagctttccaagtagctgggaccacaggcgcatacctccatgcctggctaatttttgaattttttgtggagatgaggtctccctatgttgcccaggctggtctcaaactcctggactaaagtgatcctcctgcctgtgcctcccaaagtgctgggattacaggcatgagccacagcccccctgccagccagaagtttttaaagatcagaaattagtgtttctagctctaaacttctatgattatgaatccaagtaaaatggtagattaactttggaatccattaaggtagcttttaggacttgcctgtgatattagaacagaattttgcttactataaccttcagaagcaacttctttttgttatcaaaaagctaaactatgaaatccttccaatacgtgttgaatacaaagaagcctagataataaagagcccgttagactttatatgaaacctagtaaaagtataacctttggccattagaaattaagctttttcttttatatggtaaatgtatgctattaaaaacctggaaaaggacactttcatcctaactcctaagacttcattagttaaaatcctgctgtgatagaagccacagcctgtctttagaagtgggagctggtgctgtaataccttggtagaggtgggagctcactttagtttgaagagtgtagggttgtcagataaaatataggatgcccagttatatttgaatttcagatcaaaaatgaagaatttttatttacgtaatatggcaaccctggaagaatgtatctttgctattttggccttccagttagaacttaaaagacagccttgtaatttggtgaggtttttgtgtattaaaagaaaccttcctaaagtagatttaatatggacaaaatcatgttgcattgcaaattttgtatgagaaaatataggttagagtagcattgttttattttgataacctcacatttctatatgtgttttcttcagttcagctaccttatatctgacagtaatttttttcatttattctctgaaattaaagctgttttcgagaagaaggtgggctgagggcgtcaggctttttttttttttttttaaaacaattctccctcttcttacctaaaatatttaaaaatttagggcattattgcctaaagggtatatgataaggatgtttctgggacttctcgtttaaggattgcccttttccatatttgtgcctgggggcttggaatatatttgtattcttggtttggaagaagaaaaaggtataaatgaagatgtgattgaccacacccttttctttctaatgggttcaaaataattttcactt

SEQ ID NO: 80550 - DNA, 1014 bp, Homo sapiens
aaaaaaaagctctttagaaaaaggctttcaaacttttttgtctgtgacccagatagagaagtagtttttgactaatagaaatttataacaaaattacacaaatatgtaatatcttgtgaaacattacctattattaatctgtgtgaggtagttaagagaaccatagtgaccttctaaattgaattcacaattcatgggccgtgaaactcagtttgaaaaacagcattttcaggtatggagtagtttggggcttttgtttattttttacatgccatgttagtctggaataattatgatttttgttaacacaaggattttcactagacatttatcagtaatatcagcatatactgttattagtcattatgagtaaagaaaataaaacattttggatttatacattagccattatatatagcgattttttttccttttagaactttagaaaaaggggaagccacagtaatttgaatataatcaagacataacttttccagtatattcagttgaccttccttttaaattagaccttgtgttccttattcctgagcctttgagtttgcagggctgggagtactaatgtttattctaagccaaatgctttacttggttgctgtagtctgaggcacatttctgttgagtacagattgacttgaatactggccaagggaagagagagagagggtaagcagaaccatcactaaagaatcatctgccgttcatgtttaagatcctagagtagtgggattatttcctagtttttagacactgcttcctggaggaaaaaaaggcaacaagatgtcctcctttgttggcaactatctgtgaaaaacttctaaattcatagattgaaggaatgtgttaaatttaacttgggatttttttgattatacgagtttagcaggtttgggaatcattgccgaacaactggaaaaaaatagcacaaggagctccagcattgaaattatattcattaatgctgaatctcaaatcgtgcatcaagggagatgaaat

SEQ ID NO: 80551 - DNA, 3755 bp, Homo sapiens
tccactgtggaaggcagggtagagttagtcttatttgtcttatcagtttttcgactgtgtcaacatgacttaaagaagcctaatgctaattttagctattcagtttatggtaatagcatagtttcattttgcacaataggtgagagattcttgatcttaacatgtttaatctctgctggcttagcttttttccaatgatttataatacggtaaaattgtagtttcttagcaactaaagcaaggtttctggataggcctataaagactcatctgtctgctcagtgatatgtgttctaaatacagcatagaacggcctttcccttgaaatgagcttgaattcagtcacatgacatgaccgatgaaatgaagctgagctgctggttgacccaaatgaatgtaaatttaattcaaggaagagatggctatttttgagtttgagttcctatagttatggatgccattttatagctttctatataacatgtcttattataatattcaagctttcagctggtaataaatagccctgcagtgatctgacttcatgtcatggagtttgtgttttcttacagtgctttcaaaaagggataccttgcttgtgcatgatgttgaaatgttagaaatgttagattttctatttaaatgactggagaaaaaaactcacaagtatctctgaattgggaatgtagtagtttagattgaatatagatgtttttcaaaaggcatttgtttcattattcctaaaatgaagaatttggcctgtatgactctcaaggtctcttgaagctccagtgagtttctgacccattgttgtggacattcagggctttcattcagatggattttgtttctcatccaagaatttaaacttgtaagaccaattccaagtaaaatccttatttgttgacttctatatgtatcatcaaaatggtagtttaaagaggaacttgttctaaaaagtaaccttataagacattcaaaagcattagactgcaattgagtgagtgtaaacaaagcagtataatgtgatgatcaagagtgcaggctttggacggtgacagactcaggtttgagttccagctgtcagtagctgagtgatcttgagtaatgcaaacttcagtttcatcagttcatcatctgtaaagtggagattacaatcatgtccattccctagggatgatgtgaggattaaatgagataatgaccgcttagatttcagcctgagtctcagtacatgttagctattactactatcctttaaaaaggagcattattttttatttatttttcttcatgtgtatattgaaaacttgattgttaatgctgctgtcatggtaaataggccatttgaaggccccacatagagatttgtgcttttgcttatgtaactttctcagaaaagtgaccagctgcactgtgtctgcaattgccaattctggtgaggaagttaatatttttatttgagtttctgggagagactttatggcttttttttttcttttttttctgtgaaccaaatctttcaagtgggccaggtatcactttctcatagagtattattgttgtgaataagagaaatagagtgtggtacccggcacacagtgggagtgttatagatgttagctgaattaatgaatgtggagtggtgtgtaaaaacgtaatatattcatatggaaaatatgacatcacaaaattaacactgttcaatggaggaaaataaggaatctaatgaatcttatttttaacgacctaaattttagaaaccattttgtttgggtgatactagatagttgtgaacattgtgctttgtaataatgccagtatttgcattagatgattcatggatctttttcttttctgtcaagggctgtttgcttcagtggtttagcaattttctctcactgagtacatttttagaggtgtatttgctaattgattgcgtgtttcctctttgaactgaaatgagcaacagaagacacatcttatctatggcagctgtggcacaaatgacatgccgaatgtcaagcaaaaaattttgaaataatccaaataagatttgaccagaagaaatagtttgccttgacataaagcccttcctaaggagatcacaggctttcagtctctcaggctactggctaaaatgtcactactgatataatgcagcacccaggcatgagaaattggttcggtctgggaggataggccatgttactacatcaggacccattccctgggtttgttttacaaggttactggatccaaattagaaagagatacagatgggtttttgtgttgccagacgcagtagagcttaacttgtgaatataccaagatttaaaaccacaaaaggaaataaaaccccttagatgtgaggttggaattcattacaggtctgacttcgcttgattaatacagatccttatgagaaattagactgttttaagggaatcccattgttttttctcattaatacagatttgatgtgaaacagtttcttttgtggaatatgcctttagacattaataaaaagcaacattatattatctttattttaactttaaaataaagtttaaataaaaataattatttaaattaaaaaaagatttaattgggccttgaaagatgaccaaatgtaattagaaaagtgctctgtcagtttgaacattgtttttcattagtctgaggtactttttaaaagtaagatgttttgtgtgtaaactctgaaacttgctgggtctgtgtaaaggttttttacaacgattcgggaaggagataaagtgctaatatctattaaaatgaagtatgtagagaaacagtgagtgaccatgttggataccatacaagagatgttcaacaaaagtttgaataaaattatgcagagtagttttggaaaagtgaattttatgaaaatcgttctgatgtattctattcaatttactgtttgcagtgagagtacaatctggacaggatcagaagtagagaatgaagttgtaagagaaagggaaagacagaagaaaggctgcagtagtacaaggagaaaagcaggatgcaagaatgaggaatgaatctttgtttgaggagcatccggaaaaatataagctgtcagaaagagtaaatagaccagggacctctaaagtaaattcacacatcaaagttaaaataatgttggagaatcacctcctgtgaaaaattggcttagctttcagtatgcctctttaaacaaaacattatcattttatacaaatttttaaaatgttgttcataatatggagtttaattttaagcaccttagataatgcatttgtaagcttgtttgtgaaatttttatggattttttttttcaaaattcctaattttagttggtaaggattaacttcgggaagacaggaaacccctccagtaaaattaattggttataaatggttacatattttaggcttatatacataacaaaacttcttactgaatttaaaagtgatcttgtgtaaaaacattattctagtgatattgatgtctaaatttaaaagagtgaatacacaagtaaaatatatctgctttttaaggatctattcagtttaggaaggagagtcaaaatttgtatttaatttcaatttattatattgtctgaaactgaaagtaggcctaacttttgtttgcttttgtgtatgtacaaaggcaaacatttatcaatcaactcttattaatttgagattattttgacctgattgctcagaacttttgtctatctgtataga

SEQ ID NO: 80552 - DNA, 1035 bp, Homo sapiens
cgacccggagcgaaggtctcgcgaggcctgggcgctgcggcggcaggaggaggacggggaaggacggagccgagccgcggctgcctccctcgctcactccctcgcgcactcgcccgccccctccctccctcccctcccttccccggccccggctctggccccggcccattcgctgttgggtcttctgctagggaggatgtcgggttcgtcgctgcccagcgccctggccctctcgctgttgctggtctctggctccctcctcccagggccaggcgccgctcagaacggtaagcggggcgccgggggcgggccgggcgggggttgaggggcgccggggccggagggggcccggctctggcctgaggagacgctggagctcggggaagggggccgagtgggcgtctgaggggctgcgggtccgagaggaggtaccggctgcgggtttgaggaggcgcgggtgtgaggaccggaggctcctatccgagcggcgggggcgtccggggtgagcccgaggtgttgcccactcggaggctccacgtcgtggggctcgtcgtgccgggtcggcgaggggacacggaggaagccgacgtggggagctggagtagcgggggcggatgaggagggggcgcagctcttagggagggtggcacaagaccggcgtttgtgttccgggcgacggggatggtggtgtccgtcaggccccccgggagctggggtcgtccaggattctactgaggccccgtaggactggtgacatccttaaaaataagggggaaattggggggaagagagtcctgaggaacactaatggtgagctgagtactagagaccaaaggagggggtaaagaatcagggaaccttggatctagggatagagggaaggtgggtgggaagatgagggagtgggttgactgcagtaggggacctggagagagaagcagcagtgtctccaaatgagctgggggaagagggctgggtttgctaaagagggtggagtgctgggcattctagggtagtggttgggagagcaaaaag

SEQ ID NO: 80553 - DNA, 1068 bp, Homo sapiens
tgcaggagctgagcagggcgccttccctccgggctcctgctcccctgccctcccccaggtccgggcggcccccctcgcacaggagtcccgggaaccgcgggcgcccctcctgccctgggctgtggggcccgcggagagctgggggctcccggatcctaccccgcccccctttcctcgggttgagaggggcccgggcgccgtcggacctgcagaccccggaagctgcggaccgggccgggtgggtgaatgcgcttttgcaggccccgggtctggagcgggcatgggggcagatctgtcccgtgttgaagcttaacgaagccaccggccggcgctgggaggttagcggggtctcgggtcctgcagaggaaaacgcccagctccgggaggggagcggcggggagggaaggcgagtggttaggcgtgtccactctgcagggcccagcagggcgaaggtgtgggcgactggtgcacttccacaggcagccgtgggcagcatgaggggtcagattccgggaaggacaggtagagacggctggcaggggccacggggtgaataggtgttgggggtggggagggaattgggatgggcagtttgggcttgggaagcctcagggaggtggggggtgaggtgggatggagaggagatgcgggcgacggtggagggaggtggggaccccgagtgggggcacactagaagggaggggattgaattccagcgcccagggccctccctgcgaccgtttagctagcgaattggcaggtttggcagcctaaggcaggggatttatttctaagccaaacctgctctaatgagaaaagcgtgatagatgactcagatatgggatctatcactgagggaaaacattaagcaaatagtaaagcaaaaaagatttgtgtgtgtgtgtgtgtgtgtgtgtgtgtgtgtgtgtgtgtggcgggtgggggggtgttagttgtcttaatttagaaaaacgatttaccttcaaattggatgtggataattgtaaatgagtctgatctcttcattaaagcccggggtccttttcttataagcatgtcttcagcagt

SEQ ID NO: 80554 - DNA, 1037 bp, Homo sapiens
ctgcctagattcgcccccacctggcgtttgcttgcttcctccctgttcaaagagcagggtccatctcagggccagagcggctgttgcatagtaggtgcccaataactgtgtagaataaacgatgtgactctccccacacggtgcttggcacacaggaagcactcaataataatagctactttaataacaatatcctcatcacatttcaaattctcatcagcatctctgctctgagacggcttcctccgtggggaagacaaagctgagggtctggcgccatcttgtggccataaagaagtgcctgtctctacccacggctgctctgatttctctagagcaagaaagggttttgtctgggtgacttaccaggtttcattcccccaaatgtcccctccaaggggcaccctggttcgactgacagggcatgagaactggcctggggcaccaggggtttcagcaagagatccaaggctagcttaagaactttagagatctctaggtactgcaaagattatgatactgagtatgattcacaataaaaataataaccataaagtcaatgttatttttctaaatgcaggaaacctttaatgagtgctgtattcaattagcattgtttcaaggttgatcttcccacattttgagtgtgcctgctttgctagtgctcgaagcacacaatctaaccattaccggagaatggtagtgccagggtgggggggttcgcttcccctcctcccctcctcctcctcctctttttttttttttgagatggggtcttgctctgttgccaaggatggagtgcagtggcgcgatctcggctcactgcaacctccacctcccaggttcaagcaattctcctgcctcagcctcctgagtagctgggattacaggtgtgttccaccacccctggctattttttagtagaggtggggtttcaccatatctgctaggctggtctcgaacgcctgacctcaggtgatccacctgcctcggcctcccatgccgggccttttcccctcacttctgactcatcagca

SEQ ID NO: 80555 - DNA, 1036 bp, Homo sapiens
tcctctgccattgccctgcccttgacccctgccctctgtcacctccagctccctactcgaagcccagcatgaccctggagcccaacaaggacctgcggccaggggacacggtgaccatcacgtgctccagctaccagggctaccctgaggctgaggtgttctggcaggatgggcagggtgtgcccctgactggcaacgtgaccacgtcgcagatggccaacgagcagggcttgtttgatgtgcacagcatcctgcgggtggtgctgggtgcaaatggcacctacagctgcctggtgcgcaaccccgtgctgcagcaggatgcgcacagctctgtcaccatcacaccccagagaagccccacaggttgctttgcttaaatgtccccttgggggaggggggttctgcttctgtcggcaggggttgggagctccgaatctggccccaccttcaatctcccagaacagcaagttgcctcctaatgatagggagaaagataacggggaggtggggatgttcactggaggggttgggggcggagaaatcacaggccttcttaaggctctcctgacttcaaggctctggaagcctctgggaagaatggagccacatctgggtcagcagaggggtgggcgaaggaaaggagtcctgatggcaggattcaccagggctggagctggtgagagtcacctgccccaggcctggccctgggattggtctggtcaggccaagacccacctgctgtgattgttctcagaagattggggagactccatatctgagagtcctcagacttaatctgcttttgcatctaagaagaaaataggaagatggaacagggtctgggaattgatgggggaagagtttgggggactcgggtggtagcctagagagtcccatttctcctcaccaccctgcccctctgaccccgcccccaggagccgtggaggtccaggtccctgaggacccggtggtggccctagtgggcaccgatgccaccctgcgctgctccttctcccccgagcctggcttcagcctg

SEQ ID NO: 80556 - DNA, 1443 bp, Homo sapiens
gcagagtggggtctgaaagatgagtctttgggatggccctccacatggagacaggaagcccaagggaaggaggagggcccctgccgtgtcactctcagggaaaccagtgtggaggggacactgggaaggctgcctgctggacgagggagttgggccaggccttggagggtggatgggatggacaaacaggagatgagaagggaaaagtgttgcacgtagagggagagtggagggaagtgtatcgggctgtgggcctgtgggtactgagagggggctgcgtgaggtggtccccctcaggtgccccggcgtgcctggcacctgcatctgtgtctgggcctccagggccgtggtcagcacgggggctgtccgttgggctgctgtctcacacacactccccacttgaagtctgaccaggtgcttgggcttctggcataatcccaaaaatagatcttctggcatctaatgcttttcccttcccttttttttcttcccatcatgaaatgaagatgatggacaagaaatagcctgaccatgaggaccagggagctgctacccctccctacagctcctaccctctggctgcaatggggctgcactgtgagccctgcccccaacagatgcatcctgctctgacaggtgggctccttctccaaaggatgcgatacacagaccactgtgcagccttatttctccaatggacatgattcccaagtcatcctgctgccttttttcttatagacacaatgaacagaccacccacaaccttagttctctaagtcatcctgcctgctgccttatttcacagtacatacatttcttagggacacagtacactgaccacatcaccaccctcttcttccagtgctgcgtggaccatctggctgccttttttctccaaaagatgcaatattcagactgactgaccccctgccttatttcaccaaagacacgatgcatagtcaccccggccttgtttctccaatggccgtgatacactagtgatcatgttcagccctgcttccacctgcatagaatcttttcttctcagacagggacagtgcggcctcaacatctcctggagtctagaagctgtttcctttcccctccttcctcctcttgctctagccttaatactggccttttccctccctgccccaagtgaagacagggcactctgcgcccaccacatgcacagctgtgcatggagacctgcaggtgcacgtgctggaacacgtgtggttcccccctggcccagcctcctctgcagtgcccctctcccctgcccatcctccccacggaagcatgtgctggtcacactggttctccaggggtctgtgatggggcccctgggggtcagcttctgtccctctgccttctcacctctttgttcctttcttttcatgtatccattcagttgatgtttattgagcaactacagatgtc

SEQ ID NO: 80557 - DNA, 1042 bp, Homo sapiens
actgcaggtgcctgccactacacctaattttatatatatatatatatatatatatatatatatatatatatatatatttttttttttttttttttttttttttttttttttgcagagacgggatcttgctatgtttcctgggctggtctcaaactcctgggttcaatcaatcctcctgccttggcctcccaaagtgctgggattacaggcaagagccactgtgcctggtcagcatcctgttggatgcaggtggctcaggttaggttaaatctcttgcacttgtgtcagagagtattcataacctttggcactgccagctccaggtaattatggtgacactacttcattactaatgaggcagctctttgttagcacagagaaacacctgggtctcatagaggaggcataacccagccctcagacagagggactgtgacctttgcctccagcctttctccagcatctgagcagcaaaatatcccctgcacctcagcttccttagctaatatgatttctccaccccagcgctctcctctggatgtgtttcatccgtgtcccttgcagattgaggctctggcatggatcacgatgcttcagctcatgatagatcacctctcacctcctgcatccagggcactatgttcctagtgatacagctccagatcccattagtccagcggttctcaaccctggctgcccattagaatcactttgggagttgtaaatggtgcctgggctccatccccagaagttctgatgcaattggttgagtttattgctaagtatttgatgtgcatatgccagtggctctagtctggcttataaattaatgtaaaataggattcagaagacagccctgagctgagacctttgagaccccacctcttagataagctagctattctcagtgatcaccatattggactgtgggttttttgtttttaattaagggaagcacacaaaatacaggagcaaggaaggttgagggaagtgataatctttagttcagaaaggagggggccctgttccctgtgttgtgggg

SEQ ID NO: 80558 - DNA, 1030 bp, Homo sapiens
ttaccaccatcataagtcatcatcaccaacattgtcaccactaccaccaccataactgccatcctattgtcaacaccagcaccaccaccatctccatcattggcactgcactcaccgtcagaaccactgttaacctgttactaccattgtccataccctcatcaatatcacactgtcatgaccacacattggtatcatcatgaccatgcactcatcgccaccaccatcatttggagggaaataatgtgttccttcataaaatcaatcaagcaatcaatttcaaatccttcaagagaggccataaaagaacctacatagagtgaaacagctggacctcacggcccccattcttgctccctgggattctgtatcctttggataatctcacactaattggctactgttgccaccaaactggccctaggagctctttctttaacacctcaaggcacagctgagatagagctagagcattcatagtaagtgggacaataatattaaacaactgatgagagtataaactggcacgaacttcctgaagagtagctgaacaatacaagaaaaatctttgaaaagtgcattctcagaaatcttacttctaagaagttatcataaggcaataattagataaatttgcaaagatgatgtgtggatgttataataacaatcattggaaacagcctaaatgtatagcaaaaaaagagattgtttaaagaaactatatggattaatatgcagccattaaaacagaaaatatagatttgcctattgacataaaaatatgctgactctatattgttataagcaaaagcaggtttcatatcagcatttataaaattatcctctagttctaaaagtgtaatgtcttcacgaaacaagatgaaaatattttcacacctggcatcaaaattcttcttagatggaaaactgtctttgggaaaaaaaaaaaactttggtaaactatctagacatacagtgattgcaaaccactcagcatgagacaaggagaggaattccttttgctcctgag

SEQ ID NO: 80559 - DNA, 1032 bp, Homo sapiens
ccacctcctccacagtgccgccctcctgctggctggagcctgtgtggtccacgctccttttccgaggtgggtagggggctggggagactcccaggttttgtcagcagagaaccatagttggggaggactgcgtttccatggatacaagccatgggagctgctgggagatggggccatggtgtacacagatacagatccacacggacctgcaagaaaaatagcaacagatttgctgagtcattggccccacatatttatagtttctggcaaaggcagacctgcctatcagaggctaataatactgcagcagcgtgttaattgcaaagacggagccttcaagcatccattcagacacccgagaccgctccttgaataaagagtggggccctcacaatgaaagccgggatgcgtggaggcagcgtgtgtgcttaggagtgtatgtgcatgcaggtatgtggaacccagctctggcacgttcggaaagccagaccgaaaccaccccgcaccagagtgttagaaagcactcttcaatcacctaaggatatctaggattcagcccactctacagatgggcagggtgtgaggagattgacaagaggagagcaggctggttggctatgtcccaggggtgagaggaggtggacggggtgctggtctgcagccgtgagagacctttgtggggacagccactgtcctctagctctgcacagttgggtagttaggagaaagagagaaacaggcctctatcttctggaaggtcagccccagtgggccacctgacacacctgagatcccacagggccccaatacaggaggcagagtcaaggatgtagatgccgggagcgtgcctgacgtcttgaataaatgcccaagggataaagtcaaccctagaagaccatctatatcctttgcctcagggagccaggaggcccatttagctctgaatgaggcaagccaagtcctcacctcctaggacttcaccggacatggtggtcctgtccttggagcactgccttacagtagcattagtta

SEQ ID NO: 80560 - DNA, 2305 bp, Homo sapiens
tgacatcatgtgataagcacgtgtccaccatatcctcatcctggagctgatgaaagtactagtactgtgcaggactgagttctgagacctgcaactggagactggaggactgagccgtaactgcttccctgggaagccttttcactgattctttcaggacagtggcctagagaggtgggatggggaggtgtgttggaaggctatccttctgcagtgatgtgactcagaccagagcatagtggcaggggagtagtggaagggaaatacaggtttttattttcacccaagcactttggttttgggcagaagctgccacaaggtgtcagtaaaggctcagagaggttggctgactggtccaaggtcacacaggccttctgatgcccagacctgggcatttcctactagacccagagtgatctgctctgtctgaaattggttggcagaatcacggggcaagctcaagaaggcctgagcgaccttgctgggcggtaacataaggtaacttcctgggctcaggcctccaagggggaaggctatgtcagattacatcagtgaaatgggaggagtaggggatgagcctgggctctgcaacactgtgtgaggctgacattgatggcacagcagtgacctctccccgcccccacaccaccccaattcttcctgaatgatcgtggcgtaactactactcacacttatctgcataccttccttcaacccccagaggaagccacttcatcagtcagtcagataaagaggccaggtcctttctgctggggttttgaggctggtcctatttaatctccttttcttcaaaggcaaggaaaggccttggcaggcttgggaccctctgatgctcccacccagagaggggctctctgctttggggtctggctctcctttctgcctggccttgtgttgaaagctcacttcctctactgggctccagggcccaagttgctgggcacagtgggggcaatggttagcatttgttgaatgactgttgaagcgagacctttctggagtggccagcttcccccctgcctctgctggctctcacagctagggggctgagggctgtgctttctggggtgggtgaccacctgtagcagatgctcctggctggttggcccaagcctctccacacccctttttccccagccaccttccagtgactggcctagagatggccacgggacccacttctggtcaatgagataggagtgaagtcaccgggtagggcttcaggacattctttctagaaggtacagaactggcattcccctcagcctttccatcttctttctgcctggaagttggatctaggtgtggagttgctgcagccatcttgcaattatgaggcaacaagcatgaagacaaaggctttcacactaaggttggtggaagggacaatgagaggagcctggagccttgacggcctggtggccccagactgcccatccctgaatttctttttatatggaataaataccctcctcacccccactgcaccctaataaacagttaggacactatttattaggttctctcttactcactgtcagatgcatccttaattgttttatcaccctcctccagttagaaatgctgagctcgggtagaaagggatctctttcccctgaccttgatattggcaggaaaggtcagaacactgagcttccaatgcactgtgagtccaggatcctttggagcaataaatggcctggaaatgaggctgacttttgagtgaccagtagcttctctaatagaccgagctcagggaccatgcagtgtcttccccttctgtggaagtgccctgcttttcttaccccatgctctctcccagttccaccagcctcctgactaactcctagtgtctttcaagactcagcctgtgtcccctcttccaaaaagcccctgccacccccatcacccacccccaggatgggtcagacattttcccttgtacccctacagtaccctatgccacccgtagcacagcatttgtcaccaaagatgtcatggaccatgtgtccatgtgtctgccttgcaccagatgaagtgtctttttaacctttctaagctgggtacctagagcaggtgttccagtcattcaggaagtcattgttaacttgctcattcattcattctaggtttaccgagcttctcctagagatcccaatgccaggtggagcagctctgctctgctaagctgtcacagggcccagtgcaccttgcatagtggatcctcaggaacagtcccagaaggttggcctcagggatgggtcctccagccacaggccttgct

SEQ ID NO: 80561 - DNA, 1052 bp, Homo sapiens
aagaggtactgtgatgtgccctgggtatgcattatttcattggtgacagcctcacgacaaccctttggaggcagcatcttgttattccctcattttttcccagaggtgccatctgaagcttggaaaggttaagtagcttgccccaattacggagtggagacaggaaggcttcctggagaaatggcttttaagggatgggaagatggcaggaaggccacagtggagatggaggagagggcagagggcaggtgggtgctaagagtagcaggcagtccagacagagtgaggctggtgatgcggggaggggccagcagggaatgttgcagcagatcctggaggtgatagggagccatcgaatgtttcagagcacaaaagtaatggaaaaatgcgttagggacagtgttgtagggtggggagaaggagctggaatatagcagtgccaggagggtggtctagcccctggctccaaaagcctgcactcctggctcttaaccaacaggagaggaggttcctggagcccagcaggaaggattctggcccagaaccacctttggccataccacccaacctcaggcagcaggctgccatgacactcaacctggtaaaatgggagtcagctactcctctctgatcctcagtttccccatatgctctgggttgctactggtttcttccagccataggagggcctggatgggctccctgccttttgaagagagctcttgaatcccagggacaagcacatttaatgggagggtttcaggccaacctccaactttcaagcagcaactccctcatccagaacagctgctcaattacctcttaatcttcttgatggagtggagccagccaaccactgcaggtccacgccaagtccccaagccacatccacagatcataccctaccccagaattcccagatggctgggtggaggtgtggagagctcaggacagcttttccctcatacccaaaactgcttccctgtgccagtgggtcagaccagtagcctggaagagacaaagttttagccacagagacctggtttgaaatt

SEQ ID NO: 80562 - DNA, 1069 bp, Homo sapiens
aaagcctggcactggagggctgcggtaaacagccgctagtgaattattatttgccaagtgaattattatttgcatggggaaaactggaaggggcaattgtccagcaaatagaccctgagttgtagaatctacccagcccgccaggggatgtgccaggactgttggggcatggggctggaacttagtgctgggtactgggaagctacacgggaaaggaccccagaggctctagccctgtccccagggccccaggcttgggctgggtttcctacagttggcaatttccccttcaagcatcccccaaactctctccgtattagcatgagaatagggcgccggctgagaccggaggatccaaagatatttgtattccaaagagcttcctctgttccctcaaagcccttgttgccagagctgggaggctgggctgggatccagaggccactgtgggccagcgagggaggagaggcacccaccagaggccaccctgtgctcctggccctccaccctgaggcctctcagagggggctgccagtcctcccagctcccacccctgtagtgagcctcaattgtgtatgtgtgttgggggggcgggggcaggggtgctctctcatctgaaaaagcatgttctatataataagtgcttcgatttgttttttgcctcaaccttctatttccttgatgttttaaatcctatactattactgggaggagtatgaggtttgtatgcttatcacaagtgagcctggaatttaaaaaggttgagaaacgttgcccagcgggattaataataactgtaataacagttaacagtggtgagcatttgccccatgccaggcattatgctgagcattttacatacactatgtttttttagtcctcactacaaccttgagatactgttacaaaccccattttacagatggggcaactaggtcttagaagagtaaattaactggcccaggaccctaaaatcagtcaatggcagcatggaccacagtgtcccccagcacctccctgcccctctgatgcctctttgggaagaactagcactaatggggagtttggg

SEQ ID NO: 80563 - DNA, 1028 bp, Homo sapiens
taggtcccaaccaaaaataatcggccatctgaagtcaccagtctaaaagaagcattagaaaatgttcatctgatgtttctattgattgttctcttcccaaggccaaaactagctcagcaagatgtcttttactcttgttctctgcctctctggcaaaatgcaaacacagtttcatccttggagaactgtctttcatgcgggaacacttatttaaataaactgccttaggaacataaaagcaaaggagaagtgtagtatatgaattgacccatgtgcctccctgcccagcaaacatgagctctttagccatgcagagaaggtgttgctggggggacaggccctcattcttcagcattccccctcaaccttccagcaaagatacagcagctaagagactcagagctggtcctggatgggagactgtcgcctgaggggaaggagaccaagcactcattggggacataatggctttggagtgatggtcactaagagtgccaggatgggagcagagggagggacagttggctgaagagtgagagggatggccatgccttacctctaaggaccagttcacagcaaaagcaagggatccctcctgcccatgtgtaatgtcagccctcctgaaaacttgtagtcactgggcagggcagtgtgtatgtgtgtgcattcgtgtgtgtgtgtatgtgtgtatgtatgtgtgttgctgagcagctctgggggcacccagccagccccaacccttctgcagtttcagcctttctggcccatctacatgtcttccctcagaggggccagctagagcatggggcaggctggacaggggctcagggctgtggcacagcctgggggagcaggtgtgatgcaccttttcctcacagagcaactgactgcctggccaagggcaaagagtgcattctcaagaaagattgatcaagactggaaaataaaatgtagcttgaggacacatttgcaggctgataaatgaaggcacaattatgagggaggctttgaaaccaggaagggaattg

SEQ ID NO: 80564 - DNA, 1097 bp, Homo sapiens
cccctgcagtgttggcctcagctgcttggaatccctggggtcctgtagggccctcccgccagccagatgggcagctgctgcagcagaggagggggagaaatggaaacaggcctcagggtacccctaggcagggagggaagggaagaggagtggagggaggacagaggatggctgtgaggaagggaactcagttgccctaacgtgaaggcaggacccctcgccttgactcggacagcagggcaggggctgcctcaaggctttggatgtggggggatcagggcacatgccattccactcagcgggcctcagagccagctcttggcgtgaaaccttacccgatgctggctcctgctcctctctctttttttcttaataaggtcgaatcagagtgagtcagaggagccaagtttcctgttaggctctatttgaataaactctgctctgaacatagcctgggcctctgcacagactcccctggccaggactgcgctcctgccagccatccctgctgagatggagacctgggggtccacaccatgacttgagctagggacctggcctggcccagccactccccggggaagctttttaagctctcagagcttcagagtcccgtctgtgacctgggggtaatcatacctttcttgtggcatatttgagaggatggaatgagaggattatgaaaagtccccagcacagagccagacatgtggccactattttccttctttcctcttgacttgtgagagaagggagggatttatctcttggggttgacccccactcccacttcctctgtctttcctgtttttatctgtcttcagcatctttccttgctcagggtgaaccttgtgcaggggggccagaggtggcccctccaccagagctgtcctctcccttcctctctactccctccttctgacctcattctacttgggtttaggtctcctgcagtggctgacaggcccagcagttctgtgagcccaggggagcctgccttccatcacctctcctcatgctgggcaaggccttgccttggtggctggaggtgtcctggcatccttaggttgaaacctgcagggtggggtcctaaaaga

SEQ ID NO: 80565 - DNA, 1049 bp, Homo sapiens
aatgaggccagtgaggtgtttttttttttttttcctcggggtgcaaaattttagggggtgccaaaaaaactcagtaacggagataagtaatatttaacacaatagtttttaaaataaaaattaatgcaaaactatctgtaatgaacaaaatatccaaatatcaaataaagacaggatccgtgttgctgatttttcagttagcctcaggctccaatatggctcggcataccactattactgactctatttaaaatctggatatttcctttatcacaggttttttttttttttttttttttttgcattaattttgacttaaaaaaatacatctcaatattactcatctcaactactgtgttttttggtagcccctgaaattctgcacccaggccagtgcctgactggtctctcttgccccagccttgcagactcccctgaggaagtccggactcctgcctggagcacacgctcccctctaacctcctgcgcactcaagccaacctcacacatgcccagtaatgggcagcctgccacacctccaggggcatcccttaaggcctttctggccctgaagactcaggtttctgatgctccttgcctcaccctgtgagctggcatagaacatctctaaggggggaaggagatgccctcattgaaatgagggagaaggtggatgaggggctccttccttttgtcctcagatgacccaagccaagtgcagaaggcgagcctcctcccaaagctcggctagtccctccaccaaagccaggatcagagcccacacctgcctggccaacccctggcactgatgatgcctgggtgcgggttaagctgggaggtgagatgccaggggggtgctgttggctgggtcgggggaagtcgggagggggcgctgctccgtgcttagcagctccggggaggcctccaggaagttctaaggaggggcccggggggcccggagcagtttccagtggccaggggtacgcgcggccggaggggcgccggggccgtactcaccgcggccgttctggttgggccggtacacgctg

SEQ ID NO: 80566 - DNA, 1050 bp, Homo sapiens
acagcttgtctgatccgacacagctttctaagcctgaagactctttttctttctgaaggaacaatctgagacaacttcggggaaggaaggagggatgctgatctgtgattctgcctccagggcaagtcgcttaacttctcagggccacagtttcctcatctgcaaaatggggataacaatcccagggttgtcacagggattaagtgattctaactgcaaaactccaagaacagtgtccggcacttagtatgcaccatatgagtgtttgttacacaaacgttctggaatctgcaatgaccatgaccaggctacaccctaaccccacactggggagagactctgcttccaaagtctttcacactcactgtcccatctcaccctgtcacaaccagtgcccagaatctagcactcaaatatctgttgaatgaatgaatgaccaaatgaatgagtgaataaatgaggtgtacaagataagcaataatatataaattttttttttaaatgcatggttgttaagaactcaggatagagagtcacacagactcaaatcctggttccactactaaaagtcagcaagtgagctcgtcaccacatctgtaacacgggacaaataacagtacctggctaggacctgggaattaaaggagatgatgtataacgcactcagcaaatgcaagcataattcttcctctggatgcagatgtgggaggtgaggaccacagaggcaaagctggcagaggggtccatgctcatgccctgccccaccctgcccgcaggctgaacatgatatcctcctgggtcatctcactgtgatgcagagagcacaggttcagtttgaattcaagctcggctgtacccttctgtgccacctccctaggcctgttttctcatctacaccaggaggaccataatctgcacctcattaggaggttgtgaggatgaatgaaactgcacattgaagtcagtaagcccaggaagtggtcttcagcaaatggccaagttggtattattatccctgcctctgggctctaactctggaagcttgttggg

SEQ ID NO: 80567 - DNA, 1017 bp, Homo sapiens
gtgtgtgtgtgtgtgtgtacgcgcatgcacatgcatagctgggaattccaggacaagggcaccatggagtcagggggtaaaaaaggttggggtatgctgccagagacctgcctactgatccttaggattaagagttctggaaggctaggtaaggtcaaaccacagacggctttagctgccactctgagacttctaggcttgattctgtgggcaatggggagccattgaagaccctgggcctggcttgatggctgtcctagctctcaggcttgagctgggttacatcttcattatggggcaaagtggaatctgcagccaccttgcctgcctgctcaccaagcaggtgtggcactgccaggccagtgctgacaagttaatttcctgattatgagataatcatttcctagggaatcgggcagccagctcccgccgtggaggcctctctggctcatctttattcaaggccctgctctgcagagctttctgcttctctgccacctaggggctcctctggagtctggctgcgctagccaaaacatcccgctcagcacatatttcacaagcaactgaccagttcctcctggactttgtttatcctccagccctgggctcaagagattagggctcttttgcattccactttccatcatttgcccctcatgaggaggaggcttggagaggaaagattccagagacaaggtttactgaacccacaaaaaagaggaagccaagagggaaacaggtgaggtgtggacgagcaatgggaaggcagccacagggctctcagcgccaggcagcctccctccaggaaccgctgggcaggagggaacagatttctaatgaagcaggaaggatttaggtcagaaggtgggagaatttcctgactgctaaagtatcgtctgtaggggttgtgagagggctcgggctcttgcccaaggctggggaatgaactgaacagctcctaaaaagtattttaatctccaagtgtttatcgatctatccaacctgtgttcaggg

SEQ ID NO: 80568 - DNA, 1070 bp, Homo sapiens
ctcaggggggaagctccagaggtgagttcactgtcttgtccagtctccccagtcccctttctgaggctcactttccccatctggatgatgagggagactgaactagctggcccctgaacacaggttggatagatcgataaacacttggagattaaaatactttttaggagctgttcagttcattccccagccttgggcaagagcccgagccctctcacaacccctacagacgatactttagcagtcaggaaattctcccaccttctgacctaaatccttcctgcttcattagaaatctgttccctcctgcccagcggttcctggagggaggctgcctggcgctgagagccctgtggctgccttcccattgctcgtccacacctcacctgtttccctcttggcttcctcttttttgtgggttcagtaaaccttgtctctggaatctttcctctccaagcctcctcctcatgaggggcaaatgatggaaagtggaatgcaaaagagccctaatctcttgagcccagggctggaggataaacaaagtccaggaggaactggtcagttgcttgtgaaatatgtgctgagcgggatgttttggctagcgcagccagactccagaggagcccctaggtggcagagaagcagaaagctctgcagagcagggccttgaataaagatgagccagagaggcctccacggcgggagctggctgcccgattccctaggaaatgattatctcataatcaggaaattaacttgtcagcactggcctggcagtgccacacctgcttggtgagcaggcaggcaaggtggctgcagattccactttgccccataatgaagatgtaacccagctcaagcctgagagctaggacagccatcaagccaggcccagggtcttcaatggctccccattgcccacagaatcaagcctagaagtctcagagtggcagctaaagccgtctgtggtttgaccttacctagccttccagaactcttaatcctaaggatcagtaggcaggtctctggcagcataccccaaccttttttaccccctgactccatggtgc

SEQ ID NO: 80569 - DNA, 1109 bp, Homo sapiens
acatgctgctgggtagggtcctcagtctttctcctgattccccatgtgaagtagtttgcagagggaccccttgcttacaagctcacaaggaaaccccaccacactccagatcgaagcaacccttttccattaaaaaaaaaaaaaaaaattagtcctagagctttcagctttagttcatcaactgggagaaaggtggtagagatcttaaggcccagagaggtatctttccctaaaagtgtgtacttattaatggatggcaggtatgagagattaagcctatgactatggtcagggtgtggtgtatggccagggtcaggattcagtctgtgacaagggttagggctcagtgtgtgacaagggttaggactcaatgtgtgaccaggatcaaggctcagtgtgtgaccaggatcagggttcagtgtatacctagggtcagggcccagtgtgtgaccagggtcagggctcagtctgtgaccagagtcagggcccagtgtgtagccaggctcagggctcagtgtgtgaccaggatcagggctcagtgtgtgaccaggatcagggcttagtgtgtggccagggtcagggctcagtctgtgaccagagccaggctcatttagagacagccctctcacacttggttgctaccatcaacctaactgttcacagcatgctgccaccacatcatgaatattaaaaatgggaacagcagcctccagttcagtgcagagattaggttcctcatgagtagaatgagatcagaattccccagggcacacagcatgtttgaaaggacgaactcctgtcccatcactggcagtttggctctttagcaggcctgggtttccagcacattcctgctcctcagggcctgtcttagccattcaagacccagggtcacctaagtggtagaagccattctagggaaggaggaggaaggaagaagggggtatccaggaaacaaaggaggctgctgggggctcggggaggcagggaatccctcctgctgctgggaaagggggatgggaacagaaacagcatcccacgtgccaggcgcctggagcagccaggagggctgtcggcagggcagatggagaagcagcctgcgcggccct

SEQ ID NO: 80570 - DNA, 1010 bp, Homo sapiens
caccactgcacttcagcctgggcaacagggtgagactgtctcaaaaatgaaaaataggcctggcacggtggctcctgcctgtaatcctagcactttgagaggccaaggcaggcagatcacaaggtcaggatttggagaccagactggccagcatggcgaaaccccgcctctactaaaaatataaaaaattagccaggcatggtggtgtgtgcctgtaatcccagctacttgggaggctgagacaggagaattgcttgaacctggcaggcggaggttgcagtgagccaagatcacgccactgcattccagcctgggccacaaagtgagactcagtctcaaaaataaataaataaaaataaaatttaaattaaaaaagcattatgttaagtgaagcaagccagatatagaaggccacatactatgtggttccacatatttgagattctggaaaagacaaaactacagaaacagaaaacagcttagtggttgccgggggctggaggtgggaggtagaaaacggagcacaaagaggcaagagggaagtcctgagtgatggaggtattacatcttcactgtgggggtatttatatcactgcatatatttgtcaaaactcatcaaactgttcacctaaaaagggtaaattttgctgtatgcagattatttctttgccagacactgtggctcatgcctgtaatcccagcattttgggaggcagaggcaggaggattacttgagctcagaagtttgagaccagactgggcaacatggcgaaaccctgtctccgcaaaaaaatacaaaaaataaataaataaaattagccaggcatggtgacacgtgcctctagttccagccacttgggaggctgaggtgggaggattgcctgagcccaaggaggtcgaggctgcagtgagccatgatctgcactccagcctgggcgacagagtgagacctcgtctcaaaaaaatatgtatttcttaatatacttgaatttttgtgaagaagtggaagg

SEQ ID NO: 80571 - DNA, 1943 bp, Homo sapiens
gacatgtgagggtccagctaaatggaactctggttcctcgcagctccacgaacatgccaggttttcttgtctggggttttgcacatgctgttcctgttgctggaagggtcctcctccacctgaggactccctcctgctggcaccaccctcctctgctgggggctcaccacaggccttgcttctgtcttggcacttaccacagctgaaaggtcattgccctctgcctgtgttcccaggctaggagtgtctcaagggcggtgtggtgcctccatgtccatgcacggccacacagtctgcccaaagaaggtgctcaggaaaggtttgttgaattaattacatttctcctcacactgtcctccagctggagatcaacgatgtgaccagggcctgggggctggaggtagaccgcgtggagctggcagtggaggccgtgctccagccgccccaggacagcccagctgggcccaacctggacagcaccctccagcagctggccctgcacttcctgggaggaagcatgaactcaatggcaggaggtgccccgtccccggggccaggtgaggagccctggggaggagagcgggggtgtttaccagcttggtgccagcacagactttgctcactatcccagcagctctgtgcagtacacaccctgcacagatgttcagcccacactgaccacagccaaggcagtgagaggaggccaggtgtctgagtgtgtagaggccattggcagcctccatgggaggaggcgacatcaccagaagggcagctggaaagaattttatatctgaggctggagtagtttagaaactgagtttgcagtttaggctgaaaactcaggggcacctttctggtagaggaggaagttgaacagaggcctgaaggggatctaagaggaaactgccacaaaaggtgcagaggccacagtgagtggtcctgaccttggcaacacgatgacctcctctctgcctccttccccaaccctgttggccacccccagcagacaccgtggagatggtgagtgaagttgagccacctgcccctcaagttggtgccaggtccagtccgaagcagcctctggcggaggggctactgactgctctacagcccttcctgtctgaggccctggtcagccaagtcggggcctgctaccagttcaatgtcgtcctgcccagcggcacccaaagcgcctacttcctggacctcactacaggtgccgctgccctccttgcctctccttcccatccagcttgctaggtttcttgttacctaccccagtggtgctctcgtagactgccccctgctcctgccaataatttggggtgaacccatggcaggcaggggctcagacaccatttccaggcattaactatgccctggtctccccgccatccgcaggacaatgcagccaggcttccaataccaagaggcctgcccgtgttacaggcctgctgcctgtcaggctctgtgccaagtactttttgtacattatctcacccacttctcaccatgagcctatgctttaggaattgtcatctctaaaggaattatcatcacagatttggaaactgaggatccaagagttcacacagccaataagactcaaacccagggtattagaacccaaactcttaaccagtactctcctcccaatgggaaataccagcccctcccacccccatagatctccttcacgttcctccattcccctactgacactcggttttcttttgccccacaggacgaggaagagtgggacacggggtgcctgatggcatccctgatgtggtggtggagatggccgaggcagacctgcgggccctgctatgcagagagctgcggcccctgggggcctacatgagtggacggctgaaggtgaagggcgacctggctatggccatgaagctggaggctgtcctcagggccttgaagtagcagcc

SEQ ID NO: 80572 - DNA, 1489 bp, Homo sapiens
tgatgtatgggaggagggaacagaccctaacttgcagctgcccaaagatacgggaatattaggcaaggagccagattgagagccctgagaaggaaggagcctctcgaggggaaggtgggcgtaaggtacacttgcccaagttcactccgcttggcagctgtcgtgcaggtccagttgaccacctctgctctcacctgcagatgtaccccagagctggccctcctgcctctgtcatggcctcatcagtttcctggggttcttgctgctgttggtcaccttccccatttctggctggtttgccctgaaggtaaggctggctgggtcagcccccagggtggttgggccacactgagagctttggcattgatgaataaatttgcctatcctctgtcccctttccctaaatattattacccctttgtgtaatgggctaggcaagaaccattcattcacattggtcaggggaggaaactaaggcttgggcttgtctaaagtcatactgggagccagtagggggtagaagcaagtcccaaactcctaagtcctgggatctggacactggctttaaggtacacgcagatgtctttgccaaattatcttctctttgggttagaataaattagaaatgaaaacacccaacttagcccagctggtagtgcataataggaattcaggcctcattttccataaggggtggtacagtgggaaaaggatgaaccatggagctatagttcagcatcgcacgtgaaagctgggggaaggtggaagcccaaggaggccttgccctttgtgtagccctaggcaacagtccctctctagaaaacctctgggtttggtgtggtctgcaagggggtccttaaatggccttatatcctagttctaaaactgccacagaaacaaatgccatgtgaccttgaacaggtttctttgcctctctgggccttcatttctcaatttggacatcactacttctctaggaggtccagggacctaaagttgacaaagccctttccccgggggtgctgttagggcagccgagccttttctcctaactaatccaaggacagacagtttcctggtatgagtcatgtctaacttcagaccacagagatgaaaagtttctctaaggatcaagtcaatacagtgcagtagttaagacacatggcctttggagttattcagaactgcattcaaatcttcactatttcacttagggctatgcaatttttgagcagtcacttagcttccctgagccttggttttctcatctggaaacagtgctagggatacctaactgtgacccaggtgaggaggagagaagtgaggaagggacctaggcagacagcattggccagcctaggctgaccactttcaactctttcccttgccattgtggacagattgtgcccacctacgagcggatgattgtgttccgcctgggccggatccgcaccccccagggacctggcatggttctgctcttgccctt

SEQ ID NO: 80573 - DNA, 1030 bp, Homo sapiens
ccattacatctacggctcttagaaagcaggggctgcgtgtggctcatctttgtacgcccagctcccggcaggacgtggcacgaagcagtgccagtgtgaacggatgaatggatcaaagccgggagcagggctgcccccctgcagctctgccctacctctcccgctttaccgtaagtcagcggtaggtctgcagctctccgcctctacctcctccccgctctgggcgtgtctttaaaacccacagtcggcctctctgccccctagaaccgcccccagcttctgtctcacttcctctccagaggcgggccctgagccggcacctcccctttcggacagctcaagggactcagccaactggctcacgcctccccttcagcttctcttcacgcactccaagatctaaaccgagaatcgaaactaagctggggtccatggagcctgcacccgcccgatctccgaggccccagcaggaccccgcccggccccaggagcccaccatgcctccccccgagaccccctctgaaggccgccagcccagccccagccccagccctacagaggtactattgggttaggggatgatggggttaagctttgttggtttgctgtggtggggagaggcgggaagagagggtctaacggaggatttggtcaagtaccctagagagtgacacaaagcgggaagtccagacaccagggtcctgaccgtctcgggtggggcagggaagggagggtaggatagagtagaaaagaggacacggaggagttggggcggcctcgctgggctgcggtttctccactgagcagttgggcaaggtgagaagggtcagtggcctccgggcctgggcccttccgcccaccctcgagccctgcctcaactttgcctcagatgcaggacttcagattagggaggatggaggtagtacccctgttgcgctggcctggagccaggggcatgtcccaggcacggcaaaactaaaaccaacttcccagatccgaggtgagaaactggctcagactgaagaggtat

SEQ ID NO: 80574 - DNA, 1166 bp, Homo sapiens
tgagttccttgaaggcagaatgtatcctacacctcttatatctcagagcctattactgtgggtgatgagaagtagatgctcaataaatggtgcagtgagagctggagggcctgaataaatgggggtattggggtgctgataagccagggttttgcatcatccaatgactggctggaatggaatatgaggtcctactccagggtccagctgtaagggtggttggccggtaggtgggggcttttgggacttctccaggcctcacctgcctctctggtcccccagcgagcccccgcttcggaggaggagttccagtttctgcgctgccagcaatgccaggcggaagccaagtgcccgaagctgctgccttgtctgcacacgctgtgctcaggatgcctggaggcgtcgggcatgcagtgccccatctgccaggcgccctggcccctaggtgcagacacacccgccctggataacgtctttttcgagagtctgcagcggcgcctgtcggtgtaccggcagattgtggatgcgcaggctgtgtgcacccgctgcaaagagtcggccgacttctggtgctttgagtgcgagcagctcctctgcgccaagtgcttcgaggcacaccagtggttcctcaagcacgaggcccggcccctagcagagctgcgcaaccagtcggtgcgtgagttcctggacggcacccgcaagaccaacaacatcttctgctccaaccccaaccaccgcacccctacgctgaccaggtgagtaggccggcacagggtggggtggtgcatccaagtaccaggtagagggcgagaggagcaaagatccaaagagtcacacagctgaggacaaggagcttctggggccttgcaactctaaatgtggtctgcagatatgcagtgtccgtgttgatgaccacaatttatgctgccagtccccacgcaggtggatagtaagtttccagtttcctcctgtaataaataatgctgcagaatcatctttgcatctttatccagtaacttctttaggataaatttttagaagtgccactgctgggtgtagggggacgggaattctacatttgatacatgttaccaaactgccctttagaatttagtggaattttccgagagcactgacacggaatctcagtaaggctggattctagg

SEQ ID NO: 80575 - DNA, 1534 bp, Homo sapiens
tatgccaaagtggcatattttggagtggcatatttttatcccttatgtcaggtacaatgggcagggaaggttcagccagcaagagggcaggattcctgttccttgagcacggtgcatggccttaacaaacctgaaaaatcatgtgctcccactcccatttcacattgtttcacaatttaccagtggttactggacaaactcaacttattttttctgcacaaaacttcaatgccataaataagagctcacaactttcctctggtcacaagtcagttagcagccacctcgctctttgaccctgggctgatttagagctcacactggggagcagccccagaggtggctttaaacctgggactcggggtgtctgccctggggtggctgccctggggtggctgccctggggccattggtatttgctccacatgcctgtggagtccattttttcatgttcatgtcacacctactgtgttgcatgttctttactagggggtggggtagaaatatgaatggacatagcccctccttgagatcacagcctggtaaacagatcagccattaacaattgaggcggcagggttccgtgcagaaggctgcatgactttgctgtctattgtgactgcgttttgatagttacctttgtcacactgtcttctgtattatgtttgccctcagcaacatgtcgtatctggcacagggctgacatcctgtttgtgctcagtcatttgtggaaggaagaagtcaggcaggcacaaaggtggctgagctcagaaaaggccacttaccctgctgggatcagctggggaaggtggcttccaagaggccatcacacttagtgtgatgtataaggaaatagaaaggccacagacaggagggactgcacgtgcaaggaaggggcactagtgagtttgcagcatctcaggaactgcaatagaaggttgatgtgagggcaggcactagaagggtgagttggggtcagatgtggcaggcttggaaggagtcaggactctatgctacaatttccagaacactcagtgttctcagctttctcctttgtcatgccttcataccacctaatcttctcaccagtgactatcctctggaagacaatgggaatgggaccctgtggagggctctgttgaaaacccattgatggggccgggcgtggtggctcacgcctgtaatcccagcactttgggaggctgaggtgggcagatcacgaggtcaggagattgagaccatcctggctaacatggtgaaaccccgtctctactaaaaatacaaaaaaattagccgggcgtggtggcgggtgcctgtagtcccagctacttaggaggctgaggcgggagaatggcgtgaacccaggaggcggagcttgcagtgagccaagattgcgccgatgcactccagcctgggtgacagagcgagactgtgtctcaaaaaaaaaaaaaaaaaggaaaacccattgatgggcattgaggagtggtgggatgatcagagcctctctctgcactctggtactttgacaagagtg

SEQ ID NO: 80576 - DNA, 1047 bp, Homo sapiens
attttttttttttttttttttttttttttgtagagatgggctttcattatgttccctaggctggtctcaaactactgagctcaggcaatccacctgcctgggcctcccgaagtgctgggattacaggcgtgaaccactgtgcccagcctttagaacaatttttaacaagacttgaaattaacaagcttttggcatagtggtgcacgcctgtagtcccagctactagggagactgaggtgggaggatcacttgagcctcagaggttgaggctgcagtaagccataatcatgccattgcactccagcctgggcaacagagcgaggccttgtctctaaaaaaaaaaaaaaaaaaagaaattaacaagcttttctcattgattgctaactgataaaattaaaaactattaatagaaccaccgccagccagccagacagccattgagcaatcacttattgagcatttatttcatgactggtgttatgatagctattgccagatgaaaaagaatgcctgccttcgaagcttgaatttgtggagagtttcagcctatggataagttgcatgtgtgtgcagacttgtactctatggcaagaacccagaggtcccagaagatacgttcagatcaagtgctgtggcagttttcagaagggaaaacttgtatttatgtgggagggtcagggaaaccctgatattttagcatttgggctacaccttgaagggtttatttgtctctataagttgcatctaaaacaaactgtataaattagtgagtttttttagttagtagcttaagcaaaagctggattgatggctgatgtaagtgcataggggtcaagctggcctctgacctgaccaattagatattcagattgtgtcaccaggaggtactttctctgtatttcttgtgacctggctttcttccaagactggtccattcacagaagggtttactcctcatgggtgccagatgattgcaacagctccagaggttacaccctcagccccaaattcaaggggaaaagagtgtgaatctctcccagcattcca

SEQ ID NO: 80577 - DNA, 1022 bp, Homo sapiens
aaatgcttctattttacatggtagtaactgagtctctgcaatgaaagatcaagatggttggcttccatccttctagttttggttccatgtcaataggactgtaaggttcaccactggtctttttactttaacatcacttttcccaagttttgtattttgattgagctcttaattggatagatattatcaaaaagcaattttttttttccaagaaggacttttttgttctgaattccttgagtctcttggtgttgagaatgtctttgggttactctgatacttgaataatatctcggctgggtataatattcttaggtcacaatcactttcacaattttgtagacactgctgcattatcttccagcatcaaatgttcattaggacagctctggggtcaaactgacttgctttttctgtctttatgcctaaagatattttttattcttgaaatttattaatttaaccaagctgtcttggtgtttaacattttgtatcaaattattctggaacctagcatgctccttcaatctaaaaattatctttatttcaattgcttaaattacttctcctccatcttccttttcttccttctcattttcttctttttcttgctctattactaataatatcacaatttgtaatttattaactttaggtgtgttcagtttagtaatataacagtactactaccatttagggtgggggaacttatttacttaatgacttaatgaatgagtaacaaagattagaaccaccatatacattcacttgatacatatttttataaaagtgcttgagaatatcagaattatttatgtcacacaaggagttactgcctgttttctgtgtcaccagattctattaacatttaatgattacctttactctttgaattttgaattttgtaacaaattcctgctgtggcatattttgcaatttggttatgttctgccaaagctgtaacagtaggtgaggtgtttcaaatttggcatgactgaatagaagagctgcccgttctcacc

SEQ ID NO: 80578 - DNA, 5175 bp, Homo sapiens
gggagttcaagaccagcctgaccaacatggagaaacctcgtctctactaaaaatacaaaattagccggggtggtggcgcatgcttgtaatcccagctactcgggaggctgaggcaggagaattgcttgaacccgggaggcagaggttgcggtaagctgagatggtgccattgcactccagcctgggcaacaagagcgaaactccatctcaaaaaaaaaataaccaaataaaaatattaaaatacaaacactttgatctagcaggcctatatttataatctatttcataggaacaaaagcttccatgattaggctatataacttggatattactaaagtgttgtccatattggcaccaaaagaaaaaaaaaaggaaaggaaaacgaaagaaagaaaatgcacaaacaggaaattacctgaatgccagcaaaacgacagtgattgaatcaattgtggcccatctgggatataccagagctattaaagagaatacatctgatctgtgcctatgcacctagaggaatgctctgagtgaaagttcgttgagaggaggaagttcaaagtaattatatgacttgatttatttctttcttttttttgagacggagttttgctcttgttgcccaggctggagtgcaatggcaccatctgggctcaccgcagcctccgcctcccgggttcaagcaattctcctgcctcagcctcctgagtagctgggattacaggcatgcggcaacacacccggctaattttgtatttttagtagagacggggtttctccatgttggtcaggcaggtcttgaactcccgacctcaggtgatcctcccgccccggcctcccaaagtgctgggattacaggcgtgagccaccgcgcccggccgatttctttctttctttttttttgaacaaacatcagcccccaaaattattgtagatatctaggtcaatcatttaacatgttctgtttcttcctctgggaaatatgtataacgacaattctcactcaaggggctcttgcaaaggttaagtggcatggctgacatgtgtcaagtctgtaccatcctgcaagcagcagcccagtctggcatttgtgtaaggcggtttcagtggagagatgtgtggaagggtgcaccccacgatgctcacctggtgcttcctcggtggggaagggaaattcagaagtggtggaaagagatgattgtcgtttcgtatatctttgtattgtttcccggatgttgaaattgttactgtagtaactttttatactcatgtgttattggtagtttggatactatcaccataaccacaaacactgaattaggaaaagcagaaacctagaaacatgccatgattcaaagtctggtatttttggaagaggaatttaataacgaacgttttaagaggaaaaagtcaggagagtcctaacccaggccaaccttgtgtgtccacagcatctactgccgaggatgttccaagccgctgtgctgctcgtgcgcgctccttgacagcagccacagtgagctcaagtgcgacatcagcgcagagatccagcagcgacaggaggagctggacgccatgacgcaggcgctgcaggagcaggatagtgcctttggcgcggttcacgcgcagatgcacgcggccgtcggccagctgggccgcgcgcgtgccgagaccgaggagctgatccgcgagcgcgtgcgccaggtggtagctcacgtgcgggctcaggagcgcgagctgctggaggctgtggacgcgcggtaccagcgcgactacgaggagatggccagtcggctgggccgcctggatgctgtgctgcagcgcatccgcacgggcagcgcgctggtgcagaggatgaagtgctacgcctcggaccaggaggtgctggacatgcacggtttcctgcgccaggcgctctgccgcctgcgccaggaggagccccagagcctgcaagctgccgtgcgcaccgatggcttcgacgagttcaaggtgcgcctgcaggacctcagctcttgcatcacccaggggaaaggtaagcacgcacgccaccttcctgggcggcctgtgcctctgctgcaccctagggaaggcgagtcagaagagatcatctccatttgacagaaaagaaaactgggtgtttattcagtctttgggggttggtaaggtcttaggttccagggcacaggataagggggagatgaggccctgacaaagggctgcagccacccagaggggacacattttactaatttacaagactctgtggattgacctagcgatgactcatggggaacacgtgaaagttgaaaaactgcaaagctgagaatcagacccagtatcattttggcgccagagggaccaagcacttcaggaggttctcttaagccaccggtgtctcggaacagagaagtcaattgggacctggggttacggtagaagggggctaagaaaacctcctggggatggttggatgcttacccaaaaccatacagtggctcagtggaggagatcccttgtctgcaggatgacctgctgtctgccaacctttgcgcgccctgcctagtgttggacgcttgagaggtaaggagacacagactagtttctgatctcaaggagccagagccacttcacgtagctggagaatgagacagtgctcagctctgcaatccaaatccgggagatgtagcagctgtgtattagctggaacaggggggctttcaaaataaggggtagggggagtgtgccagagagtctccaggagtctttgactaaatctccaagctggaatgtgagctctgagcagctagtataggatgcccttactgggaaaggggagggaggctatggaatctgaaggcacctgggtagggtgccagtgacaaagagcttatttacttctcctggagctggacatgggtcatgaaggataatcttagagggcctggacctgtgccttctccacctaggtagtgaatgtcacccatattaaggaaatgaccccacagagtttacacagcttgccttgggtgttataactgggcaatagcagagagaagggttattttattctgaagcataagagatttagatttaataaaaaccaggctgcagataaggaagatcatggagctctcactatatgtagagagtcagtgagccggtagtgatggctttatgattgcgcacacttagccttgctgttggctcagagatggagagaggtacacttggggtttggagccaaaagcaagcactctaatgccacctccttttcccttctggctgggttcctgcccactgcattcgagagagctctccttccagctgcccctccagggagttgtccagtgctttgggatgccctggaaaataggtatcctggaaaagcaacagggacctcctctctatcactgtcccaggtcaggatgtcccttaccagcatgtccttgacctgcctgtgaccttctttgtgttctacagatgcagctgtatccaagaaagccagcccagaggctgccagcactcccagggaccctattgacgttgacctggtgagatgggtttgaggtctgaaggggtggtggtggggcccagcaggtcaggcaggttgtgagtcctgctgtccctgtgtgtgcagggagagcgtctgagtgagggacagcaagtggctggactggaaatttcagtgagaggaagtaaaggaagacattaaagaagggttggctggctagctggctctgactctaggctcctaaatgccaaagttgctcttgatgggccatgagccaggttcagtgggggttagatgtggggtagacagtcggccacagatcagggctgctgcagagggaattccagcattagatggcatattagtgccttccagccatgagaaactatggttgtcagatgtatggttagatatagggtcagcagtcctgagggatgtgcagatgtcctctcccctcctacaccctacccccaatgtgggagccttctcttggagtcagaataggtgggccttcccctgctctttccccacagatggttcttggaaaggaacggggaatggtgccaggagtcagatttcgatcccagttgcccgggttctgctggtgtgattccagggccaccatacatgtaacaaagcagactgtctcagggttcaaggtatccatgtcccatctaatgctggcattccttctgcagcacccctgacctgtggctgtccagctttcatgtacacatctccagggacaggaagcttgctcattctagaggcagctgctcccaactctggactgctctgacttagaaagtgcttttccgagtggaaatgcagtggtgtccctttgacttgccccctttggcattcacaagtatggctcctttccaccagaataagcatcctcggtttcttcctggacttggcatctggtctcttccctagcctagtcactcaggtttgcatgcgcctagcctatcaaggatctggcccaggactggccagtccttcatggacagcaggtcttctggtggtgggtaggggcctagcttttgccatggcatgacccataggagagagagagtgctgtaggttgaggcaatcaggagaggcttcctggaagagacaggacttaagagtctcagagttttagagccaggcaagagcatggagtctaaccccctttttttcacagaggacgaagctaagacccagaaaggatgtgacttacccaaggctacacacagcaaattaggggcaagattaaaagctgactctgttttttgtttgtttgtttgtttgttttttagatgaaggctcgctctgttgttcaggctggagtgtagtggcgtgatctcggctcactgcaccctccgcttccggggttcaagccattctcctgcctcagcctcccgagtagctgggactacaggcgcgcaccactacgcctggctaatttttgtattttttagtagagacggggtttcatcatattggccaggctggtcttgaactcctgacctcatgatctgcccgcctcggcctcccaaagtgctgggattacaggcgtgagccactgtgcccagcctaaaagctgactcttaactgccttgggtactgcattcctatatacacaacctcaagtaaaaagaggaattttttaatatatg

SEQ ID NO: 80579 - DNA, 1195 bp, Homo sapiens
ccataagcatggcccactcccagcccagcaggggtgctgagacactcagggttgtcagaggccagcagagactggtggacagcagatagtaccagcttgggaaggcttcctgtctgaagagagacgtaatctgcgtggttgagagcagaggagaggggacagcaggagcaaaagggtggccacaagtccctggcagtcagggcaggctctgcccactcacccctgcaggcacctgacctggctctgtgactccctctatgcaggatgtctccaatacaacgacagcccagaagaggaagtgcagccagacccagtgccccaggaaggtcatcaagatggagtctgaggaggggaaggaggcaaggttggctcggagctccccggagcagcccaggcccagcacctccaaggcagtctcaccaccccacctggatggaccgcctagccccaggagccccgtcataggaagtgaggtcttcctgcccaacagcaaccacgtggccagtggcgccggggaggcaggtagggaggtgggtagggcagtggcctgggtgctgcccgccagggtctgggcggtgcccctcttctgtattttggccccatccagaaagcccaaagccaacaggagtcccttattcccactgaataagatagggaaagttcacagtgtgcgtgggggtgagagtggacacagtttaccatgtgttttgccatgattgaggtgtggggagcctgacaggctaaaatgcacagttctatgagtcctttctcccaaacactactgtgcctttgcacagggcaggtctccacaagaagtttgttggctgatgcctagcatactcccagagagggcttgggcataccataacaggaaactggactccccatgaccttaactctgctctctcagtctacacccatcatttccccaagtgtttctgcaaaggccacctacctaagtatctcatttgtcagagttatcttctatgaacactgccaggcaggtagtcagttgggcaggagttgaggtcaacccagaggaatctggaacaagagagttctaaggatctgcttcacccagagtacagctttgttcctcattctgactgagccctagccttggtcacacactgagcactgactgatattccttacccacaaatgctattggtaatcgatgggttttgattaacta

SEQ ID NO: 80580 - DNA, 2861 bp, Homo sapiens
ttcaggtcccagggggcacagccacagcaggtgactctcagacttgccttgcgcctggggaattttccagtgaggcattgagtcccaagctgtgctgaggacagtctccaaatgacagctgcatgcctggaccaccccagccctcccactacaccagggccaggagctcttctgaaatgctgatagcatgtgtccagagccctgtctcttttctggaatgtccaagacctttgtctggagcttccttatgcattttctgtcctctaagtcctcagtgaggagggctggacaagaatccattccttggtttattacagccagtgggggccagtgaaggggtgtcaggccacagggcagctatataggggccaaacaagtgaggtttgactccatccatgtagaaagatatataaatccattccacagtgaaacaggtggcctcgtgggtagtgacccttctgtccctagaggtttattactagaggctggactatcacctgtccaggggaaaaggggatctgaatagagtgaaaggttggactgggtggcccctgaggtctcttccagccctcagtctgaggttctgtattggaaagtgcatggagcccatggagaccgccgagccacagtcctcgccagcccactcctcgccagcccactcctcgccagcccactcctcgccagtccagtctctgctgagagcacaaggagcctccagcctgccctgtggcacataccaccccccagcttggcctccccaccagcccgctgagcaggctgccacccccgatgctgagcctcacagcgagcctcctgatcaccaggagcgccctgccgtccaccgtgggatccgctacctgttgtacagagcacagagagccatccgccttcgccatgccctccgcttgcaccctcaattgcatcgggcccctattcggacttggtctccccatgtggtccaagccagcactcctgccatcacagggcccctcaaccatcctgccaatgcccaggaacatcctgcccagctgcaaaggggcatcagcccaccccaccggatacgaggggctgtgcgatcccgcagccgctccctccggggctcctcccatttatcccagtggctcaacaacttttttgccctccccttctcctccatggcttcccagcttgacatgtcttccgtggtgggggcaggggaaagcagagcccagactcttggagcaggtgttccccctggggactctgtcagaggctccatggaggcctctcaagtccaagtgcctctggaagcctctccaattacattcccaccaccctgtgccccagaaaggccccccatcagcccagtcccaggcgcccgtcaagcaggcctctgagagtgctacccttctcttgtaaccttgcagccaacacccctgcccggcccctgagctgcctcctccagcccatgctcttacaggccctgcacagagtagcactcattaattcttggttaaggaatgaatcaacgaatgaatggctatgcatggacctctgggcagggagacctgggtcttctctggctgagaggggaaggctaaggcatggctgagattcaagccaccattccaggcctctttgcccaagaaagaaacttctgtcacccttgcactctcctgtattctgagtccctggccaatagcacagccttccatgccccgacccccaccccaagcctctccactaggcctctgccaggatctaagcccatgagcacagggactggctatcccaagacctggcagatgtggctgctcaataaacacttgttgaaccatcacccttgcgaacccttattccacgaccatcgcgttctccgatggatccagctcctccctgcaggctgttctctcttccctatgctggaactcagttctcctctggggataccatgtcccctcttcctcccacactcatgggcatcagaggtgggaggtagggtcaaggccccctgcttcctggactgttccagccccttcctggccgtctggtaagatcctctgtccctctcagggtgggccccatgctccccagctcatcccagacacccacctgcccaccctcattgagggcagacgtgagcattcacctcccagatttcttctccctgctcaggtcctgccttcctcctgagtgacttctatttccacccacctgcccgccactccttaacctctcaggggttgtcaccccattcccccagacagctgcctgccccgtggccgtgccctgcaccttgccatcaccgagcactgtcggtccctcagccggtcctctcagactctgaccgcagcctcctgttccttgagctctcagtcctaccttcgcctccctccagccccgcgcactccccatttcatcccatctttcatcagaattgcagctccctgcccagcagaaaatcctggaaggactcaggagcttgtcgcctctgtgctgccacctggagaccgagatctgcaggagaaaggcctgggaaaactatgagtggttgcctgtgactgctaagggctccttggtgctccgcccagcatgtccttttgctctgcagggcagcccccgcctgcctttcttcactgggcccttgtcccagcctcaccctcagctgatggcggcaccttctgctccagggagaaaacaggagctctccaatggcatagggacagttgacatcttgctatttacagatccccatcgcaccccttccctgccctcgttagggtggaagggatgtccacctgcctccaggactcaccctgtgtcctggccccagcccttgaccccctgggagcctcactcctcctcctcatctctcttgcatc

SEQ ID NO: 80581 - DNA, 2781 bp, Homo sapiens
taccagggtggcctctgtgcctctaggtgcagtgtcgcgtttagtcgttattattcttgaccggcgctgggcccggtctttcctggaaagatcgcctgctcggatgcagctctgggcactcctccctctcctctgcaggctctgttttttcttggttgtggtgctcctgcaggtttgctgctgggccctttcctcttttcagtctgtgtattctcccaggtgctctcagccacgcccctgacttcagttactgcccaggggtagctgatacccaacactcgcacctgcctgccagaccagcatggccagtgaccttccaacagctccgcatggatgcccataggtacctcaaactcagcaccttctcctcccgtctcactggctcgccccactctctgcccggttgcacaagccaagaccccatagccacccagggcaccccccttttgattattcctcacatccaaccagttattgagtcttgtctttctagggtgtaaattcctctgaaatctgggcacttctttccatcccataatcttggtaaaattaaagctaccactgaccctgggtagaggcagaagcctgggaaggaaaggtggagaacaggtttggagtgccaacagtgtccccagatgtcatggagaatcaagtagagggaccccagcaatattgggggtggggcggggagtatgtaatgctcagctatcagcaaggagtcattaggggctatacagtgaattaagggagggggtaaaagcacatttcaggtgatgatgaattaaatacctaggagctcacattagagagcaggcctagagacgtggggagagagccagaggaccgctgcttttgtgtatgtagctttaagacacaggttttaaaaattgttataggagtcccaaactttagaaaatatatattttaaaaccccaacaaattaggtcccccctatgcatttctcacccaacttctgggccctttccagacccctggtgcccccagagtacacccagcaccaccactgcaaattcctactccccagcttggagggggtggggtgatattcccaaggtgatcccggctcccacctaacccatcctccccagctctgcagcttatatccagctttgcagtgaggaaagttgcagaatactggtctgctacattactactttccaagtgtatcagggcatttaggaacccctcccttgagcttcacctgtgtcctagggattcagtgagagactgtttgtgcaagaaggagcgagaggcagcagggcatagtcatggggtggagcagtgagtcccccaggcctggttgtggagtacctggggtgaggactttgcttaaaaactgccagagtgggtcagcagtgcgcctgccctggggcccctgctttaggatccaaagtggaaaagataggtgttttcacccactcttgtgacagattactggctccggtgccttggtggcagcagcaacaggagggggccaaggtgagggggcagcctgtggcagaagtggcagtggtgacggcggaggaagggaggcctgtggggaatggctgatccaggggaggggccgtggcactggtgagtgtgcatctgagaaaatgaaacggaggtgctggccaagaggctggagctaggcagaagggcagcagaggccacaggctggccgagtttatggtccagttcactcataacatgtgcagtattcctggggtctttgaggctttgcaagagctggggttttgtgtctgcagaaagatagcaatgcatgtgtcttgccaaactgatcccagctgtagctgatgcttaagtgctcagaaagttcttcaggagcttgagggctcttgataagcatgaatgtcagatgttctgtatcttccagaggctggatgctgactatcagagtttggcttgtgtttggctgatgagcaaacctggaatgaatcagtgataaggacaattgttctcaagctggctgtacactggggagttttcccaactacagattcctaggtcctacgccctgagattctaatcgaatcagtcttgggtgcagcctgggcctcagttttttcttaaagctatgaatgcctaaccaaagtcaagaaccactgaatcgggggattcattgcatgtctgtggtagaggaatgctgctcatttgtttatagatgtggcagtcttgaatgcaggtgacattttcataccagggtgtaataccgcagaggaggggagaggctggatcttccctgatgtacctcctggacttttggagtgtgattacaatgccaatccagccacttcctctgagcatgcttgggacgactgttagacctgctgtgttgagttagaatgcacttgacctgctcaggccgtgaaatctatgaggaaggggagtgagatggatgtagctcatgagccagattgcaggtgtatccaagttgcatgtatatcctgaaaaaatcctggctctcacgaggctcagcctgaacacagttttgcattcaaagaaacaatgtccattaaccaagtataataaagaaataaatcccagtatttacttgcatcttttgaaagaacattaaagggaatccagctcataaccccagcagcacttcttcagtccttcttccccttttctttggcgcctggcatctctcactgcatagcaaagctttcccccttgattcccggtcctcacacgcaggctcaaggctctgtttcccatcttctttcttctgtcccccttccttttctcttccaagca

SEQ ID NO: 80582 - DNA, 1008 bp, Homo sapiens
cggagcaggggagaattctgggtttacagctggctggagttccagtgagaccagctccatgggtggccatactttatggaagtccccaagggcaagaggaattttggaggaagtgagtcagggctgaaaggtccagcctctcctccattaacaagcttggtggaaagggggtgtccttttattaaaggagacagtagaggtttcttagagaaggcagctcgagtaagtttaggacaaaggacatttccctggccccgggacaatggaaggctctaaaaacgaggttctagtggctgccataaatgaccctgctgtaacgatgggaggggtggcctaaagagacagtactgtggctctccagggagctctcctcttggaagagcagatctgaaggcgggaagactggttctaaggccgaggacattgccccgagctttgtggaggcactcaggaacacaaaggggcatttccagttgggtttggagcaggaagaagaacgaaaaagagaaagtcctgtgtgccatgtcagtgggtggcagcatggactcagcctcagctattggcaccaaggatctgaaccagggaggacccagaaggggagcccagcccctccaccagcttgtgggagagcgctgctgcccagtgaagcctggagagaggaaacaactggattctcccaaagcgggagaaggtggagtctccagccacccagctacaagctaggaagacgccttgtagaaggctccttacagggaggaaaccgagttggaaaggcgagacagcagtgtgggctcacccggagcaagacgtgtgaaatcagcttttgacagcgtggctgaatgaggatctggagatgcgaggcgctgggcagactctctgactagatccctggatatgaagaggcaaagccagctctagatggattcatagtgagtgtctgcttctgacaataactggcagaaagctgatgagcctggagcagggctgtgaaatgcaaatccagtgaaa

SEQ ID NO: 80583 - DNA, 2675 bp, Homo sapiens
ctcatgagggtgtatgccctggttcatacatgtaaccctcacatgtgacacacccagttcacacccattcatgcacacataccttctcttgtgcacacgtcccctttcccagtggtacaccctccttcatgtgcacgcagatgctcccagctataccagcttgctagtgttctgcacaggtgcttgccttggccctctgaatccctgacgcttggtttttctgtgttgcagtcctcccgagagctggatgacagcagcagtgagtccagtgacctccagctggaaggccccagcaccctcagggtcctggacgagaaccttgctgacccccaagcagaagacagacctctggttttctttgacctcaagattgacaatgaaagtgggttctcctggggctacccccacccctttctaatttagtctctgagtcccaaaaagaagtgcaggcagagccatctgccaggcccaggagagctctgagctctggccaacaactgcagccaggctgggcagagcactccggctcacctgggctcctggcgtgtcatttgctggcttgaataaagatgtccgccttatccagtgcctgagtgtgcgagagaggcagatgcctccacaagtgcacctctgaccagttcttctctcagacagagagcctggggaacacactcctagacagaaacacaatgcgtgagctcattgccgtgagccctgtcatccaagtaaggcctctggctgtgctacacgtttctgagtagagggccaatcccacaggtggctgcacagggctgcccacagatccaaggtcacagagggatcagaccccttatcctggaagcccctctacttcctccagtgcttgccctggctctgcaaatgcccctccttgagccagagccccaggccctaccctgtggcatggactcaacattggggctagcccagccagacagaaacagcaagtgttttcatggtacagaaaagtcatttgcagacctcagtgggaggctcttggccttgctctgagtggagtgctttctatgtcccagggctctgactgggctggggtccttgaggggattggaggaaggagcatgggatggagagctaagttcaagcagcctgggatctctagtataggtggctgaggctgatagaagacaggagggacctgtatccatggggtttggccaactctggggccggtagtggaggaggggagagctggatccccagctggtgaacaaagtgtttggagggcagccgagcctccccttctgactgctatcccaccacaaccaggatcagagctgcatttgggggctgatgtgtggctactgccagcagaccccaaggtgaggtctctagatggtgagtcagcagccctagaggaccccctgctcccaccccagagctctctgtgaccctgggtcctcaccctgcccttctctcctgcccagcccagaagattagccagctggctgcggtgaaccgggaaagcaagttccgcgtggtcatccagcctgaagccttcttcagcatctactccaaggccgtgtccctggaggtggggctgcagcacttcctcagctttctgagctccatgcgccgccctatcttggcctgctacaagctgtgggggcctggcctcccaaacttcttccgggccctggaggacattaacaggctgtgggaattccaggaggccatctcgggcttcctggctgccctgcctctcatccgggagcgtgtgcccggggccagcagcttcaaactcaagaacctggcccagacctacctggcgagaaacatgagcgagcgcagcgccatggctgccgtgctggccatgcgtgacctgtgccgcctcctcgaggtctccccgggcccccagctggcccagcatgtctaccccttcagtagcctgcagtgctttgcctccctgcagcccctggtgcaggcagctgtgctgccccgggctgaggcccgcctcctggccctacacaacgtgagcttcatggagctgctgagtgcacaccgccgtgaccggcaggggggcctgaagaagtacagccgctatctaagcctgcagaccaccacgttgccccctgcccagcctgctttcaacctgcaggctctgggcacctactttgaaggcctgttggagggtccggcgctggcacgggcagaaggagtctccaccccacttgctggccgtggcttggcagagagggcctcccagcagagctgagaggagggggtgaccagcttggagtctctggtgggcagagagggatggggtccctgagccaggccccacccatcacagcattcccaggtcctggtacccagccctcagttgtcatttggttcagaatcagttccctttctctgggaccaaatttcccttctctaaacatcctacagagaaggttccaaagctgagcacccatcaccctaggtgtgcaccagactcctattagcccctccttccaggagctagaaccagggaggtcctgagtgaggaaggcatgacctctgggctctctaggtggccctggtcttgccccatccatcccacctgccactaccttgggtgtccttacagctctgccctgaccccagcccctgcccctggacacctgctgacagctcccacacagaacagtctgagg

SEQ ID NO: 80584 - DNA, 3665 bp, Homo sapiens
tggcaactcaaagtgccttccaaaccaaactgcccctcatgaggttagggtcccccaccctccacctgcccagaggccaactctgttcccttctcctttcatcccagaggggcctcatcagcaaagacagaaactgatgttccatgcatgtccctgcttccaaagcctgaccttccaaagcttgcttccttcctcctggctgcacagacacctctgcttggccacagctttgctctttggtcctcaggccaccagacccctcacagcatggcccttggctcttcctgcactgccctcaccctcagccgtcccaaggagtgcccagcactactcagcatgtagtccaggacctgcggcatcagcatcccctgggagcttcttagaaatgcagacctgtgggctctaccacaggcctctggaatcagaatcttcagggtggggcccagcagtctgtgttttaacaggttctcccggtgatgctggtgcatgctcaagtttgagaaccgctgctctcatagactgctcctccaaggggaagcagtgtggaacagcagagaaagtcccgtccctatctctgactgtgcagtgagtgtggcctaggaacaggtcccttcctaagctctagtgtccccatctgtaaaatgggctgattggcctccacggtcagagcggccatctggctgtgccatcctgcatttttaggaatggaaagcaggcctctgaggcagtggacaggaagacttctcatccttgaattctagctcccattccaaactgttagtccccaaccttgtggtcacatcagaggtcaacagcagaacagaggcaggtcagggttgtccgctctgattagcagaacgacagccccttcctcctcctccctccttcccatccctactcattagctccctgctcctgggatgcttcccaagcagcccaggcctctagcctccatggctgatgacctcagctttcacactggtgaagtctgtgtacccatactgcagccccatcccatggggcccctgaagacccactgaggaattccgtagggtcttgttcccacgaccggagtgctggctctcacagtgaattttgatgcatttaaaataagattctgatgccagactgttaaaacaggcgctggttctgaagcaccgatggaaacagattgatgcagatggaaggaggaagggagactgggcccactgatttccagccccaccatgtgtgctgttttcagatgtgattgaggggtgttctgccctgcctccactgtcacagcctttaataaagatgtgaatcttgaaagcctgatgctccaatcacagactctgctcagcatccccagaggaaccactgagaagccttttgcctggataggagggggctctcccaggcataggcttgtggccacttgcccagcacaactgtgttttgtggggcgtcttttaggacttagcagagctgagagccctttgttgctcaatgctgtgagccttaagcatgtgaatccccccacatgacaagtggggagacccagggtaggctttcctttggatcatctccaaatgggagtgccatgtggcaggaaagaagcaccgatttcaagaattacttcctagagaaagtcaggaactagagaccagagtctgcaggaactttgccactgcccttcactggctaatcctgtacttctctctgtgttccttgagtgacaggtggtaaaacccttaaaaagggaggtgtgggaggcccaggactttggtaacaggtgatgaatgtgttgtcttggccatcacaggtggagcttcagttagtacccgagggattcccctggcacaagcattataggaattagtccaccactggcgtgggtgagcagccaggtaatgggaattgatcagtgccaccacccttgaccccaactaccatcccagatgcccagattccagtcctggagttttattctctcagcttgatcctttgaccaagaagatccagtcccaatatgtcacctgtgcttcatctttggactatatctcaggtgtttacgtgtcaactaatgggagcttactgggttagaagtcaggacactgagtttcaatcctcacttagtagtctgtggccctctttggcacattaacctccctccttgatcctcaggctgcacctctggcaaatgggagaatgcggctccttttgacttcaagggatctttgtgggaaccaatgagaaaatgtgtgtgaagatagctttttggtatattttaaaagtgcacaaatttaagatcttactgctttataaagtgctttatgaattataggaaaataaacacattttagatcttagaaaaaaacaaaaaaacatgggcttgtcttcagggtagtaaagaacaagatctgggatgaacaaacaattgtgggggtcctggggtctgaaggagccaagatcaaggggtcaaccatggaggggctggacaggaggtggcactgtgctcccagcacacccagatgggacatttcactcactggggcccggagtagacaacaagctttctatgtggcagctcagcgaagccctgctccagggtctccttctgaggcctgaagtcatttaaaaatctgctttgcccctaaccccaacctggctcttagctccagcagctgtcacagagcctggtcaggctgttttcccaccctctacttccccttgtcctggcccatgtccacccttctccctgcccatgtccaccattctccctatcccagcctcactctgactcctggccccaaccctgaccactctccatgcctcagagtctcaccctcagcctagccctgccagcaggccccatctcctcctctgacctcagccttgtctccgcctcacaccccaggtgcctccagcacctaagcctagagtaaggggctcccttctcatctttcctcactcctcacaattaaggaaactccatggctagtgtgcataccacccgggctggaatgcaccaaatgtcaagtcaaagggggtaggacacagggaaccctgcctggcgagaaggggagctgagctagggctgctcccggactctgccagcagagggcgctgcagcgcaccccccctccccccccccccccccgccacccggtgcctggcaacgggcatgggccacggtagtgctggtggtgctggtggtttaagctcaggcagctcagtcctttctaaagtgctatgcgtgcttcctgtggtatgggagataactgtagatacgaggcacgtggagaaacatttttttaaaatgttaaaccttttatatttagtttaacatctgttagaaacaatacaaccaggccatgcgcggtggctcacacctgtaatcccagcactcactttgggaggccgacgcgggtggttcacttgaggtcaggagttcgagaccagcctggccaacatggtgaaacctgtctctactaaaaatacaaaaatttgctgggtgtggtggcccgtgcctgcaatcccagctattcgggaagctctgaagcaggagaattgcttgaacctgggaagaggaggttgcagtgagccgcgattgtgccactgcactccagcctagatgacaagagtgaaattccgtctcaaaaaaaaaaaaaaaaaaaaaggaa

SEQ ID NO: 80585 - DNA, 1013 bp, Homo sapiens
aggtctctggaagctacccccaccttctcatccctgtgcttgaactttcattttaattttttcatttagggcagtgtttctggacctttttataattattattattgtcctcttaaggagcatttttagcatcttttcccaattgtgcctccctgtatgaaattttaataccatagatacactgtacattccataggattttctagatacaagatcgcatcatctgcgaatagagatggttttacttcttccttacatggacatatgtatggactgtgagcctttggagggtcagaaaccatggtaatagccaagatggtcaactgcccttcctcccctgccttttcatcctctgtggggtgataatgcctctgttgagaatgcatgatttagggtaaggccccaccccgttacaatgtaggtaagaagtggtcacgggaaggagtgggtgggatgcgggctgcacctctatgtgggtggagactaggtgggccagatggagggagatggaagggaatggagatccaggtttctgagaacacactcgcctgtagtggccttggtcctggtcccaggcacaggcacaggctgagcctggggctaggggaggaatggggccagtaccgtcacttatttttgtctctgaatccagatgtcagctccagacccgctggacctgaataaagcaaatacctgtggagactctgttgagagaagagtctagaatttcaacagattctccccatactaaaagcaaacaaacaaaaacaaaatgaaacaaccaaacaaacaaaaacaaaaaacaggaagtttggacgtctctgttcacccttacaaaatgcatttgctgtcaagtgaggggaaaattccttcattcttggctcaaggaacttccttaaactaagaccagctgcctggactgtgctaaattcagtttataaatattataaatatcccaaacttgatagccaagcacattacaaaagctagctagctaaccgcagaaattttcc

SEQ ID NO: 80586 - DNA, 1142 bp, Homo sapiens
ctcccctcacaggagctgcagccccgggcaggtgactttggccttagatgcagtagggcatggggatgggcttccccagatcccacatctcaagtcgtgcagtgcaggtcctcctattgcttctctgctgggtttcggtcacagtggagggctgtatgcacacacaggcacatgcctgtgttcttgtgggtgggtcggttcgtgtgaggacttgtgtccttgtgtctgtcaattgtcacaatggacaggaaagcgctttgtaccgtggtggaaaacacgtacaaatgctggttaagagaacaatgaggtctgcagggtctattgtgtccatgtctgggtgcatatgtgtttgtgagtttaggaaatgtgttgtgagcctcctaattgagcatcaggtcctctaaacccctgcagaagttggcggtttgattatgaagccccgcgtctgtttgtattgttgtgtgcctgcatgggcgtgtgtgcgagtgctgtgcgtgggacaaaggttccagggaggacagccagtcacggacaaaaatgtccttcttgggtaggatccatttcaccaggttaaacgaaggcttagaaacacagagaggggtacgtgaggagcccgctggagatgggcgagctgcggagcccacggaggggccagctccagcgtgaaggaaggagtaggaagagaaaaaagggcgatataccgggccgctggaaaaggaaattagggccctgggagggagcatccgttgaacctcgagatttttattgaccttcacttcagagaggctcctggccatagaggaggttaccggagccctggaactagtgctaaacgggcttgcggaggcacagcttgataggggaggtaagctggggttcagtgagtcaccttctttcttcttcacctggcttccatctgcaggagccgcgatgttcccccttcgggccctgtggttggtctgggcgcttctaggagtggccggatcatgcccggagccgtgcgcctgcgtggacaagtacgctcaccagttcgcggactgcgcttacaaagagttgcgtgaggtgccggaaggactgcctgccaacgtgacgacgcttagtctgtccgcgaacaagatcactgtgctgcggcgcggggcctt

SEQ ID NO: 80587 - DNA, 1045 bp, Homo sapiens
acaagaccgctgtggcttgcacaagagaagtcacaaataacacaaagtacagagcgggcaaatgatgtaaagcaggaaagggggagaacctggccaggccgattgcccagagcgagccggcacgtttggcctgggagccaagtgtgtgcgttgtgtgggtgggtggggagcactcagtgaatgatgcatgcacaaccgtcagggtgtgccaagggggtgcacctggggaatcagggttgaaaacacactgatttcatagtcctagaaaggggctttcttgggtgaggaacaggagagacagggggatcaagaaaggagactgtgctcctggccagcctaaaacacacgggttgggctgctgtgtgtctcagctgaatccccctaagatgggaagaggcggggaagagagatggaagaggaaagcaacagaaatgggaagcagataaagattctctctctcccctcccttcttcctgcttccaatttcttgtcctcttttgctgtctctgtgggtcttcctaattggaccagtccaggctggcaacaggcccaagttccaatgctcagggtcctaccccagcctcaggtctgtcctctggcataggtggtggctgtgacacttcttggggcctgagcccagattcccttcccagaccagcaaagctgttttctttcttttttttttatttttttatttttaaaatagatcagttttattctgctagttccataaaaacaatgtaaacacaagcgttctgtacatcttcttggtgaattcacataatgctttgttccctgatcctttaacctcctcgtcttcttccagtcattttctgtttggaccactggccacaggagtggagtggggttggggcttaggagagagcaatgtggctttttcgtatgacttgttttattgcttgccctctcagcacactcctgttactcctaacacaaagtctgagatttaagcccttaaacctgtaggtttcaccatcagctttttctttttcttttctctttttttttttttttttttttgcat

SEQ ID NO: 80588 - DNA, 1058 bp, Homo sapiens
gcaaagcggttgagggaaagggctgctatacggttgacaacgaggtgcagccatcagggccggaggacaatgtggtcatcatctacctcagccgtgctgggaaccctgaggctgcagtcgcagaaggggtccctgggcagctgcccccaggcctgctcctgctgggccaaagcctcctcctcttcttcttcctcacctccttctagccccacccagggcttccctaactcctccccttgcccctaccaatgcccctttaagtgctgcaggggtctggggttggcaactcctgaggcctgcatgggtgacttcacattttcctacctctccttctaatctcttctagagcacctgctatccccaacttctagacctgctccaaactagtgactaggatagaatttgatcccctaactcactgtctgcggtgctcattgctgctaacagcattgcctgtgctctcctctcaggggcagcatgctaacggggcgacgtcctaatccaactgggagaagcctcagtggtggaattccaggcactgtgactgtcaagctggcaagggccaggattgggggaatggagctggggcttagctgggaggtggtctgaagcagacagggaatgggagaggaggatgggaagtagacagtggctggtatggctctgaggctccctggggcctgctcaagctcctcctgctccttgctgttttctgatgatttgggggcttgggagtccctttgtcctcatctgagactgaaatgtggggatccaggatggccttccttcctcttacccttcctccctcagcctgcaacctctatcctggaacctgtcctccctttctccccaactatgcatctgttgtctgctcctctgcaaaggccagccagcttgggagcagcagagaaataaacagcatttctgatgcccctccgtgtctgcctggaattttgtctggatctaggagcctctgctgggagataggatcaggagctgaagagtcagggcagccagcctgcctgcccacagtggcaggggcctctgagactccaaca

SEQ ID NO: 80589 - DNA, 1044 bp, Homo sapiens
agatccattctatatttaaaggccatttcttcctccactctattttttcctctctgctcctcctccaccatcatcatcaccatcatcaccaccaccatcatcatcatcatcaagttttataagtacagtgcagactccaacccaacccaccccagcaatttgtgtctcacttcccacagacaaatccatggtattaagacatctgtatctggtttctctcaaagactctcagacctaatgacctcagttcagaccttggatgctttacccagcagactccaaacgaaggactgcctgccatgcccagtactaggagcagggctgggtacttccccctccttggttgtgctatgtcagtgcccagatggctgatgtgagaggcttgtccagccaggaggtgcttgtggttcctgcttctagaggtggtgtgagtcaggggctgaggtctgcatccttgggggaaggtggaggcttagcttggggagggcagagggttggctggttggcccctccggggcagctgagcaggagaggttgctctgagccctccacagggctgagaccagggagggatgccttctttctcttcccttcccatgtgcctttccccatgatggcaccttccctcttctttctttcctggcctgttttttcttttattttgtttttctcttgagacagggtgttgctctgtcacccaagctggagtacagtagcacgatcatagctcactgcaaccttgacctcccaggctcaagtgatcctcctgcctcaggttcctgagtagctgagactacagacgtgcaccaacaagtccagctaattttttgaattttttgtagagataggatctcattatgttgccagggctggtctcaaacttctgggctcaagcgatcctcccacctcggcctgcccaagtagtgagattacagatgcaggccatgcacctggcctctctttcctttactacctctgcttagaggcacaagaagggggaaccacgaggccaggatgtggagagggcaggagcaagtggtttat

SEQ ID NO: 80590 - DNA, 1042 bp, Homo sapiens
tttgaagggaggccttgggggcactcattatagcaggggttcccgctgggaccagatccagaagtttggttaggaatacaagccctcgccattgggaagggtcccagggctgatgggggtgacacggagccccctgcaccctggccatctctcctgggggccagagtggctcatcttcttgacccctgcggccctgctcactcccccatgcccctgctcttctttagccatcctggagaaaattctctcttgtcgcacctaagagggtcctgaaacagcaataaggacatctagcccctgtcttcacatagcactgcagttggccaccctttccccaccttctcctagagcattattttgggaaagggacactcccggaattgaggttggatactcagtatagaggcctctagaagtttctccttaggtctagcctcctttgcaggacaactttctgtggaaacctgtggcctgggagacagtctcttctccagccccttcccctctcgagagagcagactttggatggagctgggtgcatttctagaatgttctctcaactggtggaggtgcaaggagaaaggaagggcttgtttcctccctcgctcaggttagaaggagctggcatcagaatggggccggggagtcccatgctcagctctgtgtgctgttcttcccaccccagaaaccctgcctcccacctatgccttctgtgtccccagccctggttctgccctgggaccttgggatgggcctgagggcagtggctgggagtctgggagctgtcactcctggggcagtaccgccccctgctggccacccagagaggcccggaggctagaagtttcattcagtgcctgctggtcagcccagtgccagctgattggccccgtggggctggttcctgggttctccaggaacagcctgggtgcgctctggcacagattctggcttggtctctggcaggctgagtggttttagacgaatttctcttcctgactgggtgggcctcaatttcctgatctgtacaaagagtagggtg

SEQ ID NO: 80591 - DNA, 1201 bp, Homo sapiens
ggccgcctccctctggctgggggtgctgcccacactcactcttggcttgctggtccactagggcctcccgaggctgggcatgcctcaggcttctgcagcccagggcactagaacgtctcacactcagagccggctggcccgggagctccttgcctgccacttcttccaggggacagaataacccagtggaggatgccaggcctggagacgtccagccgcaggcggctgctgggccccaggtggcgcacggatggtgaggggctgagaatgagggcaccgactgtgaagctggggcatcgatgacccaagactttatcttctggaaaatatttttcagactcctcaaacttgactaaatgcagcgatgctcccagcccaagagcccatgggtcggggagtgggtttggataggagagctgggactccatctcgaccctggggctgaggcctgagtccttctggactcttggtacccacattgcctccttcccctccctctctcatggctgggtggctggtgttcctgaagacccagggctaccctctgtccagccctgtcctctgcagctccctctctggtcctgggtcccacaggacagccgccttgcatgtttattgaaggatgtttgctttccggacggaaggacggaaaaagctctatttttatgttaggcttatttcatgtatagctacttccgactgcatctgtatgaaaataccaaaactacatgcgggggggtgggtgggaaagggaggggctgggaagggatgggttggggagcgggggtgatcccagtctgaggctcccggggatgagataagagtctggagacgggcatgggttcttggagagtggcatgagctggctctgccctgggagcccggtctgagggggacgttgttggagcccctagtgttgggggtggttatgggagggggtggggtgagggaaacgggagaatgaaggagaaaactgagccctagtttcaccgtgttcatttggaaggacgagccgggtcctcagggggaggttccaggactctgcccttggcgttgagggttggggggcggggggcctcctcccttcctctcagcccccttccccaggggctgtgcttccatgctcctagcctcccaccttcgctcaggacatgttataacttaggctaaactgtgaaaattccggtggggatggcctggg

SEQ ID NO: 80592 - DNA, 1050 bp, Homo sapiens
accttctactgcgtgggcttctgcccctcatggtgggaaggagatggcgagactccaatgctggccttgccctgggaggatggggctcctggccgagaaactggccgtcatgggaggcagtggctgtgggattatgtggccatccaaccctctggatctcccacaggtgaatggcactgtggtgccacttggcgagatgagaggctacgcccccttcagcccggacgagaactccctggttctgtttgaaggtagggcagtgctggagcaggcgccccagggggatgcttctgaactgggctgggagaggagtggtcagctctttgtccagtgtccggaggagggacttccaggagctgcctgcccttactcatttctccctcccactgaccccaggggacgaggtgtattccaccatccggaagcaggaatacaatgggaagatccctcggttccgccgcatccggggcgagagtgagctgtacaccagtgatactgtcatgcagagtgagtcaggctccggctgggctgagggtgggcaagggggtgtgagcacttaaggtggcagatgggatcctgatgtttctgggagggctccctgagggccgctggggccatgcaggaaagcaggaccttggtataggcctgagaagttagggttggctgggagcagaggaacagacaaggtatagcagtgggatgggcccagccctcttcaggaacacaaacagagggagccccagacccagtgcagggtccccaggagccaaagtttatcctctgctgagttcacgtggaggcagcccccaactccctcctcatcagggctctgccaattgagcagaagtgacataggggcccccagggaccttcccccagtccccaggcatgaagtcattgctcctgggccgatgacatctttgtaggaagagggcaaaacaggtgtggggtggaggtgcagggtctagggcccctcggggagttggacctgatgttctgagtcctattccagatctgatttgccatggtttgtgcagacccgaaggaggg

SEQ ID NO: 80593 - DNA, 1030 bp, Homo sapiens
tcatgagttccaggaggtcatgttgtgacttgagacaaggtcactggcctatctgcacagtccatgcgggctgtgggacaaggtcagcaggaccaatcaagtgggctgtatgtagccatcccacagggaagcagtcaccaggagacgactgtctacggtagatatctggattgagcacatggaggaactgggaggaggtggggagctggaaacggtgtcaaggttgactgagccctgcttctagtgtgagaaaacccagcttatattcaaaacggatgccagggcaacatcaaagcataggaattcactacattcacctgggcctgcacacctgtgctcacttgcacacactgtcttcagggtgttacgggcagaggtcaggacttcattagccaagtagcctctaactgggcctcaccctcggtaggctttggtctcctcatctgtctgggaagggctgaccttggaagcctccaagggctcatctctggaatacgatgttataagcacagattctggagtcagcttgcctgagtatgaacctctgctccaccccttactagctgtgtaatgctgggtaagttactcagcttctctgtgtctcatggtcctcatctgcaaaatggggataataaaagaacctacttcatgagagttcagtgatgattaaatgagttaatatatctaaaaatcatttggaatagtgtttggcacgtagtaaatgcgatggaagggttgggtggtaggggcatcatcatcgtcgtcatcatcttcctcctcctcctctggcatctctggtttctgatggaatgcagccctggcagcccagcccctgccagttctccctaatgggctttgctggctggctgcccttgctcagtctcccctgctggttcaggctaaggctaagactggggaaccttctgtttctcagcagtcttccacctgcctccctccctccacttggggttgtgtagccattctccgccctctccccgacccctgccctggctgtgggcccaagggcagg

SEQ ID NO: 80594 - DNA, 1132 bp, Homo sapiens
agaccacaagtctggcttgtccgcagctgggctttccccgtagagttgcccgggagagggtggcgaaggttcccccagcagttccgctctcgctcaggaaagccagtgaggcgagaaaaggctgcgaggggcggggggaggggcggggtggggtcagcgctggctccgcctcctggcgcttgggtctgcctgcggccgggcgctggctcagtctcggctgattgccgctgtcgctcccggggccacgggatgacgcctcctccgcccggacgtgccgcccccagcgcaccgcgcgcccgcgtccctggcccgccggctcggttggggcttccgctgcggctgcggctgctgctgctgctctgggcggccgccgcctccgcccagggccacctaaggagcggaccccgcatcttcgccgtctggaaaggtaggcggcgccgcgcggccggtcaggcgcgggatcagacgctgcgcggggcgggtgcggagtgtgctgcacccggagggagtgcgtgcgcgcagctctgcgggtcccgggctgtccccgcgctgtccccgcgtggagcgtgtgggtttgggtgagtgtgtgtgagtgtacacgctggcacaccagagccggctgtaacgctgcggcgagcgagcggcgggggccggagccccggctaagtcgcaccaagtccctggcagccaggagccgcaacgcccgggcgccaggggagggggcgggcccctctctcggccccgagccactctgggtcctctggctcgggggcttcggcggaggacctttccccgcctgggaccccaacccgggtaccctccttttgagctgcgggctctgctggcgcgcggggcgcaggctgggccggcaaggggggcgcggaccccttgccgccgccgccgcgcttcggcagcgggaacaaagaccccgccgcctgcccccgcccccgccccggcccggagctcgggccaggcaagggggtgggcatcctgcagcgagcggcgggacatggtgcggtgcggcggcttggggtaccagggcgctgcctcagcaatgccgggaccggccgctccccccttgcccgcacgtggcagttgtcaccagaaatcggctccagcgttggggggcagt

SEQ ID NO: 80595 - DNA, 1172 bp, Homo sapiens
ttgctttgggagtggtgccctggagttgggcagtacacagtcagtacagtcacaagtagtggtccttcgtgaggataaccatactttaaaaagtgtgacccagggctgggcacggtggctcacgcctgtaatcctagcactttgggaggccgaggtgtgtggatcacttgaggtcaggagtttgagaccagcctgaccaatatggtgaaaccccatctcaactaaaaatacaaaaattatccaggagtggtgttgcacacctgtaatcccagctactcaggaggctgaggcacgagagttgcttcaaccagggaggtggaggttgcagcgagccgagattgcgccactgcattctggctgggcaagaggtgagactgtctgaaaaacaaaggcaaaaacaccaaaaaacaaatgttattagtctagaattcctgcagtggtatgttgatcagagcaccgtttttcatgtggtaagagtctcctctgctgcaacttgaatttgtttgtttatctgtgcaagatgcttacaagtgaatgtaaagatgcttactagcagttttcacatccatggcacaaatgggtttttctgagcaggcactcacattcttaaggggtgatgagggaagggaatgcacagaccaggctgctccttggcacatgctgaaatgatgttgccatgtctgtggcagagacaggacctgcgctatagggtaactctgaatgtcttgtcccccagaacctgtggacaaagtggctgccatgagagagttccgggtgttgcacactgccctgcacagcagctcctcttacagggaggcggtgagtgtgtgctgcggcccccagccaggactgtaggagagggtgtgaacgctggctggcgagtggtgtggagtgggagctggaagcccgttgccatggcaaccaagagttccttggggagtttttgccatgtctgtgggcctcagtagagccctgtctttccccaaagagcctgtctcagtcaggcgttgttgattccctctaatgataataatacaacctgcccgtatggtgacagccaaaagatcctcatactgtttctgctgggcctcattcttcgactttggctgaactgcctgcttactgccccttgacctagatgtcctcactggggaagtgggctgatgtctttc

SEQ ID NO: 80596 - DNA, 1015 bp, Homo sapiens
tatttttagtagagacggggtgtctccatgttggtcaacctggtctcgaactcctgacctcaagccatccaccccacctcagcctcccaaagtacaggcaccattcctggcttgtttctccactttctaagtttgtcatccactgtttcctaatgggacagggagtttgtgtctacttaaactcctttaagttaacagtttattttttagtgatacaaagtaaactttgtatccttttgttattatcgttgttctcattagaaaaaagctggaaacttttggcactttcctaatgctgcagtttattcccttgttaacaaatcttcctacaaactgcctcaggtggtgatttgttcagttagctaactgctcttgctatactggtattttcctgaagatattcaaagagtatttaaatagctcttggagaaaatatacaaagcctcagatgcctttttggtttataaatagaaggtgcttggaattcatgatttaaattttgcatgtgtgttttaaaagcctccctaagaataaagctaagctgtgtaaaagagattagctttgttacactggcaggttgacatctttttataatgttcatgattgctgtgactagttatcagtttgaaatttacccccctttcagttctaactgtaaaagacaaaaatgtctttcataccctgatgggaagtgagaaagaggaacagagttcctgacatccagaggttggcctggcactcacagccaggccctggaatccttttggggatcatgaacaattgtacagatccccagtagcagtcaaggccactctgagaccactatggattaagacaaaaacaagatccctattattgctgaacagaaacacaaaaacatgagcattatccaaaccacaaaggtgaccaagtatctttctatcttggctgatgagagtaacagctgcttcttggccaattacagcttccaccttgctctagttttccttccttctaggtaagagttattaagata

SEQ ID NO: 80597 - DNA, 1050 bp, Homo sapiens
cttgtcatgcttttttacactgtaagaagagctaaagcagaatgaaagtattgctgcaagcgtaactcacactttctgaagtgccaagagaggaagtaaaggcagtaagaggcaaattggaatgcgaatctttcacagaacacaaaaggcacaaacagggctataagataaacagaaaatgagaatttttaatctctactaattggcctagctttaaaaattgtacccttttttactctaacctggaaaaaatcttaaatccaagcagtttttattgctgaagatgtgattacttctccgtgaatttttgaagatactaaagacactttgttttttgtctttcgacccaatcctaaaacactggaacaatgcagatatcaagtcccaacatgtgcagtgcagcttctttcatgtgatgacaaaattgtacgccatgttgcaagtcctgttcacctaaaattgcccttgcatagtaatccattcagttatggagacttgctgaagaaacataactcaagtgaagtttgttgggggtgagggcctgcaggggagaggtgggggagtaaaaggagaagagggtgtgaaagtgatgtgtgtttggagactgattggtaagaatgcagataaacctgcccccagaatgcttttggcccgaaagacttttctttttgtgtttgtcagagaatatcataatagaaatgaatcagaaagaaaggggatgtgaagagatttacttcgctgtttataaaaaagaagcagcattaacttgttgttcagacaatgttgatatctgtttcaaattaattaactttaaaatctccagaggaattcccccgtttgcttttgagtgacgattgcaatttgagactcttgcctccttgcgtgtttctttcatgttgttgaaattggattctttttgaggctataatgtccagttagtatggctcagtccactcaacaagcaggctggcaatttgatcagggaaatttgaaaagcttagacccaagagcagcttgcttggtcttgctttttctatgagagtaaaactg

SEQ ID NO: 80598 - DNA, 1475 bp, Homo sapiens
tcctttttgaagctaccgtcgtccctcacatgcaggggattggttccaagacccccacatataccaaaatttgagcatactcaagtcctgcagtcagctctgtggaacccacatatattaaaagtcagtcttccatatacatgggtttcacatctcgtaaattttgtctttgatccaagttgggttgaaaatagtttacatataagtggacccaggcagttcaaatccacgttgaagggtcaatcataatttttcagtctttatgacctttgtagataagatgctccataaatcctacccactactctaaaacaactccttttcaggttttctagagccctgaccacactctggtgttctgaagttctctgaaacctttcaggattatgtgagcttaaaccatggcgcttctgaagctgtatctttccgtattagcatagggatatgtgtgtattgttctttaggtagaagtaagctttatagatactaagtccttataaatacacaatcactgacttgacttgggtccttaccctctcaccagaggctaatttctctacatgtgtcccagatcccatccccttccaggtttccagggacttgctccatcagtgaaccctccatttcctgactctttgggctcattctcttccaggccttttccacgtttacgcatcttctctctgtcagacttaaaaacaagcaaacaacaacaaaaacctttaatcttaaattttacctgagtcagttgttaacaaggaaatgagagaccacttttaaaaaatttcctcttgattgcacattattgccagctttttttctattcctaactatcccccacatccttgcaacaaagcttctcaaaggaattggttttactctttatttccatttgtcacctcctactcactcctcagcatactccagtctgatctctgtttcttccatgtccctgaagttccatgttgctaagcccagccttccctgacctcattgatttctcagcattattgaatacagagcactccctccttgaatattctcttcttttgctttctatagtccttcattctgcttatgcttattttcttttccttttcttttttctttctttcctttttttttttttttttttttctgagacggagtctcgctctgccgcccaggctagagtgctgtggcgtgatcttggctcactgcaatctccgcctcccgggttcaagcgattctcctgcctcagcctctcaagtagctgggacaacaggcgcatgccaccacgcccagctaattttttgtatttttaatagagatggggtttcattatgttagccaggatggtctcaatctcctgacctcgtgatccacccgccttggcctcccaaagtgctgggattacaggcatacaccaccacacccggctaattttgtatttttggtagaaacggggtttctccacgttggtcaggctggtctcg

SEQ ID NO: 80599 - DNA, 1015 bp, Homo sapiens
ccactgttcacagttcagagtttaaatttccttctggtattcaaggcatctcacagcccctttcaactttaactattcagactttctgtccttatatcctccctgtcaaaacatgccttgtttataccccactccatgctcatttagactgcaaatctcccttcaacccattcttcaaggccagcttaacctccacctctaagccatccagccttttcttctacctcctgagtaccttgggttttcctatttgttgtcttgctattatatgctatatgtgttcagtttgtttttccaacttcatggtaagactcccagtggtgggaacaattttttttttttttagtggtattctcagcagcttgcacaatgctctacctggggtaggttctcaggaaatctgtgttgaataaacttgtcatcaggtctttgcttctcaggacagaaagggcccctagagaccatctcatccaccctgtctcatgttggattccacgccatgacatgccatacagatagtcatccagagacaggaagttgcccacctcctgggaagctcactccattaccaggcagttctacttgttttaaaaagtccttctgtagacctgaaatcttcctcagggtaacttctgcctatcacactagttgtgccctctggagctttagaagaaaggaggaaaaagcctagtttctcttcactcactacctttagattttcaaagatagtctgtttatttcccctgtgtgctgttgaaatgggttccagggttgagatgctggagaagcactattctaattttgagtagcagtcaggtcagaccttgattcattatttttgaaggcctgtgtgtgcatgtcacagtgtaagctgccatcttcctctggtccattcagaggtgtagccctcttctctttttctcctctcccctgatcctctgtcttctgggggaagatgggcccattctactggaatggtctattttggagggaggggtaaaaagttagcaattct

SEQ ID NO: 80600 - DNA, 1004 bp, Homo sapiens
acttacagtgttgtataggaaaccaggcaaggtgtcttcccagtctgcaggaaagtggtgcatctcagagtgatggcttctggcgatcagccgggaatgagccccttctaagcaacgtgggcctttgtgtcctcctcttccaggattatcaagtataaatgacacccacgacacctacccttctccaacaaatggagatgattcttccacccgattccctctttattttggaaccaaatcaaaagccaaaaaaaaaaaagatgtccctgtaagggtggcagaattagtcttctgagttgtcttttatagtatgagtgaggatagcacaattgctaagcatcttcatctttgccctaaatgattgccttgccctctgtcctaactctttctcttcctttgcccctctcaactttgtgttttgttcccttttagaatggtggtttggcctggagtgatgatgcagatggaggccggggaagagagatctctcgagattttgccaaggtctgtaatacttcctttgtgatacagataggggcagttctgcagtggcttgttacagctgattcccaagaaataaggaccaaggtagccagtgagttgcatttgtagtgattcagatggtcatagtatatctggtataagacttcagcaagatggaatttttcactgtgtgtttttcttgggggattgggattgcagctgtatgaactggacggtgatcctgaaaggaaagagttcctggatgacctcttcgtctttatgcagaagaggggtgagtgtgcatctactcatcattccaattcagggaatactgatagagtgcctactgtgtgctagtcactgttagacatcctggcccactaatcctcatccaggaggagaagaggcatttactgccagttggttctggatttagccaattaaccgatagccagattgaagaggacagagaaggtgttggcacaaagtagatggaatgatcgtccacttttggccctgcc

SEQ ID NO: 80601 - DNA, 1049 bp, Homo sapiens
aagtgaaagaaaagaggcccctcaggatattttggaagggtctgaaatgatccatggaaagaaaaggccaacactttcttcttacccattggctttcgatgtttgtatttgctggcttggttagaacattcctgcagtttaatagtcaggtacataggcatctgcctttttttttttttgagatggagtctcgctctgttgcccaggctggagtgccatggtgtgatctcagctcactgcaacctctgcctcccgtgttcaggcaattctcatgcctcagcctcccaagtagctgggactacaggcgcgtaccaccacacctggctaatttttgtatttcttttttcagtagagttggggtttcaccatgttggccaggctggtctcaaaatccagacctcaagtgatccacctgccttgacctcccaaagtactgggattacaggcatgagccaccgcgcccagccggcatctgctttataatgcaccctcccaattctctttccttctctcctcactctgcacatccccaagagccatcttcactgtagactatggtgtgactgagtttagagctgagtgactcaacttcctggctttgtattcagtcatagcaatgggttcaccagccaggtcagccctcagaacacatggccagcaccccagcctctctaggagaaggccttcagcaacctgtgtggctccaccttcgtcaccctcaggacaaaaccataggagagagctactcccagtagcctgctcccagcatcctgttatagctgatcatgcatcccttggtgcctgtgtcaacaactttattgagacctaagaatgaaatcttcctctttatcctgggccaagctgtaatggcagcccccagcagctaaatattctaagttaacttctctctctctctatttccctccttcctccctactcctttacctttggcagccttattgccttcttggtgtagcctgcctgttactgttggtttgcgtaaaaaaggcaatcgaaagttttgaatcttggttttccccagtctctaa

SEQ ID NO: 80602 - DNA, 1104 bp, Homo sapiens
ccagcactttgggaggccaaggcaggtggatcacttgaggccaggggtttgagaccagcctggccaccatggtgaaaccccatctctactaaaaatacaagaattaaccaggcatggtggcacatgctggcaatcccagctactcgggaggctgaggcaggagaatcgcctgaacctgggaggcagaggttgcagtgagccaggattgcaccacagcctgagcaacagaatgagactgtcaaaaaaacaaataaaaaacaaaaaacgtgtttctttggcaaacataaagccaaaacagttgtaaataaaattgtctggctaatttaactccctgtgggtggtttctgaaataccattccctcatagattttccatttagtctttcagtgcccaaggggagggactaatttctaagtctaataagcaaaggctattataaacaatttcatttttccttcatcagtgaggaagaaaagcttgttttttgttccctaggaggtgaaacagaagtgtggtttcattaaagagtcaggatgatgatgacgataatggtgattttactgttacttgcatttttattataccatacacattacagaacccttgcaacccattatctgatctgctgctcccctcagctccagctctgtagagtagagagagcaaaggttatcacctgtaaccctgaagaagcagccccaaggttaagtgactcacctaaggccacagagcagacttagcacgcggtctcctaactcccaggccagtgtgctttgcttctcctgccttatctttgagaaacttgttccctagagctagcaaccccatcactcccctttggagaagcaggcaaacctcatgtcttcggcagcattcaccgcctccaagagggtggtggcctgcctccacaggccaccgttcagtagcgcttctgagcatctagctgatgaacacagggtagaacctgatgtgcaagatgggtcttcatctcagggtcagggctgtttctcagagaaatagggaagggcagatgtgacaactcagagtggcacagaggctgccatctgtcaaggcaggatggggtagggcttgggagacacagga

SEQ ID NO: 80603 - DNA, 1041 bp, Homo sapiens
gaagccagacacagaatatatactatgtgagtccatttatataaagttcaaaaaaatatatgtcagaatagcattttatttccagagtgggtagggtggagggatggatattgattggaaagaggcatgagagagttttctaggggtgctgtaaatgttctgtgttttggccagacatggtggctcacggcagtcatcccagcactttgggaggctgaggcaggcggatcatctgtggtgaggagtttgagaccagcctggccaaatggtgaaaccctgtctccactaaaaatgcaaaaattagccaggcatggtggcaagcgcctgtaatcccagccacttgggagccggaggcaggagaatcgcttgaacctgggaggtggagtttgcagcgagccaagatcacactactgcactccaacctgggcaacagagcgagactctgtctcaaaaaaaaaaaaaaagttctttattttgatctgagggatggttgtggaggtgtatttggaagtacacatctagtgagctgtatggttaaggttaatgcactataccatatgtaagttagacccactcagtgggcagttggaggtggaaggcttaaggattcttgtcagtctatactagcatattggcacatgcttgcctctggcctgtcttgtggaacagtgcaactacaagctgcacggcagactaccagacactgctgcctgatttcccagtgggagacctttttccttttcctttcccgtttctttttcctttccctttcctattaaaacttttgttagaggttcaggtggtacatgtgcaggttttttacatggatatactgcagggcactgaggtttggggtacgattgatcctgtcgcccaggttgtatgcatagtacccaataggtagtttttcagcccttgtcccctgtagtagttgccagtatctgttgtgatattctctatatgaacaagtcatggggggaaatcagcagtcatttctctgctggcttctggggagcagttctagagcagggcaagaatgaa

SEQ ID NO: 80604 - DNA, 1020 bp, Homo sapiens
ccaagtgtctactctgtgctggtactttactatttcatttaaacctcacagtcaaccctgtaaagtaggtatgcccccatttcccacattacaaaaatgaagtctccatggttaaataatttggctaaggtcatataccagccagtaagtggtagagctgagattcagacctgggcttctgtctctaagacctgtgccccttccaggacattgtcttccaaacagcatctccaccccaagtggcccctcttacctgatattcagcttacccagcggcagaggacccagagaaaggcaggcaggaaggcccccttggattggtgacctggttttgtcagcatttgagttaattacatgggtgatggaagcggtgaaaccaatagtagcactgaagaatgagggccagagaggaatcttttcttctggaacactctggaagttgttctgtgaagagtatgcaatgaacaactgacatcagttaggtagcatgttgtagctacaaccagaatggcaaggttcttgggtagagaactgcttcttgggacctaagacacaaagaatgacagtgtctaggtcccatgcacaatgggaagaattgctcctatctgactagcccagctctgaatggttataagatcaagaagtcagaaagcccttgtaaaacatgggcctaatttttcccagggcttcaaaacaaatgtgaaaacgccaactaagatgttatttatttcccctaatgaatggtgcttcaaagtagagcctatttaggattgagtggcagtcagaggaggctggggcagagtgtccggccatcccagacttttctgccaagtataccaaggttgcaatcctttgccctagagtcctgcccaacagagactgcttccagagacccaccaacctcaactgggtggtctctggtgctgttttggattattctccctgcttgcttcctttcctccaggtacatgaagtatctgtatgcctatgagtgtgagaagaaagccttgagttccccag

SEQ ID NO: 80605 - DNA, 1028 bp, Homo sapiens
gctctgctcaactgcgtcttctctcagccctccacacacactcacccccactcccacacacatacacacacacacacacataccccatctcccgagggctgacctcctctggcctcagcctgcagggtgtgggcagagaagggcatctgggacgtggtgccagtgaggagcccagttggctggcactgggcccatttgaaggtgtctcagacatttggccagtatgtctttctcaggggtttggtcacaaaggatggactcttcccacccagaggatgcagggaaagcacactgtgtctttccggtcattggatcctctccctttccccaggcagctcgcctggccacaccgttggagtgaaccctcactgccctcaaggacaacagcagggtgtcacccagagcccgatgaggggtgccagcaggtgcccccacgagtggggccttggcccaagcagagcttcccctgaaggtgccatcagccagggcagctctgtcccctcctgctctccatcttatatgtattctaaccaggaaaaatgtgatagcacatgggtagcctaggcagtgagtaaatacctcagatgtcctcctgcagcaagtgtctatatgttgtggttattttctatcttacatgttctcgaatgtttatatttcaataaacctctacctcttcacacaagcaggtctctctcagttgctttgagtggcctttccactggacagtactggggagaggtgagctccttcagagtgaaaggggactgagtgaactactcctgaccccttgatttctcctgaaccttctccccttcacccacgccttcttcaaagggaaagctcactgagctcactctcagctaaccttgtgtgttagcaggtttctctggcgttaccccagaagctcctagaaaagcctgcccggcagcaagccacaggccccgccacgccattggccaggattgagtcacgtgccctccccagagccaatgggagcgagggggcagggtgaccgggaatgaccttag

SEQ ID NO: 80606 - DNA, 1294 bp, Homo sapiens
ccatccctgcccagctgtccctggatccctgccctgtcctctttgggctcctccactaacctcacctgcatgccttggcctcagcagtagctaccatccttgccgcccactctttctctgtcttggagtgccttttcttctccccacacattcccccattttctaggccagcatctttccgcttaacctcctaagccttccttggtgaggattaggaacataacctcacccctggaaagtttgctccctgggcctatcttagctcccaggtcaaacttagagttgcagcaggccacagggaactctggaagggtatagaacccttggaggcactctaccatactccccttcccctgtacccctcctcctacagctggaggatgctgtcgttggacagggctctggagggcgggcttagtacctttgcaccctcccctctctgcccacttcccaccagtgtggatgcttttagcacaggctgtccccctttagccctttacagtggccttaccacaggtctcttgcttgctaacagcaaggacccagctgaccagcgtccccatcccccttttggcagccatgaccgcctgccctaccagaggaggtaccgggagcgccgtgacagcgatacataccggtgtgaagagcggagcccatcctttggagaggactactatggaccttcacgttctcgtcatcgtcggcgatcgcgggagagggggccataccggacccgcaagcatgcccaccactgccacaaacgccgcaccaggtcttgtagcagcgcctcctcggtgagtggtagccagagtgtgctggctggggcttaaaggcctcatctcttcctagccttctctcaggctggctggtccgggtgagtactgccagccctgtgcacgtgcactggtgtgcgtgcatgtgtgtgtgtatgtgttgtctggtccaggtgtagggctgatcacagggtcctggcctctgtgtcttctggctctttccagtggcaactgtaggaactctggctccgatgctggctggcccctggcctgtctatgtctacacagtgctccagacaaaggccacgtggtgcaagtggctggggacacttcttaggacacttcttagggatcctagtagagtggctggtatggtggtctgcagctatatggcctggtccttcccacccagagactgcctcctcgtgtaactgagtgctctgatgtggactgcacccacctctgcgtctcatctgcacaccccttcccaaaggcccccagtctggagtgcctcacaggac

SEQ ID NO: 80607 - DNA, 1046 bp, Homo sapiens
acggaaggctgtttctggtagtgatggtgaaatctggccaaggatgccgtctggaggcaggtagcagcttggctgtgagtggcagctgtcaggcatgtgcaagtctgcgtgggcgaacagaggcaggcaaggacaggctgggcattctgcagctgaagccggagcagccgctgaccagtctggatggttggacccaggcggggccagctgccttcttgcgccgccgttctcactgcatcttccgctctggcccaaagccacatgggagggtctgggagggagagactcggaggaggaggaggagggagtcggggcgatggctctcctcacagcgtggccctcagcagcagaggcaggtcatcttcctgagcgtttgtggcgctcctcttaaagataatgtccgagttttctttacatacctgtagctgtttttacttttctgtttttgaagtcagtttgtgtcttgacgtgtcccttgcaatatccctatcgttatatatgctgtgtgccttatgaaatgctgggatctggaaaatccaaccaaccaacccaccggctcctcaccgtctccacctctgcctttgactgacacctcaatctgtcaatcggaaccgcctaccatgcgattggtcggatggcgtttcggggggcggtgcatgcagagaagccaacagagcagtaagcgcagcagccggagtgtggaagatgacaaggagggtcacctggtgtgccggatcggcgattggctccaagagcgatgtacagccacctttcgtaaaactttacctctctactttctaccccccttgttagacgagacctctcctgcctggaggggcctctagtgcgcgtggtgccttagcggggccaccagtaattgcctgaatgacacagacactagcaacttccatttttaagagtgtagcagtgagagagaaaccttttttgtttttgagaatttgaatgctgtgaacttgcaggagctgccaaccccctgccctccagattctcatgcccaatttcttttctctcctagatgagattgt

SEQ ID NO: 80608 - DNA, 1131 bp, Homo sapiens
atctcctactatgtgagagccccaacttcatgtttttatcttgttttatgcccagcataacccagtgagctccccaattcacaaaacgcagggctgggaggccttcctcaggacacagagacagctggggtgaagactggactgcagtctaaaggcttccagcaagacctttgccacactcccctggttctgagtgtggggagaaggcacagtgcggatgggtgaaggcacactactaagcccctgggggtccagcagccccactgaaggcttccctcccactccttgcagatactcacaacttgttttctttgtccttctccttgatttttttgagcacgttgatttctagccgggcagcctcccggtacttgcccacgttgcggatgatcttcagggcaacctgagacttccctctggtacccgggaaggaaacagaggttctcatcagcagctgcccagtccttccccaaccctccaccccaacccagcaactcccaacaaacaccactccaggagcagccggcactgaagagagcagatactggatgcccagcctgccccatgcaacaccagacctttgcccacccaacagcaagctccctgagatctgtgagttaatgctcttagcatccttgccatccttaggcttttatgttctcagccactgccagctcccaaaggagtgtgggagagtagaggccaatcctgcttaaccagtgccagtccaagagctcacacagtgacctaacctataggccaggcagccccaaccctggccaggctgtcccaccgagaaccctcctgcggcgcctcttgaccttcctgagcttgtctgcaagtctgagcaaacagggatgggggttccaggatcgagtaaagatctggcaagaggtaggggtaccagcaagggtacctctcactgtgaggcccagggccactccctttaccacacccctctccagccgcacctacctgccacagtgtttatcagtgaccacaaaatgccaggaacccttcttaagtgtccaaagaaggttttaacagtccctgctctgtgcctcccacccccaacctcaccccaggaggccatctgcagggagccagcagagaaggaaacctgctgaggct

SEQ ID NO: 80609 - DNA, 1105 bp, Homo sapiens
tcccagccctgcgttttgtgaattggggagctcactgggttatgctgggcataaaacaagataaaaacatgaagttggggctctcacatagtaggagatacccaaaggagggcctttctgtggcagacacactgagcactctcctccacgcactgtgctgagcctgggcagatgggtgaatccagcacagaccctcacgaagctcagcagagtgagcaagtggagaaaagcagcaccagtcctgcggagtgcactagcactttccatctctccctcagcaactctgaggcagggctgcttccatatcataagtagggaagctcggagggcttggaccagaaccgtggacatctcccctaccccccgcaggaagcttagtccttgcccagagctcatctgggtattgggtgatggctggtggggagaggtgctcttgctctgatttctcttgcactgtgtgtatctgcattctggtgtgtgacccggtggcctaggagagagttgggaactgtcttcatctgagagagggggtgaggcaggcccccagcacacagcctgagccctgcccatcctcctcctccagcctgtgtgtcttgatgtctgactggttcaacttccacggtcacatgtgcatcgcctttgagctcctgggcaagaacacctttgagttcctgaaggagaataacttccagccttaccccctaccacatgtccggcacatggcctaccagctctgccacgcccttagatgtaagtgtccaccctcaaaagaagcatgggcagccacatgcctgcagccaagtcatctggttacttgttgtccccattcattccagcacgttactaaccattctcctgggcctgagggacaccagatcccctttggcggaaaggcctgtctttgggtgggaatctcagtgtgaggatggaaaggctagggctccctccagggacctcctggaccagcctctctacccccaggcactcaggaagaaaacagaaacgaactgctctggaattggcctaaccaccaaccctgcctccctgcttcatgcatgggataaaaaggtagaagcctgacctgacagatagcaccacaggtcct

SEQ ID NO: 80610 - DNA, 1627 bp, Homo sapiens
gtggtgtctggaaaacaaagacacccttggggtgacctgggccctagtcccagcctgggctgctctctgctcatagggactttcagatggcactctttccacctgcagatctgcccactagccctgtggacctggtcatcaactgcctggattgccctgagaacgtcttcctgcgcgatcaaccctggtacaaggcagctgtggcctgggccaaccagaaccgggcaccagtactcagcatagaccctcctgtgcatgaagtcgaacagggcattgatgccaaatggtcactggcactgggcctgcctctgccactgggggagcacgcaggccgtatctatttgtgcgacattggcattccccagcaggtcttccaggaggtgggcatcaactaccactcgccctttggctgcaagtttgttatcccactgcactctgcttagagggttcctgcgcaggcaggactctgctgtcccctgctgctcctgataacaaacgccttaaggatatgaagcttcatggaccttgttaaagttttttctcttttgggtttgtttcttctgtgagagaacagaacttacttaaaactgacctgtcacttgctcttagccagggaagtctttcccactgggttccgggctgggtggcaggctgagcgtgcagcaactccaggcatctctaccctcagccccctgcacggccaggtgggcctttgtttacagccgtaggcagctctcaagactgtgtttcaggtttacagccactgggcctgggcacacacattgaagagtgggccaggtcctgtctgggggcctgtacctgctctatttcagagcttgtggctttgtgtctcccctgctttccccacgcagacagcccttcctctgtagaaccagctgcacggcagctgtccaccagagggcagacctgcactctccattcatgtccagggctgtgacagaccaggccttcccctagccccacaagttgatttggggggttttgacccttactcctgagctgatccaagttttatgctgatttttccaaggatctctccctccttttccctccatcactcagaggtagggaagggggcggcattaggatggtgttactgtattgggattttatgttgttctgtcgtcttcagcacaggtagtataaggttatattactgtagaaccacagtgcccatcttgccagcagtgcccgcccccaccctcaaagctgagcaggttgagcctttgcctagtctggggccagacccctcagatggggatatccctgggggagcctggtgctgaaccagaagaggcttcctggtgcttctgtcctaggccaccactcctccagccctttgcccgcacatacatgccccacctactctttcatcccctctgcccttcccctgaaacggtcctttgcagctgtcatcccagagcaggcagatgggctcccgtgcttgagctccaccccagctcttacatcatctgggctttgaaccttttacatttgtccagtctagatgagtaggcttggggccagcaccctgtctcaaagatggcaaaatgaggctagttctggatgagctagctggtgtgggttccaaccataggaacacact

SEQ ID NO: 80611 - DNA, 1077 bp, Homo sapiens
accttaccttctttgtgttaggcactgctaagtgctgggcatccgataatctgcacagcatcctatgaaatagatactgttaatgcctgcagcattgctttcattaacttcagtaagctactaagctcagtaaagagaaccattggcaactgactgaggagaatggagagctatggtacttgctgtgagcttattaggagttgaggagaggtaaaggcatgagccagagtaatcccagcagaggtaagtcttgaactggatctccaagaaaaggcggttcagagtttggaaagtgaaaggctttctgggcaggggatgtagtttgagcataagcaggaaagagccttacaagtgcaggagaggatgagaccagccctgctggagtgaagcagacacgttggggaagaagagcagacaaggctgcagaggaactattaagtgttcatgggtcagcaaagcggtgttgtggcaacagtgttgtgtggagcaagatctgggtgaaccacttagtgggaggacccagcaatgatgtgaggttggggtttgggacaacaggagtgccaccctatagacctggcctgcagtggattttgtccccctctggagcctgggacttggtgagcagtgggtaagagatctgagaccaataggtgctacaggcaattgtctggtatagggtgcaagggattggcaagtatgtagctgatactgcttcttcaccttcttttccaggttgaatcccaaaaatgttcaccagaggcctacagtggctctactgtgtggacctcatgtgaagggggctcagggtatcagctgtggaaggcacctagccaaccatgatgtccaggtcatccttttcctgcccaattttgtcaagatgttggaatctatcaccaatgagctgtcgctcttcagcaagacccaaggccaacaagtgtctagcctcaaaggtgagcacttaggcagggctgggctgaaggcctcctccctccttagcagtttgatggtctcgtcatgccacccagtggcgacaggtggaaaggcactacgtgtgtaaggatggtgcttcgcctctaa

SEQ ID NO: 80612 - DNA, 1517 bp, Homo sapiens
agcagccttggcaacagatttttctttatcctcagtagtattcattctggccccagagtctctccttccttcaaaatttcatttgaaattttcatgaccttttagttccttatgctatcctatagcttccctatgtcccttgaaatcaattctccttggtctttctgttcttactttctacccctgtcaactttatcctgcataaaacagctcagcttttaaaaccttctgaccttggccctgcccactgctctacactgagccttcataccaccctctgggcttcaggcagggacatattcatctgcacatgtcacatgcattctggcctctgagaagttcatggttctccactcctacctggagtccctcttctattcattgtgactacagtcctgcctgtctttcaaggcatagttcaaattgagacctgacatctcctacctgtagctcctgatttgaaattgatactttgcactcgtgctcaggataacacagtttaaggctgttgtgttattttctgaagtttgcacctatgtatttttttgtttctagttagattataagactggggggccggacacagtggctcacgcccgtaatcccaacactttgggaggtcgaggcgggtggatcacctggggtcaggagttcaagcccagcctggccaatatggtgaaatcctgtctctactaataatacaaaaattagctgggcgtggtggtgcacgtctgtaattccagctactggggaggctgaggcaggagaatcacttgaacccgggaggcggaggttgcagtgagccgagatcataccattgcactccagcctggataacaagagtgaaactctgaactctgtctcaaaaaaaaaaaaaaaaaacaaaacaacaacaacaacaaaaagactgggaacggtctctgtatttctactcgttttattttctctgtttccccggctgttccccacttcaccactgacttgcttgatgtactgttactctataaacatttttaaatcatatttggaagcacttaactttgtttccctttttccttcccaactcttttttgagacaggtctctctctatcgcccaggctagatagagtgcagtggcacaatctcagctcactgcagcctctgcctcctgggctcccctgacctcagcctccctagtagctggtaccacagatatgcgctgccacccacagctaattttttttttttttttgtatttttagtagagatagggtttcaccatgttgcccaggatgatctcgaactcctgagctcaagtaatctgcccacccttggcttcccaaagtgctgggattactctttggccgggcatgagccacctgcctggcacccccccccccccaactttttttattgaaaaaaatttcaaacttacagaaaaattgctagaatagtataatgaacaaccatatacccttcatttagattcaccagttaacattgtgacatatttgttttatgtaaaatacatacgagc

SEQ ID NO: 80613 - DNA, 1590 bp, Homo sapiens
ctcataagattctttttttaatttttttttaaattttattattattttttgagacagagtcttactctggcacccaggctggagtgcagtagtgcagtatcagctcactgcaacctccacctactgagttcaagtgattctcctgccttagcctcccatgtagctgggattacaggcacacaccaccacacctggcaaatttttgtatttttagtagagatggggtttcaccatattggccaggctggtctcgaattcctgatctcaggtgatctgcccaccttgtccttccaaagtgctgggattacaggcatgagccaccgcgcctggcctaacactcatggtattctaaaggaaatactttaagacagtttgggtcagtcaaaacactgtgtttattatgtttattatgtgtaactgactctaagatagtccttgcctttaagttatgaaaatgtaataggagatggaaagattccatatatgcccagagtccagtgaaagtgtggacattaagtgcactaggtgttgagaggcaggagaggtcctgtaggctgcatcaaggaaggcttcatgatggaagccttgaaacatgggcaggatttcaccaggcagagagaaagaggaagatattcatgggtaggctaggcaggtgcaggtgaatagtatgagtaaagggctgtgtgggagactggtcattagctggcttggccagggcagagagtttgtgctggggagtagaaggaactaaaatatagctttggaccagagcatagagggccttgtgtgccagtgctatccttgtcctgtagtcatagggaacaactgaaggcttttggataggaaaatgacatgatccaaatctcttttaggaagactggtcttgtggtaggattccaggtggaacgagaggggagagaagagaccagagcaggaccagtcatgctcatgatgtagtttacatactagggatttagaccattgaatggaaaggaacacaaagatatgagggaagcaacagagggcaatttgataggctatgatgattgaaaacagggttgagtgaacaggaggatttggaggtattgaacctgtgaggcaggaagaatggcagcaagtcaagttatcatgagattgcacgaatttatagtgggccaagcctacatggttttgtgaccccccccccctttttttccctcctgcaatgctttgtgcctgagcccagagaaagcaaaggcaagagttgctacaatgagggatagggagatgtgggagttattggttattaagagctttaatgaggagttaaaagttatatagccaaagagaggctactaagctggtttccttatctataaagtgggctaatactgtggattaaatgagattatgtggaaaagtagctagcacaatacccaatctgtaattattattcagtaaatatttgacttcaaatgtgaatttgcaaaggccacctcagtaagattatttcaaagcatcagcatttatagaatacctactatgtgccagacactgttttaaatactctgggtaagtcatagttcatcaccttaggggcctctgagtata

SEQ ID NO: 80614 - DNA, 1264 bp, Homo sapiens
ttggcttctctattactgcccatacatttcaccagacttcaactctgttttactaattatttgttgttgcaaaaaaacagttgaagatggatgattggaatcattggctaaaaatagagttttaataaattacatttctttactatgctgttcttatctcctgttagcccaggacattgaaagttggctaatttcatgtaacagtgtagtgccttatgtaggtcattgtagatgataatctagttctattacctcagtgattattgtttctttttttagcattagaaccttttcttcaaacctatggcatataaaacagattaaagcagtgtgagagaggtaattcatcacatccgtgtcccatcccttcccctcaaaccacattactaactgggcctcttggaatatggtttgaaaaccattgttattgaatgatcctaagagctaaaggggaagtcataatcattttagtaagtagagaaggaattgagtataatatttttattttggtttgaagtttggaatataaggaatataaatcttgaatgctggtagctgctataaggagaactgtggacgcagctaattgcatttggaggaaagccagacatggctttttttttatagataatagtaggactctgttgtatttggtttcgctgagtatagtagcttgcatgtgctttccatgtgaaaaaaaaaaataggccaactgtcaggctaagaaagactgctaaaaaaaaaacaagctgctgaactgtgtcagtcttttgctggcagattctggtaggcatgcctgtttattaaggtggtttccttaagtggcagtgacagtgacactgtaacttgccgaagtccttcgatttttaacacctgtgtaaaggcaaacagcctagctcagaatcgggtttaatttaaattgctaggttttaagcctttcaaaggcagttatcatctgttaagtctggtactcctccagatcagccaactatctacctctgactgcttccttttttactgccctctttgtaaaagaagctgctcctgctgctagctctctatatctgtagtccaagtgctgctgctgaggctgttggtttatgcagcgtgtgatttccctggaactatttacactgcaggattttttttttttttttttgagacgaagtctcactctgttgcccaagctggagtgcaatggcgcaatctctgctcactgccaacctccacctcctgggttcaagcgattctcctgcctcagcct

SEQ ID NO: 80615 - DNA, 1081 bp, Homo sapiens
tgccactgcagtccggcctgggcgaaagagcgagactccgtctcaaaaaaagaaaaaaaaaaaagaaatggagggagaaggaagacaaataagactaaatgaactttggtagcaagttcttgactgaatagtaattcacaacatctctgaattcagtagtcattacaattttaggaataatttattgggagaataacagtatcaatgaagcaagagtaaataagaagtatgtttaagaaaataccaaaaccattgcaccccaccagaatgagtaagttgaagagaacaatagtaccaagttttggcaagatgaggagcagaaagaactcacgtatggtgggttgtataaatgtagatggtaatacaaaatggtacaaccactttggaaaactgttcagtggttcctaataaagtcataaatataacatgacttcctgtgttatatgcccagtagaaatggatgtatttgtccatcgcagaaatatactgtatacagtttaagaatattatttgtaataagtcagaactagaaataacccaactatgtatcagcagtagaatggataaatacattgaggcatgcttacagaaaacagcacagctatgagaaagaataaacttctgatacatgcaacaatggggatgaatctcacaaatgtactttttttttttttttttttgagacagcatctcgctctgtcacccatactggagtgcagtagcaggatcttggctcactgcaacctccgcctccccagttcaagcgattcttgtgcctcagcctcctgagtagctgggattacaggcatgtgccaccacgcccagctaattttttgtatttttagtagagacagggttttgccatgttggctagattggtattgaactcttgacctcaagtgatccacccgccgtggcctcccaaagtgctgggattacaggcatgagccaccatgcctggcctcacagatgtacttttgagcaaaagaagacaaacactctgaaagagaacctttatgattctgtttatgtgaagctcaaaatcaggctcaaataatctttcatgatagatgtcagaata

SEQ ID NO: 80616 - DNA, 1888 bp, Homo sapiens
tcctttccagcctgagggactggggctggagcctgacatggttagctccctcccaccccagtcagcctttttaatttttattttattttattttatttttttaccaactgtgagctgtgaaggtgtgatccagggtcccagggcctttgaagaaaggagtctggcttctggctggcacgtgtgcagggatgtgcttttcattggtgagcttggtgccctccaccctctcagaagcagctgctcttctctctgcattgggtcaggggcaaggaaaaagcagaaaatgttcccattcaccaccgcaggggggccagaccccaaaaggctgagccacacagagtggccctcggcaagggttggaaatttcggggacagaatgcagcttcctccaaacaagtataggtaggggttgagacccaggatccacagtgtgacatggctgccccccaaagggggcagacccacctgggtgcggttctgggctccatcttttgaaggattttaaaaccttgacaggtcatcttcaaagagccagggatgttgactgagtctgggaaagagaaagtagggacagattctcatatgtctgagggactgtcccaaatgagaaaggcatcccatggcagaaattgtcccagacacgtgggccagagctagggagcaggtgggtcccagggaagtgaatctgagctcattatagggaaaccatgaatgtactcattttcttgatttagaaaataacaaaacagcgctacaggaaatttagaaaatgaaacaaaaatcacccactatttcttcagcaggcagtgactgtgttagcattttggagttcactgccagtcttttccccatccttttccttcattgtcgttgtcactggagtgtgtgtgccgtgacaccttttttcatttaatactgcgtctgtgggcattttctcatggtgctacgcggtctaagtaacgttgcttctaaaaagctacagaacattctaggctggcctgctgcagcgccatcacccatacactggagcgtgtgcatttttcccctctgttgctgttgtggttgtcgttactatgagtcccaaaagcagccagggtgttggagggcacaagcaacttggcacccaactgaatgtgggttccaggcccagacatgccacttaggcccagggtagagggaccttagacaggtcactgacctgctgagcctcgttgatataaataacaggatggtaacacctacttcagaggaaggtgtaaggacagtgtcaactaactaaccaagggactctaaagtgcctggcacagccctttcttcactccctctgtgagtaggattggcattgttgaaggagtgcccactgctggctgcctcaacctgtggggaaggtgcctgagccacgggccaatgttgactgaccactcacctggcaaagaggtggtctccgcctgaggagcccctgtgaaaccccctggccctgaggttctagaatactatggccagtgcccttgcctgccttcccttctccccattaccatatgattggctggcctaggacatggggctggccctgggaagatgggctgctggttagggtccgggacctgactccacccattccccttccggtctcccagcatcagagctaaatagacaaggcctcttctctctctctctctctcttttttttttttgtgtgtgtgtgtgtgtgtgtgtgtgtgtgagatggagttttgctcttgttgcccagtctggagtgcaatggcgcgatcttggctcaccacaacctccggctcccggtttaagcgattctcctgcctcagccttccaagttgggattagaggcatgtgccatcacgcctggctaattttgtatttttagtagcga

SEQ ID NO: 80617 - DNA, 1033 bp, Homo sapiens
gggagggcgtgaaggcgggtaccaaactcagcctcatgccgtgagtaccacgaggaggggttggggagggaaggggccttggtcctcctgaaggagcatcaggagcaagcagggaggccagagtgaggggcttgggtgttggggagggcctcaggaggaggtgcagggtgcgggtgcgggacctcacagagcagggctgggggcagaggcaggagggtggcaaagaagggacagggagcagaagaagagggcctcaaatgcctgactgagcgagtgcgagccacgggtgccaagcagagggaaccccttcagaaaggggagccagggtcagtacctttgggccaccatgacctccagccctgctgctccccagttggttccacggcaagatcacacgggagcaggctgagcggcttctgtacccgccggagacaggcctgttcctggtgcgggagagcaccaactaccccggagactacacgctgtgcgtgagctgcgacggcaaggtggagcactaccgcatcatgtaccatgccagcaagctcagcatcgacgaggaggtgtactttgagaacctcatgcagctggtggaggtgagctggggggtacagagccttgctcccaccctcacacaccctaaacccatctggggccctggcttctagctccagccccactgcttctgcgtggtgaccagccatgtggggcaacttctgtgagcccttgtttcctcacaccttggtggagcagctgctgcgtgccaggactcacctctgaccccacagtgccaccatgaggaggggagccttatcctcattttatagaccaggagttgaaggttcagagcagttaggggacccacctgaggtcccacagatataatttggtgccaggactagaatctgagtctgtctgatcccagagctaactttcctccagccactcacagacctgcatgctcagaagcgtgtgcagaaacatgagccatgcgccttgatcgccagggcccctgaggctctcgcacctgcacgga

SEQ ID NO: 80618 - DNA, 1020 bp, Homo sapiens
gtctctggaagcagtgggactgaagttctcttcgtcctgtgcacacacagacacccccacacagttgggatcacaggctgacctgggcccatcccagctggagctttctgccagggtcctgggccttgactcccccaccctgcaggcctggcctgaatctggcttcttagacacagcccagtccttcctgcctgggctgggaataagcctctcacaggttctggtggacagatctgttccccaggtcactccagtggtctccaggcttccagagaaggctggttgcctcaagctcttctctgcctcataaacggatccagagaaggctggttgccttaagctcttccctgcctcgtgttcctgagaaacggattaatagccctttatccccctgcaccctcctgcaggggatggcactttgagccctctggagccctccccttgctgagccttactctcttcagactttctgaatgtacaatgccgttggttgggatttggggactggaagggaccaaggacactgaccccaagctgtcctgcctagcgtccagcgtcttctaggagggtggggtctgcctgtcctggtgtggttggtttggccctgtttgctgtgactacccccccccctccccgaaccgagggacggctgcctttgtctctgcctcagatgccacctgccccgcccatgctccccatcagcagcatccagactttcaggaagggcagggccagccagtccagaaccgcatccctcagcagggactgataagccatctctcggagggccccctaatacccagtggagtctggttcacaccctggggggtgtgtcactgtgatgggacacgtaggagtccacccttaaaaccagcaccctgtccctcgaggctgccgagtgggtgtgtggactggggtgccttcccacaaaactagcctccggctctgggcccgagacagccgcaggccccagccactgaatgatactggcagcggctggggttttatgaactcctttct

SEQ ID NO: 80619 - DNA, 1033 bp, Homo sapiens
atttctcctgcctatttagtggagaaaaagccaaagcataggaaggctttcgcctctgcttctgaaactggaagatgtatgttaacccctgaaagaatcatttaagagtcatagtttttctgctaccttgacagtgcagatgtcattctcctctttggacagacaaagaagatacatctaaagaagggaaataactagtccaagtcttcatagatggctagaggccgagtctggacaagggcctgggtctactgcctccctgtatgtccatgatggcatgaacatttgtatccagacctgggaggcctttcccaggactcagttgccctgtggggagcacagcataacggattgggacaggccaactcagggtggcaggtttcttcccccttcccctcccaagtttcctgtctttccagttgtggatggggactcacccccgaggggatgccaagatccttgacaaccgcatctcacagaagaccctaagccagtggattgctgagaaccaggacagcttgggctcaaaggtcaaggacacctttaatggcaacctgcccttcctcttcaaagtgctctcagttgaaacacccctgtccatccaggcacaccctaacaaggtaaaggacagagtgcggtgcagaggtcagggtacagaagggcttatgctaaggccctcccgtgacttttactgccacttttaccccacccatgccaggctcctgcccaaggccaaatccaggctgacaactcccaatttagctctgcaaagccagatggtagtgacacatgcagcaactaagtctaagcaaacagctcaccggcctgtgccaggggagtttctctaagctcattccaaggggcttgttcctggtcttccctcatccaacccatgtctattcatatctgccatttactcatctgctttcaggaagagttcaacttgcaaggcagggcaggtaccctcagccccacccccatggagtctccctacacaagccggagtcccatcctaagcaactgtggatcaaaa

SEQ ID NO: 80620 - DNA, 1049 bp, Homo sapiens
catcttaccattcctgatatgggccctgggccttgccttcctgtagaggtgcctgagtttcagttcctgattggagatgaggcagcaacacacctgaagcagaccatgagccatgactcccaggctgtggcctcctctctgcagagctgtttctcccacctgatgaagagtgagaagaaggtggtggtggaacagctcaacctgttggtgaagcggatctcccagcaaggtggacacagttatattcctggttgggtgcaatgctctggcctgggcttcccagcagacaccagactctggggacagttctcaacccccttgcccaagtggaacactaaaaggggccccacttagatgacctgttggcaacttagcattgcttgcctagtctttgtggagcagggcccttcttagttgagtgctgcttcccaactggtcatcttctccagatggttggaggcagactggcatagaggactcttaggatgccttccacctaggcattctgagattttccctagccctgcagctgccctccatggatggacttgtatctcggggctaaagaggcaggaaggggacacgagcatcctccctctcctggaaaggactgatgcctccagcactcagtcatttgatctttcctttaccttctgtgtgcccaaccttgtgctaagaagagttcaggaaatgactgtgatgggtgtggtcactgtcaccctaaaggtggggagtcaacacaagcagtaagaaacccaaaacagaacagactcccagcaatgagcttatgtggtgcaggcgatgaggtctcagcttcttagcctggcagccacaaccccttctctaggtggcccagagctctctttttattttacctctacaggtttcccattacctttgagccttagggcattatttatttgacccaagcatatttttttctgttcagtgtgtgtgtgtgtgtgtgtgtgtgtgtgtgtgtgtgtgtgtgtgtgtgtgtgtgtgtgtgtgtgtgtggtctctttctgttgccccaggctggagtgcag

SEQ ID NO: 80621 - DNA, 1018 bp, Homo sapiens
atgctactctgattttaagtcctgccagtcagtgtgggaaccacaatttgaacgcaggctatattggatcaaagctgttgttctgtcacagcctttgtatgtctgtcctacctaccagggatttttacactaaaatatgcatgttgccatggaaggatgccacctttcgactgttggctgcttatccacacatgcctcatgcacaggattctggggtagaagtgggagactacagagttggggctccccaacccccaggggttaacatgactcccctctgacaataatgggtgacctgtcacctgtttttggtatttgatatcttaaccccattctcccagagaatacaattcatggaaatttttacctaacttggcatggggttcatggagctcaggttaggaggcccagaactggagagctaaggcatacttcatcagcttagcacatgacgactgtctctccagactgcgtggagtgcatggcgtgttcagacaacacagttcgtgctggcctgacacccaagttcattgatgtgccaaccctgtgtgaaatgctcagctatacccctagctccagcaaggacaggctctttctcccaacacggagtcaggaagacccctacctctcaatctatgacccccctgtaccagacttcaccattatgaagacggaggtgagtgaggggctatgatgggtgtccttcgtgtgccatgaaaatctctggcaagggtcacgatgtggaggacacctggggctgggtttcctgtcaagcccacttggcggagggtggccccagggcctgcccattccttcctgtaccagggaccaggcctctatgctgactgagcctgggttgtgcgagaaggtggcagagctctccctcgtgccctggggactgtcctgggcccatgagctgatgagagcagagtctgagctgcactgccttatcatttcttcctgcccaggtccctggctctgtcactgaatacaaggtcttggcactggactctgccag

SEQ ID NO: 80622 - DNA, 1034 bp, Homo sapiens
aactgaccatttctaccctgcctcactgcactgtcccaccaggtccctccagctttttctacaaggtaacaccctcctacatggggtcagccagctcagaaacctcttcttcagggacagttgcagctgaatatgccagagctgattattacaacaacgatgcagagggccttggttttggggtcctgccaccctcacccctagaagctgctaaacacccaggccattctgccctgaccacctccccaacagagatgtaggtctatacttaccttccacagccacctcccagcacacactgggtccctctacctgtgttgctgtctttctttacactgtgctacatttgatccctttccacatgtgcacttcacctctgcagacacaagaaaggcctggacatggtctctgcagatggggaaggggttctggatggagatgttcttgagctctacaagcatttgcacaaagtgctcagaatgttggccactgcatagagctgcagagtcccattccagaacagagtaaccatctgcctctcttcccaagaccccaagctggcatgactctggtctctgtcctatctctctgctgtgatgctcctagctagtagagtaagtcagcccccagatactgtatattcctctcaaccttccatggtttgagaaaaacacaaagatagatgtccatcaggcactcacaggattaccatcgtaaggatggttgtcagacaaataacaaataaggccgtatctttttattagacttgctcatcttctagtcaccccttgtggtagagcgaaaagagtgtgttgtccctctcatgcctctggtggtcacaggacactgagtaaagcaagagactggatactttcccatgtagaacctataccccaatcccgactattgggctgggaaccctgtctatgcccattcaaagctcaccatgtgggaggactgcttgggcctgggaggttgaggctgcagtgagctgtgattacaccactgcactccagcctgggtgacagagaccc

SEQ ID NO: 80623 - DNA, 1009 bp, Homo sapiens
tagcccttacctgttgcttctcaggccagaggcccccatctgggctgtgggctgataggtagaattctgtagttttcctctgctgttggagcagagtttggagaagtcactttaataagggcaagacagaaaattctggttcttatggtgggtgacaaaggtggctaaggaaaacacttgcagacagcttgattggtatttgtcatagtgcttcagggaggcaaaaagggagctcttgtgcccaggctgtgctagatagtgttgaatggaggcagaaaatagcactttatggtttattatagctggcaatccaaaaaagaaactgtttgagaccagttcgagaaattccgtttgctctattcttcctagctctaagatggtttgcaggcttgaccttcaagacagcataaagtgagtccttttgtccctcttcaggttgcacctgtctaactatgacagggatcatagcaggttgcttaatgatacagcaggatcctggcttccagaatccctggacctggggcatccccaactggtccaaccgtccgggtgagtttagtgattctggtttgcccttccctagttagagaaaaactgctctgacatgttcatatttatttatttgtatttccttggtctgggtgagtttcttcacccagtctttgagctaaagattaggtcgaaggtactggggctggccccagaagcctgcagtttttattattaccagcagagggagctacagggagcagtccggtgccttcctattgtttactttttaaacttttgagaagtagcaatggactcgtgagagtgggtatacagctgtgtgggctttgtcctagactgaggcttacagacaggaagggtaagagagacctaagccagctcctagacccttgcctgaggaaatcagtccaccagtgtagagggcctcccttcactccagcatggaccattctattgccagattcttctggtcacagcatgggccttactggatactcag

SEQ ID NO: 80624 - DNA, 1046 bp, Homo sapiens
tgcaatgaagcgatctcggcccactccaacctccgcctcccggttgaagagattctcgtgccttagcctcccgagtagctgggactgcaggcatgggccaccacaccaggctaattttttgtattttagtggagacggggtttcaccgtgttgcccagggtggtcttgaacttctatgctcaggcaatccattcgcctcggctttccaaagggctagcgttacaggcatgagtcaccgtgtccggcccaaaaaaaatttcttttgttaaatggcagctactggacacttttctgattgggaaggaagtaccagtgtataaacaacaaaaaagccacaaagctagtcgcttgtgggttgacagtaggcaggattaagtaagagcagtaaagggtacagagagacagtgatttccctggttgtagcactaagggttatttttaaaagatttctactttttctttattctttcctggctaattctttgtgttttctcttacagatgggcttccccaaggatttattgacattgctacttgagtgtgaacagttacctggaaatactgatgataacatattaccttatttgaacaagttttcctttattgagtaccaagccatgtaatggtaacttggactttaataaaagggaaatgagtttgaactgaaattaggtatttgtttcatgtgtttgcattaataagcagaaaattaagtgctgtattggtttcatggttttgctgccctcttacatgctgagagaactgtgttaattctctggaaaccatctgacatgaaaatcagcttcattaatatgtttgggtgccctagcttgtaaattagctgaaggctagaagtcatttatatagaattttcttgttgacaccctaggcttaggggactggttgtctgtggggatagatcaaattgtgtacctttccaaaacaggttttaatgatgtttaaaagtggtcactgagatagtcttgaggatgtgctatgcagtagccaagccctcttacggtgtgttcctctcttagtgccccttt

SEQ ID NO: 80625 - DNA, 1112 bp, Homo sapiens
gcacccagcaagttgccctacttaccgaacaaatgtgttaacttaaaagtagatgacctgttttgttttgttttgtttcgttttttgagatagaatcttgttctgtcacccaggctggagtgcagtggcgtgatcttggctcactgcaacctccgcttcccgggttcaagccgattctcctgcctcagcctcccgagtagctgagattacaggcatgtgccactacacctggctgatttttgtatttttagtagagacgggatttcaccatgttgtccaggctggtctcgaactcctgacctcaagtgatccgcccgcctcagcctcccaaagtgctgggattacaggtgtgagccaccatgcccagctgatcacctgtattattctgtcctacctgcctctgcataagtaattaaaggcatttttaagttcatttcatgaattaatagacatggcttttgagagagttaaatgtgaatattctctttgccatcaggacaaagcaggacctcataaggaaatctacccctatgtcatccaggaacttagaccaactttaaatgaactgggaatctccactccggaggaactgggccttgacaaagtgtaaaccgcatgggtaagcgacaaaccactgaagaaggcaggaaaacaatccagagaggtgtgggtggatgacatttcagtgtgctatagtaagacctttcagtgttcttgttagaggtaatggccgtgagcatgaagagattttgagaataccagtaatggtaaatttaaagaactgaaatgatttctagttgttgtcattattttctttctttccttcttttctttctttcgtctttttttttttgagatggagtcttattctgttgcccaggctggagtgcagtggtgcaatctaggctcgctgcagcctccgcatcctggattcaagcctcagcctcccaagtagctgggactacaggccacatgccaccacaactggctaatttttgtatttttagtaaagacgggatttcatcctgtcggccaggctggtctcaaacccctgacctcatgatccacctgccttggcctcccaaagtgctgggattacaggcttgagccac

SEQ ID NO: 80626 - DNA, 1075 bp, Homo sapiens
cagccaggccaagatgctgaaaccccgtctctactaaaaatactaaaattagctgggcttggtggcacccgcctgtaatcccagctacttggtaggctgaggcaggagaatcacttgaacccaggtggcagcggttgcagtaagctgaggtggcaccactgtactccagcctgggtgacagagcaagactccatctccaaaaaaaaagttaggagttgaaaatgaccctcttgttctcaaaggggaaaaaaaaaactcaggattttttccttcaatctgcgtgctgttgcatagttctttctttccactgattcactaagggagatccactgtgatcttattatctagaatttgttaaaggtaggtttctctcattttataggtaagagaatggagacccagacagataagatcatacatcagtgattcagtaaaaatataaataactcatagtttaagtgaggctcttcgaggttgacatggcccttctttttaattttgcagggataaacacacttgttacctatgatatggttccagagcccaaaatcattgatgctgctttgcgggcatgcagacggttaaatgattttgctagtacagttcgtatcctagaggttgttaaggtcagtgaaataataatgctaaaattgttctgtaaatgagtgggctattgctgaggtatcagaatattctgtatttttgaatttgttaaaatgcctaaaatgagtccttatataactagaaggaatgtacattgcagttaaaatctttctagaggctactttggcagcatttattcaaggccttacaaattgtacatgatacacttttgttcagcaattccatttaagaatttatcttttttcttttttctctcttttttttttttctttcttttttaagaatttatcttggccgtgtgtgatggctcatgcctgtaatcccagcactttaggaggctaaggcgggtggatcatgcaatgtcaggagtttgagaccagcctggccaacatggtgaaaccctgtctctactaaaaatataaaaattaggccaggcgcggtggctcacgcc

SEQ ID NO: 80627 - DNA, 1010 bp, Homo sapiens
atagcacgggcgcggtggctcacgcctgtaatcccagcactttaggaggccagggtgggcggatcacgaggtcaggagatcaagaccattctggctaacatggtgaaaccccgtctctactaaaaatacaaaaaaattagccggacgtggtggcgggcgcctgtagtcacagctactcgggaggctgaggcaggagaatggcgtgaacccgggaggcagagcttgcagtgagccgagatcgcgccactgcactccagcctgggcaacagagtgagactctgtctcagaaaaaaaaaaaagaatttacacaaagcagtcatttggttcccttcccctttgggtgatggtttgggttttttgttatttttgcattgttttgccatgaataagtatctaagtaagttagaacttgtctttcctaaatttgcagatgcacacttaacatgaaaaaatagaattaggtgtagggtaatttatctcataccaaaaattcaatctcaatgactatcgtattcactggtatcctttgtttaaatattttaaagtaataaaagcaagaaacctaagtgctttaaacttctctgcagaaatgtaatgattcccttttgctacaaccaatagaattcttactgaacaatctggagtagaagtaataaaaagaacaattatgtattcccattaagagaatcttaaattttattatgtgtcattttgtgcagatctgaaagtaatcatgcccaatcattttctggttgaatgtttatgagtctgtgtactaatgtttctctataatatctccttaatgtcctcatttaggcttcattaactctacgcatttctctggctgtttttaggctgttttccagttgaatctcttttattttggtttttttgtttgtttgttttgttttgtttgagatggagtttctctcttattgcccaggctagagtgcaatggcgcgatctcagctcactgcaacctccaccacctgggttcaagtgattctcct

SEQ ID NO: 80628 - DNA, 1051 bp, Homo sapiens
tgctgggaaggctgagataggagaatggcgtgaacctgggaggcggagcttgcagtgagctgagattgcgccactgcactcccgcctgggcgacagagtgagactccatctcaaaaaaaaaaaaaaaatttaaatcacgtggggagagtctgttttagcccttcagaaagggatgtatgggtttttaaatttttatttattttaatttgtttgatatagagtgttgctctatcacctaggctagagtgcagtggcgcagtcatagctcactgcagccttgttgccctgggctcaagggatcctcccgcctcagcctcctgagtagctgggaccaccaaaccccgctaattttttaagttttttgtggagaatggaggtctgtctttgttgcccaagctggtctctcagtcctggcatcaagcgatcctgccttggcctctcaaagttctagttctgttttataaaagactttttggaatacaaccagtttgtaatttggcttccagaagacatatgatcaaatccttgaaggtggtgatctccttgacttggatttgctgttggtggtcatcttattcacagttaggaaacaaagcctagcactcatgtagtcaaatccatgcccagcagtgaacaaaacgaattgcttatcatgaagcactgttgtggatgggacaggtaattacctctggggaaggagtacatagacctttcattgggtaaatacttaggagtggaattactgtgttatatggtaggtttgtgtttaacttgataagaaactgcttaaaccgtcttccaaagtgattgtatcattttatacttgcactttcagtattcagttaaggctagctttagtttttgaagaggtggcttataattttttcttttttgagacagggtctcactctgtctccgaggctagtgccactgcatctggccctaagttcttgataatagtgcattagatggttgttctaatctatgtttttacatagatagatagatagatagatagatagatagatagatagatagatatttttttttt

SEQ ID NO: 80629 - DNA, 1125 bp, Homo sapiens
tgtttgtgaaccgatccttgtcctccgcctcggggagctcctggtctgtgggttgggggaaccaagtagagactcggactgagcattcactgtcacaggcggcttaaacaagtaatgtcccagcttcccgatggggagatcagtgagggcctggcagactttcccagggacacagagagaaagggaggcgacagctagcgaataggagacttccagaggtgatgggatttgggtgggaggagaggcaagagagggcattccaggagaatgtatgggcaaaggcacagggatgaaaacgagcacagctgttgggggctgagcctgggagctcagccatgtgactgcccatggggtggtggagtctggagaaatttgcaacctgtcccctacatgttctgcctcacggagcagggctctgaaagagggagatggttcttgcaggggcatgattggcagagagattttgtttggggctacacaggtcttgctaacttaggtttgttctgggcttggtgagccttagggcaaagtctctagagctgagagggggctgtctctggtgaatgggcccctgaaagagggtcttaggtttagcaaaccccttggagagttagtggggtcccaggaggggagttctagagagagaccttgggctctgtggctgtttctttaaccgtttcctgagtggccacctccaagcaagttccccaagtcacctcccctctctgggcatctctttctagcacctttctctagagatgaaataataggactaagtagtgacctcccttgaggatgctccttgttctagtttagagcatcccccctttcttctccctcttccttttcctttcctcccctatccctctgcctccctgtccctatccccaccccttgccccccacagcatttcctttacaggctgcacttccttccctgctgccagccaggagtttcggaaggtttcctggaggaagtgtgatacagcaggtttgacagcagctttgggcttaatctgattgggggagggcgttaattgcctccctcccacccattgggaaagtgtccaagtcttaagcaagtatatggattgactgtgctctgtgctgggtccctcctggaaac

SEQ ID NO: 80630 - DNA, 1082 bp, Homo sapiens
gtctaacacacaggagattgcacaagttgtaactgtatgcttggagaatgttcacaaaatccatacctttgtgtatccagaaccccgaccaagaacagatgccgggcccccagtcgctgccccatcaagggtaatactatcttgacttctaacaccatagatttagtttttcctgttccaaaactttaagcaaatttctgcccagcttttaaatgttgcattgccttagcacttggttgtggaccattttctgctgttgactatataaatgtccaccaaagtcactgttctaacaaggtgattgctgcttggtttccttggccttaacttgccagtgattacttagcatgggtcagccaggcctcctgctgaactcccaggagcagagcatgtttgtaccctccagattcctataagacgccctgtccaggtgtcccccagcgtctctaccctgtatgtccctagcacagctgctcgtcctcccctggaacctccgcctcatctcacacaggcttgtcatgatgggtctccaccatccactcggggttaagtgggcagggagtcttccaattgctccctttcccctactccttaaaaccaagaccccttcaaacttgtctcctaagggtctcaggaagcacatcctgcccaccttgcctttccagcctcatctgctgccccctcatttgcactctgctttggccatagtggctttctttcccttatgatgggtggctcatgcctataatcccagtgctttgggagtccaaagcgggaagattgcttgaggccaggaatttgagaccagctgtgcaacacagcaagacctcctctctacaaaatattaaaaaattagcatggtagtctgtccctgtagtctagctactcaagaggctgaggcaggaggatggcttgagcccaggagtgccactttactccagcctgggtgacagagtgagaccctgtctaagaaaaaaaaaaatgtgaagctccttcctagtaaggaactgtccctgtacgatgctttcccatctgcctagaaggctgttttgcccggggaactcctcttcatgcttcaggtt

SEQ ID NO: 80631 - DNA, 2339 bp, Homo sapiens
ggatcatcacagctgacccggggaggtagggacggctgggtggggaaagcagagtggccggtggccacaggggccaatggggcagcacagccaggggaaggatgggcgtcttggattgtcgggtggaagactggaggtgatgttgtgcaatgtgtctcatccacagagaaagtgaacaacttcccaccattgcccaaattcatcccgctgaagccatgtttctaccaagacttcgaggcagatattcctccccagcatgtcagcatgaccaagcgcctctactacctctggatgtgtgagtgccatgggatgggggtgggccagggtggctggaggaggcaggaagactgggcgtgctgggcagcggggtggggtgcccacaggcctgactgtccttcagtcccacttgtggcatatgcatggaccataagtcttcccctgccaggctcccagaggcttcttccatgggccacctccccgactgggcctcagtttccctcaacctcccccatctaggcctctcttcccttccttcccctccaccctcctttcacagagcatctggacaggggtccctctctgcagtgtaatccctgtcttcttgcttcccctttcccttccactggagtaactttccagggaacctctggggactgtcaggacctcaggattctggatttggagaggaatccttccctcaaagccttatttgtcttgctttctctggaagattgctcaaagagaggaggattcagctgggagttgggagctgtgggatcaagtttgcctggtcactgtgcttgccaagcagcaggttcctcatttgtaggaagaaagtattggcttggcgattgctgtggttccatgcagctctgtgttgggtggtctatacctgtaagagtctaatgtcaggcacagtggttcacacctgtgatcccggcactttgggaggctgagccaggaggatcacttgaggtaaggagtttaagaccagcctaggcaacacagcaagacccctgtctctacagaaaataaaaaaattaggcctgtgtggtggctcacacttgtagtcccagctattcaggaggccaaggcaggaggatccaatgagcctaggagtttgagaccagtatgggcaacatagcaataccccatctctttaaaaaaactagctgggaatagtggcacatgcctgtagtcctagctactcaggggactaaggtgggaggatcacttgagcccaggagttcaaggctgcagtgagctatgatcatgctactgcactccaccctgggtgacagagtaagagcctgcctctaaaaaaataattaaataatctagaattctttatttagaaaaccttagcatcaatgttctaaggttttaaggctgagagtgtaaaggcctcatttctggtgatctgtagcagggggtgggaaaggtgtcttcttggggggatgggacttggctgtgctgaggctagttagaaggtacctcttaggcatgtgagggggaggcaagctggctatcctgtgctgggtgtgagccccaggatcccaagatacccgcaatgtaactgcagttgggttctgctatatgtgacactgccctgagtgaggcctgcacttagctgcctacctgggcagatgcttgcatgtgccgacaaggtggtaaaatatactgtctttgcagcaggtccctcatggcatggtaggaagaggatggggcagacagactcagtttcaaggcctggcttggcctttgagtgaagaagggatctcccaccatgtaacctgagagaaggggggatgggacaggtgtgggtaagtctgtagatgttgggaagcaaatgaagaagttacctctgatggcttccattttttccatcaaatatgatgtagtgtggagagtgggctcacaacgaggccatgtttgtcgacggatagtgaggacactctccaaagaaacccggcccctaagatttctgggccacacacaaggttcatttgacattggctgatgtgaatttacagtcttcctcatggggtccccttttttcttagcaacattcagctcaggtacagatgagaattatgttcatctagggtgagtgtggccagaaggcagggcaggggagggaataagaaaatgagtaatgaattatggaatctaagctggataaggagaagagtgaagacagaaagaagctgatggctagagagagagaggggctgagctcatgggtatccattccagagaggaagcagaataattgcagcagaggtgtttgagcaagggagctggggcaggttggactggggagagatgtgaaccaatat

SEQ ID NO: 80632 - DNA, 1046 bp, Homo sapiens
ttctatataaagagcaaataaaatcagttttaacaccaagcctccaggagattttggggcaatgaacagggatagaggaaatacagctgaaatgtacaggaagaaatgcccacccatgaggggccctgagatgggtgacacggtggtcaggccaggcttgtaggtcactgtgtctgacctgggctctgggaactcaacttctgggaacatctcatccagaagctggatttaagggctataaatatctccttaagtcctcactaggcacccgcaggtgctttactcccaaggaaatgtatataacccttgaggtgcttaagggttctattcagaagacaggaccacagatgcctggctgtttgaggccacggttgagccctccttcctttgtttattcagcaggtctttgtggacttagctttgttttcaaggaagggagtgccctgatgttagataatgatgtgctgcacagacccgcatgtgtgttagtaccagcatcacttttatctgtaaatctttgaggtccctgctggccgtgactcagtgacactgtgcctcctagttcagctagatgaggtggggacagaggggggggggcctgggtcctgttcttggggaacttttagtctggttgatgggctgggatttatatctggggaaccttgagagcagcccaggtctgtagaaggtcagagggatgggagatgatgaggttgcagtagcaaaggaagacttcttcaaggagctggcatgagtgttatctaagaaatagattagatagctgggcactgtgactcacacctataatccggcactgtgggaggccaaggcgggtggatcacctgaggtcaggagttcgagaccagcctggccaacttggcgaaaaaccatctctgctaaaaatacaaaaattagctgggcgtgatggcaggcacctgtaatcccagctactcaggaggctgaagcaggagaatcgcttgaacctgagaagtggaggttgcagtgagctgagatcgcgccactgcactccagcctgggcgacagag

SEQ ID NO: 80633 - DNA, 1046 bp, Homo sapiens
cccatttaagtgcaaggtagatggcacaatggctagaagagatgtttccacaaggccttttatttttccctttccatgcccatatctcgaaagagaaagtgtaaggtcggtttcccatgtcttgggcttggtgattgctgtgagtctgggagggtcaggggctgaagccattcttgacaaggacaagagcatttctaccaccctgaggctttggggcccttcaaaggggcttgctgggcagaagctctgggttctggaggctgtgctctccagatttctcaggagtgggtgctggggttgaggggtgggggttggttcgagctcccagcttgcgttcttacagtctttactcctctgcgtgtgtatgtgtgtctcctgtgtctctgtatgtatttgttggtacgggttgtgggtcttttgtgtgggtgtgaatctgtgaatgtgtctgcatctctctgtgcttgtctgcgctgttggcctggcttgattgtgggtctctgttgcgttactggtgtgtgtgtgcccatgtccgggtgctcatgtgtctctctatgggcctgggtgtctgtctctatgtgtgcatgtgctcctgggcctgcagtgaacagcgtcacgctggccgtgaacctggtgggctgtctcgcgtggctgatcggaggcgggggagccaccaactttggcctcgcctttctctggctcatcctcttcacaccctgctcctacgtctgctggtttcggcccatttacaaggccttcaagtaagtggttggtgctatccgcagtgcctagccgtctctgcccatctcccctgtctcttctccatatcttttctcacttctttttttttttttttaccctcccccaaactcactttcccttgctcacctttggctcagattgctaggtagggcctgggctttctgggggtgccaagttgaggtgagagggctgagagttagtttctttcctcctcactctacccttgggtgggggaaatatagacagaccaggcctattttttcttctgtcatccccttcctcaggca

SEQ ID NO: 80634 - DNA, 1087 bp, Homo sapiens
gtctgtaccccagcccccacctttcagattctgctcttggcactcagctgtgggctgcacgtggagctgtcccgtgcggtagtagctgtgtctgtgtcccctcgtgaaatagtgtgcagtggaggtctcttgtggtgctagatgtgtgtttagagctaaaccagcccccacccccaccctccacctgcccctcttgcctctggcccctctgaccctggcccagggacccctcacggggccaggggaggcatagcagaaagactggccccttcctagggttatgagctggaactgtttctactttcagtcttcctgggaagtaacagtacttagcactcttggtggtgggtgggagggtgggtacaggccagggatattcccttgctcttttgatccctccaggcctcgcctccttcagcctcctcctccctcatctgttccctgatgtcacattccctgtgcaatcttcccttgcccatggtctgtctatctctttcctatgtggcttttctttgtcttccccaaggctgagtgtcccagttttatctgctcctgagactgagcccagatccccaaatctaatctgatttacagttcaaggaagctgatggggagctgggccttacccctgatgtaggaggggcacacagctgggggtgcagagcccacctgggtacctgacccccaggggatgaaaatgcaaggatgagtctgcttgggcctgagagtttgatctgcaggggcaggctcatcttttctctcccctgccttctcctccttctctccccagagcccccttgagcccctctgcctatgtccctctgcctcctccccatgcccccagttgctgtggcttgattctgctaccctgaccccaccatgtgccaggtggcatctgccttactgccttccctgaggagctgggacatgctgggcagttgtcagatgtaaaggcacagctggagcagagggcatgtcagtaatgattggtccctggggaaggtctggctggctccagcacagtgaggcatttaggtatctctcggtgaccgttggattcctggaagcagtagctgttctgtttgga

SEQ ID NO: 80635 - DNA, 1042 bp, Homo sapiens
acggagggaaggtcagaggagaaggcaggcagggcccagtgagaggggagcatgccttcccccaccctggcttgctcttggtcacagggcggttctgggcacttgaactcagggcccaagcagaagcacaggcccagtcctggctgcaagcacaatagcctgaatgggatttcaggttaggcagggtgggaggggaggctctctggctttagttttgttttgttttccaaatcaaggtaacttgctcccttctgcctacaggccttggtcttggcttgtcctcacccagtcggaactccctaccactttcaggagagtggttttaggcccgtggggctgttctgttccaagcagtgtgagaacatggctggtagaggctctagctgtgtgcggggcctgaaggggagtgggttctcgcccaaagagcatctgcccatttcccaccttcccttctcccaccagaagcttgcctgagctgtttggacaaaaatccaaaccccacttggctactctggcctggcttcagcttggaacccaatacctaggcttacaggccatcctgagccaggggcctctggaaattctcttcctgatggtcctttaggtttgggcacaaaatataattgcctctcccctctcccattttctctcttgggagcaatggtcacagtccctggtacctgaaaaggtacctaggtctaggcccttcttccctttcccttcctctcccctaccccagaactttggctccctttcccttctctctctggtagctccaggaggcctgtgatccagctccctgcctagcatccatgacctgttggatgttacctccaatcagtttcctgtcctacctgcctctttggcttggacctatatggccatgctctggctctacccttgggaagcctgatcccggtgtgtggcccagcttgttcaggccctgggatgctgcatctccaggcaactatgcactttcccggggagagaaccagtatgagaagtgggggcagggcacacattcatctttgtaggaaggtct

SEQ ID NO: 80636 - DNA, 1032 bp, Homo sapiens
gcgcgggaggggaggttcggggagctgtgtccgcgagcgtgggtccacggctgtctgtgtgtgtccttattttcccctgtgtgcccatgaagctctgtttgcgactgtgcgtgggtaggcggccgtccatctgtgcgacctcactttcccggctgtacgggtggggccgcctggagcaggagggacccccgagccctgagtggagggtttgcatctgtacccgtccagcccgactttgtgctgctctgcgattatttgtccagtgtcgtttaatctagtttaaatgatggccgtgtcagctcctcacactgaacgcttacccgggctgcccaaagtacaaagtgtatttaaaaagttggtaaaattaaaaaaggaaagccatgggatgttggaagtagccctaggcctgccaaaaagtgctgagtgctatttaaaaattaggccaaatcttgtcagaaaagaacttcctgctgtccttgaagtatttggaagcaggtgctagatggtgagcaggagaggttgccaagttggggaagtggtggttgtcctggagcaggggtttccacatctctcacagtggctgggaagtagcaattcgcagtcactgcctttctagtagcccacgtgtgtgagtgtgtgtgttagatacatttatccctcagtatccgcaggggattgctgtatactttttttttttgagacaaggtctcattctgtgacccaggctggagtgcagtggcaggaacatggctcactgcagcctcgacctcctgggctcaagggatcctcctgcctcagcctcctgtgtagctggaaccacaggcataaacaaccatacccggctaatttttattttatttcatttttgtagagacagggtctcaccatgttgcccaggctggtctcaaactcctggctcaagctatcctccttccttggcctctcaaaatgctgggattacaggtgtgagccaccacatcaccctcctgtatactcttttttcttttctttttttttttttgagtcagggtc

SEQ ID NO: 80637 - DNA, 1052 bp, Homo sapiens
atcctcccaccttgccctcttaaattgctgggattacaggtgtaagctggagcagaagcctgggcagccggtagtgaggggctttgatgttaggctaaaggattcaggctcataatggatcttggatccctgcctacccaccacccacttcccttgtttggttctgctttgtcttaggctcagttctcatccttcctgtattgagcttgaacgtataccctgtctggccttgctttccttgctctgtctttagtctggttctgtgccagctccacctttgcccatatagggactggcaggtatccctgaaacctaaaactctgccctgaattaaactcatcagaggagacttaaacatcacaagctgaggctctttgctctgtctgtccctgtctttctggaggatagagaagctgccatttttctggctgtggcttacctgcttggctagtgccctgggatcttgaggctcagtaatcaaagcgtgtagccctataacctgcccacttgccaactctttttgctgctcaggagttcctgtgaattcagcagagcccggggaagtcaggtactacagctacctgtgcaaataggtgactccaacaggttctggttacagtaatagacttactggtttggaatttgatcctctttgcaagcaaatgaaggaatcctgccagccatcacccttcctggaattctcaggttgaactgattggacctcgcctccaaatgttggttaaatgatccactttctattcttcaagtatattaagcacacacatacacacacacaccctcttttttaggaaggtaggtaggtttgatccttagcacagctttgctaagcaggctaagtactgtatttcggactatagtgcctgctgtggggaagcagttgaagtcactaatacagattcctgccccaagtttaactgactgctttctgtaacctgtttcctaggaatgagatcagcttgatgtggaggaggttcaggggcctcagagataaaatttggcttctggttttgcaggaatctacctatcctagc

SEQ ID NO: 80638 - DNA, 1053 bp, Homo sapiens
tccctgcatttgtttttcccccagtgccttcaggtttgaaataatcagcataccaaagccgcatattatggggtggcatttcctgaactccttcatccacacccttcaaacttgggaggagaagacagacatcgccctagcttttgccagggcaggtgtcagcagaattcagagccaaaaggggatttctaaagatagagaaaacccccaactcaaggagtcagcaggcctcgggctcagagaaggatacatttctagggtgtctgtcaggacatccaggtctgtcgagggtgaggaaaagaaggctctgctcatatgcagtgtggagtaaattctgactttctggaggaccacttgacaatattgagagaaattaaaacatcttcatagtccttgatttacccacaggattaaactctgtggggtgtatttacaaagtgaaaggatgtccattatagcattatttataatttcaaagcaaaactggaagcaaacaaaatatccagcagtagagagctgtggtgcccttatgatttatgggacaatctctcagtggattacttggcaatgattcagaaaaatggggtggctctctctgtgctgaagggagcaatcatcaagatggaagcggaataagcagggtgtaggagctagcaaactggacccccccccccaaggccaaattcggctctgcctgtttttgtatagcctacagctaagaatgatttttacattttaatttttattatttatttttgagacagggtcttgttctgttgctcaggctggagtgcagtggtgtgatcactgctcactgtagccttgacctcccaggctcaagcagtcctcccacctcagcctcccaaatagttgggactgcaggcgtgccatcacactctgctaatttttttgcattctttttgtagatacaggattttgctatgttgcccaggctggtctcaaactcctgggctcaagtgatctgtctgcctccacctcccaaagtgctgggattacaagcatgtgccactgtgcctggcctgatttttacat

SEQ ID NO: 80639 - DNA, 1128 bp, Homo sapiens
tgtttgtttgtgtaatctctttcttgctagaggactctcctcagatatctgatactccttggctgttcttatttgggtgccaaaagttgattggaaactctgtcttcactgccagggacttggtactcatctggtattgaaatgttttgttggtggacctctgaattccatatctgaaggtttccttccctaccacatctccctactgccagggttatttgttttttccagaaggaccctatcagtagtctcctgcctggttgaccttgcgttcttagggtcaagtaggggaagcaggcttgggtctctgtttggtctgtagatactcacttctgctccaggactcctttgacctctgttgtgctaactctgcaagggtagtatgtttggctgccttgggtgggaagaagacctggggggactttagctgttccttctacaggtcaggaagtcctcctgtattcagctatctgcctcatgctcacctttgtggtactcactgcctcaagtcctaggctcctgggctctaattggcttgtgtctcagttactgtgtaggctttggatattttcttttctcatctaatctaatcttatcttgtaggatctgctctgctagtgcttcctttcgcttccatcttctgaaagcgcattggcacgtcttaactgctgttggttcctcttctttttgttcttgagaatttacttcttttctttctttgtttttttttttttgagatggagtttcactcttgttgcccaggctggagtgcaatggtgcgatctcagctcactgcaacctccacctcccaggttcaagcgattctcctgcctcagcctcccgagtagctgggattacaggcatgcgccaccacacccggctaattttgtatttttagtagagatggggtttctccttgttggtcaggctgatctcgacctccccacctcaggtgatctgcccaccttagcctcccaaagtgggattacaggcgtgagacaccatgcccagccgttctcttctcttctattccttgacaaggtctcactttgtcacccaggctggagtgcagtggcatgatcttggctcactgcagcctcgacttcctgggctcaactgatcctccca

SEQ ID NO: 80640 - DNA, 1014 bp, Homo sapiens
ccttctccctaattgccaccccccacctcatttattgagctttcgcctaccacgtactgtactggggtctgttctgagagcctcacaggacacagggagctcccaggctggaaggagaatgccaggcttgatcacccatgccgttgggaagggagtatcctctggtgaggggtacagtcctgaatgaccccagtcagtcctttctatggagtcaccaccttgcatagtgctgggcctgtggtagacatccaataaatacttactgcatgtatgcggtaactagcagttttacttttgcgagtagctgggagtttttcagagtttcatgtggtgaagaaggtggatgatgaagctgggacaggatgttttttggggtcacagattagtgttcttgtatacttgtcaatgggctcttaaggcactcctcaaagaatctgccagtgatttaagcatcatttgaataagagcacagggtgagcagaagaacaacttgtgtggccaggagcaggggtagggagtgcagagaagagagagcctgggtgcaatgtcatcaagaaggctttccctatagtcccagctacttgggaggctgaggtgggagggtcgcttaagcccaggagttctaggctgcggtgccccttgattgtgcctgtgaatagccagaatagccagtgcgctccagcctgggcaacatagcaagaccctgtctctagttaaaaaaaaaaaaagggaaaaggctaggcatggtgcctcatgcctataaccccagcactttgggaggctgaggcaggaaaattgcttgagcccaggagtttgagaccagcctgagcaacatggtgaaactccatctctacaaaacatataaaaaaaattagccaggtgtggtggtgcatgcctgtggtccccagctactcaggaggctgaggtgggaggatcgcttgagtccaggaggtcaaggctgcagtgagctgtgattgtgccactgtactccagcctgggctacagaggtgagac

SEQ ID NO: 80641 - DNA, 1915 bp, Homo sapiens
ggtcaggaagccaggcaggaagccaccaacccctggcccggagaaagcagaggcagctgctggggaagagtcctgtggtgcctcccctacccctgctaccagtgccagcccacctggccccacactgaaggcccgcttccgcagtctgctggagaccgcctggctcaatggcctggctctgcccacctggggccacaagtcctcaagaccagaccagccctcaccctgcccacagctgctggacagccagagccatcacctgtagcactggttgccagtgctgtgtgtatagcagtcactctccacccttcccttctgcctgcccagctgccccggggccacgagtggatgctggggctgtggctgctcccctggaggggttccatctctgaccctgtggcccattcagggtgggctgaagagcccctgagcttttaacgtgagggtctttattggataggactactccctatttcttgcctagagaacacacatgggctttggagcccgacagacctgggcttgaatcccggctcgtgttcttgctgcaggacctgggcaagaaacttcacctctgctgagccctcattccccatgtgtaaaatgggacaacgcaacctacctcacagggttgttgtggggatgctgcctgatacataccctgtcaccatttggtctctgcttcctctctgggacagggcctagaattggaggcagagaaccttcctatagaaagtcttcgtgtgtcctaggacttggctatcgtagagtggtaccttaggcagtggatgtgactcacactttcaggagtcaccccccagcatttggggttgggttggccctactccagcctggagctccctgagggagcctgcactccctgctcccaatccccgctactggtgcagggatgcagcctggagctggcgtccttgttctgggcctgctgctgccgccaccccaggaggccccaggcctgtcctgaattgacatcagtgcttccctgaactgcctcccccacccctggcattatcccaggaaacttatgttttctagaagctaagcagctgctgggactcagggactggtgcaggtaggctgagtggcagctcagtcctagaaggtctctgaagatctggactgaggaccctgctgctccccaagccagagcccatcagccaggcctgctgtgagccacctgcctgtggagtgctgagctcaaccaaaggctggcaagctctgggcctcatttaagggattctgatgagccgatgggccctggaggcagcccattaaagcatctggctcgtttttggaagtggggcctgtccgtgtgtttggggatggtcggtttcatgttccgtcactgtgtgcttagccctttgctcgcaggctgctctccctgctcccagtccagaaggtgcttctgcaccctcgtgcagatggctgtggctctgtggacccctctcacacacatacttgcttgctctgggaaagccctctctcctgagaccccgtgggtcctcgtggttgttggtctgtgggctactgcctggtgagaaatgctggtcattagacccagcacgtgcctctctcccagggccagacatgtctttcatggtctgggtagaactgttacagcctccccattgctggtgaccatgcatcccactgaccttagcttggagggtggggggtagtgtgctgggcccaccctctggagaccctgcccctgctgggctctgttcccccagaggcttgttctcagggcagctaaggtggcttcctgggcctgtcttcccactccccctgggccaggggccagtccactggggcttgttggacctgtgtggcatcctggtggtggtcactgagcccagctgcactgtccctcctgtgccagcctggccttaac

SEQ ID NO: 80642 - DNA, 1032 bp, Homo sapiens
ttcaaagcccacagtgagctcacaactcaagtggggctgcagtgatttggaccttctcagcctttctcatgacatggcagggctgctctccgctggcaaatatggtctcggtctccctcaacatcctcttcccccagacgcttagagtggagggccctgcccaagggatttgcatccctttgcatgtcatttacaagcctgctgcccttgctgcctctgccttccccactgcactcagacaatgcctgatgttcctgcccacatcctgcagctggaatcagggctcagggcaggccaaagggcatatgaggtcacacagcatagccagtggcagaatcagacgtgggcctcctccctgcctgtccagggctcttcctgcctctgtccccaggtgctcctgaacagggggtgggacgggcagagctaggcatctgggacagtgcctttgtggctgagaagggtcagagcagctggtgggtgatgggtgggccctgagagccacgtgcactcacctgaagaccaggacaccgatgccctggaagccggggaaggcctcgtggtagaggggctggagctgaggatgggcagaggcatggaaggccggcacgtgccaccccccaccttccctcctgccctaacccaccccctctctgaccctaccacctaccctcgtccaccctccatcatcttggcatggtccctgcaatggtccctcacggaccacctgggattcccaggccccgcccaagctgttcctcacacagtggccagagataacctgccagtcatcctctgctgaaagcctcaaggtctgtctgggcgtcgtggctcatgcctgtaatcccaacactttgggaggctgaggcgggaggatcgcttgagcccaggagttcaagaccagcctgggcagcatgacgaaatcccttctctaccaaaaataccaaaattagcccggcatggtagtgtgtgcctgtagtcccagctactcgggaagctgaggtgggaggatggtttgagcccaggaggcagagg

SEQ ID NO: 80643 - DNA, 1354 bp, Homo sapiens
gcactttggaaggcctaaggtgggcggatcacgtggtcaggagatcgagaccatcctggctaacactgtgaaaccccatctctactaaaagtacaaaaattagccgggcgtggtggtgggcgcctgtagtcccagctactcgggaggctgaggcaggagaatggtgtgaaccgggaggcggagcttgcagtgagccgagattgcgcccctgcactccagcctgggcgacagagcaagactcgtctcaaaaaaaaaaaaaaaaaaaaaaaaaaaaaaaaaaaattaaataaaaataatgtcctctacgctcctgtgagtaacttggctccgggggctccgctcgcctgcccccacgccgcccgccacccaggaccgcgccgccggcctctgccgcgaacaaacccttctgacggccctcgctgtgcaggccaggatgcctctcccccatccgcccccgctgcggaaagttaagtttgaagaggggggaagaggggaacatggacatgaagaggaggatccacctggagctgaggaactggaccccgtcagctgttcgagaacttgtcttggacaattgcaaatcaaatgatggaaaaattgagggcttaacagctgaatttgtgaacttagagttccttagtttaataaatgtaggcttgatctcagtttcaaatcttcccaagctgcctaaattgaaaaagcttgaactcagtgaaaatagaatctttggaggtctggacatgttagctgaaaagcttccaaatctcacacgtctaaacttaagtggaaataaactgaaagatatcagcaccttggaacctttgaaaaagttagaatgtctgaaaagcctggacctctttaactgtgaggttactaacatgaatgactactgagagtgtcttcaagctcctgccccagcttacctacatggatggctatgaccaagaggaccaggaggaacctgactcagatgctgaggtggatggtgtggatgaagagtaggagggcgaagaagaagacgaagaagacgaggaggatgaagatggtgaagaagaggagtttgatgaagaagatgaaaatgtagaaggagatgacgaagatgaagtcagtgaggaggaagaagaatttggacttgaagaagatgaagatgaggatgaggatgaaggaggaggaagaaggcaggaaaggtaaaaagaggaagagagaaacggatgatgaaggagaagatgattaagaccccagatgacctgcagaaacagaactgtttagtatcggttggactgctcatggatttggtagctgttaaaaaaaaaaaaaaaaaggtagctgatacaaaccccaggacacccaccca

SEQ ID NO: 80644 - DNA, 1050 bp, Homo sapiens
tccagcctggggaacaagagtgaaactgtctcaaaaaaaaaaaaaaaaggatagcaagccacacagagagtgcagcaggcatggaggcgggagcaaggctggtgtgccccagcagcagcagggaagctggagtggctggagttgtgtgggtatggggaagaggggagagagttcactcgtctctgtgaggcccaggactttgttttatcccatgctgtacccccagcacttagagtgggagctagcacagagaaggtgcttaattgatgtttgctgagcagatgaatgcctggagtagacctcagagcagggtttggtggcagggtgggtcagggagagagtttactcaacagcctggtgataggggagaacaagaggccagagggtatccatctatgtcggggaccaggggtccctggtgggcagcagtgtgggagacacacggatcctggccacacctcaggcctccctccagcctgattacctgcctccctcccttgcagaggttccggttctgtggtgatctggactgtcccgactgggtcctggcagaaatcagcacgctggccaagatggttgagtgcacagggtctagtctgggtggaggaggggtgttgggggtggggattgtgggtgtagaggatggtgaggtttctctggggctagggcctcagtgctctcagcctgtgctaccatgctttgtgaccttgatcagtggctggcctgctctgagccagtccccaggaaggaggggtgaggtttgccagcctggctgatgtaaggacttcccttccagtcctctgtgaagttgcggctgctctgcagccaggtactaaaggagctgctgggacaggggattgatgtgagtacaagatccagcaccccattgtcccatgaccttatgaccaccactgccctgaaactctgcactaggcccagggagacgggtgagccagcctctcaacctctctgggcacctcccttccttctttccagcctgtctgttccttatcgcaggatccaggctgggggtgaggggctggtgagcag

SEQ ID NO: 80645 - DNA, 1154 bp, Homo sapiens
tcttaatcccactccaggatgggaaacccatggccgagtgggaagaaaccagctgaggtcacatcaccagaggagggagagtgtggcccctgactcagtccatcagcttgtgtagctgaggtctgggccaggtctaaccaggctccccactcctcccaacctgagcctgccctctgatctctgcctgttcctctgtcccacagggggcaaaggctacgggtcagagagcggggaggaggactttgctgcctttcgagcctggctgcgctgctatggcatgccaggcatgagctccctgcaggaccggcatggccgtaccatctggttccaggttgggccctactgttcacacaggcagagaccccaggaggctgatgggtggaaacgtggggtcacaataactggggtggtgatgctcagggtctgtctagaccctccaaggaccacactgttcctgagggtcacacccctcccctcccatgcgtcccagggttgcagctagtggaagtagcccaaggcaggtagcccaagtgaaagtagccaagggcagagcagctttgctgatgtggactctaacatgggggatgtcctagaggcttcctaagggagaagctacactgatctggatgggtgtgtgtgagtcctgcctctccaaggaataccgcccctgtgccaacccaggctgattcctgaattatccccatcccattttagggggatcctggaccgttggcacccaaaggtaagctactcctaatgtaataggctaagagagcagaaaggacttcacgcctgcaagggctacagcacccttctccaccctatccccctgcaaccctgggagtcacccctgggcaggataggaccctccaactccaacaccagtgtcctgcagggcgcaagtcccgcaaaaagaaatccaaggccacacagctgagtcctgaggacagagtggaggtatggctgcctgctcccgcctcctcccctgcactctgcagccctggctgcccctcccaggcagctgccttaccctaagagggcggggggagtggtgggccctaaccaacctctgaactgctttctgagcccctcagggacccgtgtctcctccatccaggacgctttgcctccaagcaaggccccttccaggacac

SEQ ID NO: 80646 - DNA, 1032 bp, Homo sapiens
tcccaaaaattcagacccccagatgcagggcaagacaataagaaagggtgagtgcaagcaaggagagcctcctgctaagaggctgaggtcccctctggttccaaggatgggatgtcagccttgaccttccggggtctgcagtggcctgggggaagaacaggcaagatggtcagctaagactccaggggctgccatggcagcctttctcccacctttgtacacgcgctcctaggccaccatcccatcctctcctgtagagccagtttctgggagtgatgaggaaagcccaccagaggctgcctgtcgccccttcctcctccccttcttgggcactgtgggagcttctgggtcctgctggaggctggtcccctcaggccgctgggttgcagtcctcttaggaaggtctctctttgcccttcgtgtcctggaaggggccttgcttggaggcaaagcgtcctggatggaggagacacgggtccctgaggggctcagaaagcagttcagaggttggttagggcccaccactccccccgccctcttagggtaaggcagctgcctgggaggggcagccagggctgcagagtgcaggggaggaggcgggagcaggcagccatacctccactctgtcctcaggactcagctgtgtggccttggatttctttttgcgggacttgcgccctgcaggacactggtgttggagttggagggtcctatcctgcccaggggtgactcccagggttgcagggggatagggtggagaagggtgctgtagcccttgcaggcgtgaagtcctttctgctctcttagcctattacattaggagtagcttacctttgggtgccaacggtccaggatccccctaaaatgggatggggataattcaggaatcagcctgggttggcacaggggcggtattccttggagaggcaggactcacacacacccatccagatcagtgtagcttctcccttaggaagcctctaggacatcccccatgttagagtccacatcagcaaagctgctctgcccttg

SEQ ID NO: 80647 - DNA, 1598 bp, Homo sapiens
gaggctgaggcaggagaatcacttgaatcctggagggcggaggttgcagtgagccgagatcaagccactgcactccagcctgggtgacagactgagatcctgtgtgaaaaaaacaaagttttacatttaatttgatactcatgatcattcgatggggtgagtactattatttattcccgtttcacagataaggaaactgaggcttaggcaggttgggtggcatgcccagggccccgtacagtgggagctggagttcagttgtgtggttctagagcttgtgctcggcctagtgacaggagctctggagtctgggagcacaaagaggggcacagggccaccaagtgggtcttggatctgccctccaggtgtgggcccatcgctggatggatctgtcagaacacggctttgggctggccctgctcaacgactgcaagtatggcgcgtcagtgcgaggcagcatcctcagcctctcgctgtaagtggggtacccaccaggcctgggagctggcatggagaaatgggtcttcccgaccacaactccaacagcttcagcgtggcccctacgcgccctcctcaccccagcttgcgggcgcctaaagccccggacgctactgctgacacggggcgccacgagttcacctatgcactgatgccgcacaagggtgagtgctggggacggtggggccttcctgcagccctagacacctctctgcccttccctgagcccaaaccccagcaacctggcttcctgccccttctagggacaggggagggtagcccccattctccaccagcattgtttcctggtcgtaccccaggctctttccaggatgctggcgttatccaagctgcctacagcctaaacttccccctgttggctctgccagcccccagcccagcgcccgccacctcctggagtgcgttttccgtgtcttcacccgcggtcgtattggagaccgtcaagcaggcaaggggtgggacgtgctggggacggggttccgaactgggcctgccctcggcccctcccaccagacgtgttcctctgcaggcggagagcagcccccagcgccgctcgctggtcctgaggctgtatgaggcccacggcagccacgtggactgctggctgcacttgtcgctgccggttcaggaggccatcctgtgagtggcggtgtgggattggggcgggggtcgagtctcgccctcgcagagccttcatggcccctcctgttctccagctgcgatctcttggagcgaccagaccctgctggccacttgacccttcgggacaaccgcctgaagctcaccttttctcccttccaagtgctgtccctgttgctcgtgcttcagcctccgccacactgagtccctggggctggggttttgtttgtagaaggctctggggactcctaatttctgcttccccagcctaaagcagggatcagtcttttcttgtggaataaatccttggatcgggaaccctgctgctcagtccccttagggcccatcctcacgcttggggtgggggtgggaagtctggggtgggatggcttcccaggtatttggtgggtaggggcaagatcctaaggtacctgtgcgtg

SEQ ID NO: 80648 - DNA, 1074 bp, Homo sapiens
tggaagcggatcgaagtgatggccctgcccaaaccgggcggggcccacagcctaggtacgagctgaggggaagggttgctactgcagcaggaaggatggaggccagacagatcaggcctgggataccccgagggatctgggtgcccctgactggagagtagtagcacatcttccaccaacccatccccacctgcgcaagcttcctgaaaggtcaggaaggctgcactgatgcccaggcctcacccccagccctggtgacagtgcccagcatgggctatgctcctgttcctccccccacctcactgcagcccctgctgccccagcagcctgtgttcgtagtgcaagaggtgagtcctgcatgccctggggggcaggaactgtgctgggatactttcttacaactgagggtcctgagctcccctgtctggagcaagtggtgaggcggggctggggttggggtgggaagacttttggtgtgggaagcccctacagactcagcctcaaggcctcctcccacaaagactgatggctccgtgactctggacaatggcatcatccgagtgaagctggacccaactggtcgcctgacgtccttggtcctggtggcctctggcaggtgccaaatcctcattgccctttcccagtgcctggcaagtagaccccaggccatttcctctctccccttgccacaacactgcccacagcagcccaccagtggctctgggctggaacccacacatggagcagggcaggctgggcagtagtcccctgtccactgggtctactcactccaccctaccccaccaagagcagctggagacagcgaggtcagttggttgtacagcaccaatcccatgtccttccagggaggccattgctgagggcgccgtggggaaccagtttgtgctatttgatgatgtccccttgtactgggatgcatgggacgtcatggactaccacctggagacacggtataggctgggcagcatgtggggatggtggaggtggtgggaacacaggctgctctggatcagtatgtccacccctgtcccataggaagcctgtgctgggcca

SEQ ID NO: 80649 - DNA, 1907 bp, Homo sapiens
cagcagctggaatgggtgaagagccgctaccctggcctgtactcccgcatccaggagtttgcgtgccgtgggcagtttgtgcctgtggggggcacctgggtggagatggtaagtgcactgggcactcctcagccttgaactgtatgacaacagccttccctcaggtagccccgccctcccggctttgctggtgagtttccacgggccactcatccccgctgtgtggcagggctggctcattagtccctgggatctcaaggcctgggacttcaagggggaggagagcctccagcgctgtgacaagttgcatggcctagtcctgggcaccccctcaggcagatggacagtcaggcctgaaggacaggggcccttcctgagttctggctgtaactcccatgtttgagcagccctggcttctcctgcagggattgggttggcctgagcgcctgcctgctccccgtccagcgctgacctgggctgcctcccacttccttcactgccaggatgggaacctgcccagtggagaggccatggtgaggcagtttttgcagggccagaacttctttctgcaggagtttgggaagatgtgctctgaggtaggctgagagctgctacaccaggctgtgggcgagtggggctggcgctcgacttggagtgctgaggggctgaggctggggtgagtccgcctggagctctggttcctgcactccaggatcctctttctccacagttctggctgccggacacctttggctactcagcacagctcccccagatcatgcacggctgtggcatcaggcgctttctcacccagaaattgagctggaatttggtgaactccttcccagtaagcaggcccccggggggtcagggtcagagtgggcctcagtcccgcctggcccatttgcctctcccccttattgtggggtcctagacagaccaccaaaccctcactctgcctctgccagggtcacatagcaggcaggggcaggaccaagtctggaaggcctggctctgcctcagccctgactctggcctctctgccctgcttctgtttccctgctggtagcaccatacatttttctgggagggcctggatggctcccgtgtactggtccacttcccacctggcgactcctatgggatgcagggcagcgtggaggaggtgaggggtcacctagggtggtggggtaggggcaggctggagagggctggcttgttccaggctgatccatgctggcctgccctcacctgtctaggtgctgaagaccgtggccaacaaccgggacaaggggcgggccaaccacagtgccttcctctttggctttggggatgggggtggtggccccacccagaccatgctggaccgcctgaagcgcctgagcaatacggatgggctgcccaggtcaggccaggccttggctctcctttagccccaccctgggcccttgccatgagccctgccttccctcagacattgggcccaacccctcctctggaccttgtcctgtcccaatcctagaccacgggttcctccaaacttccaccctgggggtgggtgggggagaagctgaagctggtaagggctccagcccatcagagagagaggctctcctagggcgtccagggctggccatctgtgaacggggagctttctggagtggctcctctctgtaggagctggatcctttgctttggtgtggaagaagggtgagccatgtggtctccaaggctgggagacctaggcttgtggtctcctcagggtgcagctatcttctccaagacagctcttctcagcactggagagtgactcagagcagctgtgcacgtgggttggggagctcttcttggagctgcacaatggcacatacaccacccatgcccaggtcagggggaggttgcagggc

SEQ ID NO: 80650 - DNA, 1007 bp, Homo sapiens
ccaatgaatggcccgcccatgttggccgtgttggttttagatcttgggtctaaaagtttgagcctgggagatccgaacatgattttaatatgcaaagagggttccaagaccaaggcagtgctttgcaaagacaactttggaaatataagactaaacagcagcgtactttacatggttccaaactttgctacttattctctctgacagcaagacatgggatccatctggtgtttgtaccacaaccctcccacatgcactcttgtcacactgtgggatcctctgggtagtggatcctggaagcagacaggttgggctcagctggatgcctcctgggtgccccttccccaagtccccggagtactgtgccagtcccttagcctgaggctgtctccccatctttgtagcctcactctctatgtggaagtagcctgcaatgggctcctgggggccgggaagggaagcatgattgcagcccctgaccctgagaagatgttccagctgagccgggctgagctagctgtgttccaccgggatgtccacatgctcctggtggatctggagctgctgctgggcatagccaaggtacttgacaccccctgtaccccctgctaccctctagagccctgctccaagaaggttgttctttgggtcagataaatgggactctgggaatccagagtaggacgagggtttccacctgcttgagggttgagagaattttcctatgtgaaggggaggagggagacggtgctgagcagggggaccagcagggaaaaagggttgggggtcaggggagctctgctgagagccctgagatcagtggagcctaggtctggaagctgtgcttgaaaaagggattaaggggcagaaccctgctgcagggcctcgggaaggacaaccagcgcagcttccaggccctgtacacagccaatcagatggtgaacgtgtgtgaccctgcccagcccgagaccttcccagtggcccaggccctggcctccaggttcttt

SEQ ID NO: 80651 - DNA, 1898 bp, Homo sapiens
tatactaacgcatgctaaaattgagaacagcgagctttttcagcccagagcctgtgttcgcatttctttggaggctttatggattttcatgccctcacatgttctatgttcttacctctttaacttctctttaaacagagaatccttttttttttcttttaagaaaaaaacagtggtatctaagacttgagcccacatctttcctttgctcctttagaagaaaattaggctttgtatttgaagggctcttttttggttctgcttcatttaataaaattttttttttctgttttgcagtcccatgagcgtgtaagcaagcgtctacatcagagattccaggcctgggtagataaatggaccaaggagcatgtgccccgtgaaatggcagcagagaccagcaagtggctcatgggtgaggggctggagggcctggtgccctgtaccaccacctgtgatacagagaccctgcattttgtgagcattaacaagtatcgtgtcaaatacggcacagtattcaaagccccttaactgcaaagccagagcagataacttggggtgtgtgtggggatgtgtgtgtgggcctatgcactcacacactgaagaaacaaggaagatgcctttcaagcctcactgggcctctctgggacatggccacctgacctgtgtgtggctggtgcagcctggcaccaagtgggctacctgttaggaacatgaataccttacaaagctgaagctggaacttttcccaaagggttttgggtatagcctgccctggaggggaaggaagtccatgcaagcaaagacatgcagtttgcttgcacacaccagcagagctaagactggagtctcctgtggcctaactttcaatgagggaaccggatgctgttcacactttgactggatggagatgcatttacaaaacagactggagaaggacttaatactcagatggattggaactatcatggtcactgctcctctcccctccccacaaaaggaaaaaaaagctggatttgattttttttttctggtcactcgagcacatctaagatcacccattaggttttatctgggacctgcagtttggctttgggattgatcatcttgtggattttattcctgacgattcccttgctgcctacccttttctctcctctggttctcaacctcaacgagttcaaatcagttgtcctttttagctcccgtggaactgttttgtatctgcctctttactagtctaccttagtgccatccaccagctttactctctgacacacacacgcacacacacacacaattttaacttgtttttttgtacataatgtacatactgtcaattttttattaaaagaaatatgctttgatgtgctagcataactgctctagcttcttgtgtaccatagtactgtggcttcagatttagtacctatgaacagatgtacaagacatttattacactttttaccaaagggagttaccattgtagtacttttgtgtaaaacttgtcttcccctttgcccccaacttttttttttttttttttgtaaataaataaagcttggttcttacttaaggaataaactctcaacccacgtcccttgtcctcaccagaaaatactgtgaagcagggattttgacttcagttccttatccagggtagaaacaggattttgcttaaaatacttgttacttgtcccaaatcaaaatattccaaaatcttagaatacttaagtcttttagtacgtgtttttttcccttgttcaaataatctgaaaatattttatatttgggtaagttgtcaagctatgtagtttgtatttctatatattttttcttattcacattggtgatggatgggggtgagcaacttaaataccaaaccagtgtttgaaaaaaaa

SEQ ID NO: 80652 - DNA, 1112 bp, Homo sapiens
ggggtacatttttctgcagcagttaaagagaataagacaaatctatcatgaaatgaaaaaatattcatgacagtaagtgaaaagttgaggacaaaatatatagtatgatcctattttgtcttaaaaacaaatcccaaagcagaactgtagctggtaattacatgtgtaaatttacagacagaggcctagaagtttctcattaaaactcttaactggctacatctgctaagtcaagtaggggatgggtgaagatttctgctttttattctgtgtacctttgcagttgaaattttttttgcagtgaaacaactgaacatttgtgtatgtatttaacaaattgggatgagtactatgcaagcatataataaagaaaactcactttggggaagtcacgggaatctgcatctggacgagctctcatcctccggggcttttctgcaataggaatctacggcggatccggaagtgtcaacgtggtcgagagcagcaggaaaaggaagggaaggaaggaaacagcaagaagaccatggagaatgtggatagtctggataagctggagtgtagattcaagctgaattcctacaagatggtgtatgtgatcaaatcagaggactatatgtatcggaggaccgccctgctccgggctcatcaggtgagaaccagtaactgaaatttctgtacacatctcccaccctagctaggaccaggggaggcccagagtcttctgattgtttttctttgtttatgcaaacctgttcttggagctgagacttaactgaggaagtacgtatgttggttgctaaggatgctgtgacaaagtaccacagactgtggcttaaatgacaaaagttgtggagactagaagtccaaagtcaagtgtcagcagtgttggttccttttgaggactgtgagggacaatctcttctaggcctctcctagcttctggttctttgctggcaatctttggcattcctgggcttgtagatccctgccttcatcttcatatggtgttcctacctgtgtgtgtgtgtctgcctccagatgaggtcacattcggaagtactgggggctaggacttcaatgtatgattttttgtttgtttgtttgagaca

SEQ ID NO: 80653 - DNA, 1032 bp, Homo sapiens
gccactataaattttgttctttaacaaaatgctctgtggggaaatgaaacttgtcagtgagccagcttctacctgtttatgacttctcataaccttagcacctcagaaacttagcagtattgctggctaacagaatttttaatccgtgttccaatacctactaacaatcatgtctttatagaaagggacttttttgatcttgaaatttatgaattcggggcattgtaatcatagaatttactagagtgcccaatgcattaggagctgtttttgtgatttccttccacctgtattttgtgtttgccatcttagcgctggtcagactacgtggagcgatacatgaattcagatactacctcgcctgagcttcgtgaacatctagcacagaaaccagtatttctccccaggtgagtgagccatgtcatctgtcagcagtccatactgtgcatgattgaggaatggagagttaaatgactttcacgttcttggccttcacatattttattcatttgttctatctgctggggatgctaattcaaggttttatatggctgtcacaacatgagcttacctggagcatgtgtcaaagcatctgggaggtgagagttgtagagaatcaacaataacctccgtactttggatgggaatgtgtgtcagagtctccatggttcgatggaagaggactcacaggactctgcatatagtcagactgatttagtacagcgagaagatgcaaagcagaatcagcaaagcgaaaaggtgcctgtggcaaagctggaggaagccaggctcaagcttcctagaatcctctcccagtggagtcacacaggacactcttaattcttccaacaatgaatgtgacaacacatgcaaaatgctgtctaccagggcagctcattagagactctgtgccaggatttttattgagatgtagtcatctaggcactgtatgcctagcatgtaccaaaatcccaaactctcagaaagaaagcacattttcagcataagctatagagtttgtacaaatagttt

SEQ ID NO: 80654 - DNA, 1034 bp, Homo sapiens
gaaataaaaaattctcaggtttccttccaggctctgaccttctccatgtgattctgatagttacctcctctattacgtcctagaagtgggattaccaatggacagagcattgacattttgtggttctggctacatgtgccatatttctttctgacaaaatatttgttttgtaaaacattcttactgacattgattattattttagcgaattctagaagtttgaaacatgaaatagtaccttttgctttaatatatttcattttacttgtagtaagtgtagacttttgcctttatcactggccacccaagatctagtatcttcctcatctcttcagttggagcaaagtttactaagtttattgcctctgcacctctcattccttgagaagatagattacagctacagagacggtcttttgtttacgcttaggtttcttatttgcagcttatgtttattcagagccaaggccaggtccagctgactattgagcttctggacacagaagaggagaattcggatgaccctgtggaagcagaggtatgagcaagtacatcacagaccccaggtgccaagcagagctggcgtgccttgagagtctgtccagtgaccctgtctgccaaaaggccaaggcacctcaggcctgtttaagggtcaggacctggatgcttaaagtacaagtcaatccagccatgtcttcagctgaagagacgggctgcctggttatagatgttaacctcatcttgcacttagtaaagctatctcctctaaggaagtcttatggttggcagctttcctgttttttcctaaagtataaaaaacaacaaatgaggtctttctcatgtcatcttgattctttgtgtcatgtttactttttattggactgataaagtccagagttttcaacccctgaatagacaggtgtgattatcatagttggttatggcagataatgtacacaggagatgcaggccatatgtatgatgttggggggggtcgtgtgggatgacttgttttggtgggaatgttggcttgt

SEQ ID NO: 80655 - DNA, 1070 bp, Homo sapiens
gatgtgtttggaaaagtattgggctaggagtcaggaaccttgacttttagtcccaaccctccttcttcagctgagcacccctgggcaataattcagcagctatttcttaaatacttaatgagtttcaggctttgtagttggcctgggaatatagacatagatactgcattcatgattctccaaggctcccttcctcaccccagctcacggtgagctttgcagtggtgcagtctcggctcactgcaacctccatctcccaggttcaagcgattctcctgccccagcctcccaagtagctgggattacaggctcctgccaccacgcccggctatttgtgtatttttagtagagatggggtttcgccatgttagccaggctggttttgaacacctgacctcaggtgattggcccacctcggcctcccaaagtgctgggattacaggcgtgagccacctttctgatgcattgtgtaaatttgtctcctaactggccccaactctctgtctagcttgccttcccagggcagttgtgaagatcaaatgagaaagaatatgtatgagagccaattgtaaatgattttaaaatgcaataaagatatgacctatagaaaattatttaaagatgcttagaattttaaatagtacgattatcctgagttctctatggttcttattttaaatagataggaaagttttaccatggaccactgatatggttgaaaatcctggcttgattattctccaagaaaatgatacagtggtttgtgtgattaattttctaaaattgccagcacccccccacccccccaaaaaaagaaaaacctttttggagttgaatgactacatcaaaggaacgttgactgtataatggagaaatgttttctgtgttcactaaaagcttgcctttgtttgcttccagctgcagcatatcgtgagtgatgagatctgtgtgcaggtgactgacctttacctggcagaaaataataatggggccaccggaggccagctgaacacacagaactcaaggagcctcctggagtcaacgtatcagcggaaagctgagcagctaat

SEQ ID NO: 80656 - DNA, 1239 bp, Homo sapiens
tggtggctcatgcctctaataccagcactttgggagtccaaggcgggcagatatattgagtccaggagttggagaccagcctgggcaacatggggaaacactatttgtattaaaaatacaaaaaattagctgggcatggtggcacatgcctgtagtcccagctactcaggaggctaaggtgggaggatcatctgaacccaggaagttgaggctgcagtgagccgtgattgcaccactgcattccagccaagtgaagccattacatttatcttacctattgtaggctggcttaagagggatttgtattaagaatacaataggcaacctcacagacatccaagtacagaactcaaaataggaccacaccatggaaggattgggctgggaggtgatttttctctcctgcatgccttcactctggacttctgctccatgcttgtgctttgctctgcagatgaacatacggcatgtgctccaggctcctccagcctctgaggctttggcttgccctcccagtacccctggtcccagtgttactagacctttccatacagatgctcctcctcaaaaaatctattgaacaccctctctgtcatctccaattagcaagatagagaatctgatctgcttagcagtgggggtgggagttccgtagctgtctctggatttgtagtgctgtcttttctgaagactcgaggaggggccagatatccaaaaagagagtatgggtggggaatcagtaatacagtctacttcaacaagaaagtataaagtagaggcggtggctcacgcctgtaatcccagcagtttgggaggccaaggcgggtggatcacttgagctcagaagtttgagatcagactgggcaacatggcaaaaccccgtctcttctgaaaatacaaaaaagttagctgggcgtggtggcacatgcctgtagacccagctacttaagaggctgaggtatgggagggttgcttgagcccaggaagttgaggctgcactgagccaagatcacgatgccactgcactccagcctgggcgacagagcgagactctgtctcaaaaagaaagtagaaagtggaagcatctgtatgtatgattgaagtcatgctttccatctgtttttttccaccttttcttttttctcctaaaacactgtatcttaatcttcctcatgatatcaggtactcataagcattattttaatggttgtatcagaatcctttatctggactcattgt

SEQ ID NO: 80657 - DNA, 1049 bp, Homo sapiens
acagatgatttaatgcaatttgtgaaatacaacgtagcgaatccatttttaaacaaaaggactttgacaaatgcagattacttcattattcataaaggatttaatttgcactcctatttttgtgttcccaagaggtttcccagtgctggagtatggctgtgtctgcctttcctcatctgtactttatgcttcattgaaatagctttatgagcaagtgacccatgtgaggaatgctcttgtgcaggctgggagagtaggttcctctctcagcaggggagccaacagctctttgaaggactggcttccctaggatattttcctctctgaaagtggcccagcagtaccataaagaagtatctttctagcatggtagtcagaatattagaagccactgttaaagttgcagagtcactctgatagtgctggtgattgtagtcacctgtcggaattcatctctgtttacattggaatgagtgagtatattttgaatacctagtgttcatactttcaaatgccatttaggccagctgtgggatttgccctgtactctatccctagtcttttcttagcaaggtaaggcctcaccaatcccatctctcccacagtggatgttgatgtagaagattattacccagctttcctggacatggtgcggagcctgctggatggcaacatagactcatcacagtatgaagattcactgagagagatgttcaccattcatgcctacattgcctttaccatggacaaactgatccagagcattgtcagacaggtgagggcatggaggaggctagggtgagtaagggaagaaatccttacctagagatgggccacgcaaggaaaaggaaaggcaactttttcatataacagtgtttatgaacgtagggttctgaagagaggaggggaggttaatgtgatgcctgatttctcatgttaacaaagttgcagtgtatgagcctgcctaccccatatcctttcttgctggccacctgtagagtgcagtggtcctgaccccagcttcctgcacaacttgtctatctcttacc

SEQ ID NO: 80658 - DNA, 1071 bp, Homo sapiens
agttactgtttagtaacacagcagctcaaaaattaagaggaatggatgaagtatacaacctcttctatgtcaacaacaactggtatatttttatgcgactgcaccagattctctgcctgaggctgctacggatttgttcccaagccgaacggcaaattgaagaagaaaaccgagagagagaatgggaacgggaagtgctgggcataaagcgagacaagagtgacagccctgccattcagctacgtctcaaagaacctagtgagtgccgagacctctgatttacagaggatgtgtgaggttgaggaccttagagccacctagacttgggactgcttcttttattaatagagcacaggcattagagtctgtgtagttaaactctctgaacctgtttatctgaaaaatggaggctctagttgcttgtggtgttgctttgtgcaaagtatcctatgcagggcttagatcatggacacttggtcagtggttggtactgtggacgcacctgggaagggggtatcacagttaatttctcaaatggcagatttctgggttactgccatctgtttcaaagtacagatagagactaaactgtcacagccaatttcaatccatgacagaacataaattcctagtgcttaaaacagaattttctcatatttttgagcaggacttctgtttaaccagtggggtttatggctcattcttaatatgtagaaatagtttatggaaaggagactggaactcaaaaggtgatatgagacatggagaacaggcaggacagggataaagatgtagaactcaggaaaaggaaagtaagtgagggttcaggacgctgtcatgtgctttatgtaattttgtgctgcctgcttccagttcacgtcataaattaggtacttgagctgtgagccaaaagctttttcatgaagcatttcttctgggctcttaaggaaatagccaacctgaggagtgtatcttcttcttctttttttttttttttatgtgttgctgatgtaggaagcccagatatggccctagctttctatctgttgaggagctaatgacactgaaaaa

SEQ ID NO: 80659 - DNA, 1248 bp, Homo sapiens
gtggaacaaggctattgaatatttaagtatttgaatatatttaaatatttcaagttaaaccaaaaaactctcaagacaaagcggtcttttgggattgttttgattgttattgtttgttcataatggatcttagcaattcaggaaagttcagggaaacgtttcagtaaagtcatctcctgtttggttcctctggtctaaaatcagtagtcctaagcaaagcacacggtggtggtggcggcagcagcgacggtggtggtaataactaccatttatccaacttcatcctgtggttcttatgtgccaggtattgtgctaaatactttatgtggattgtatcatttaatccagacacagggttgtgagagtaataggtgctgttatccctattttgctgataaagaaacagtcttatgtagctagtagggcagaaccaggattcaaatccaaggagtttgactccctaccttattcttctaaacactactctattctattttgatttgggtcctgagcatacccttctttgtcttcctcttcagcttgatgtagttttagagaccaatctggcaacaatccgggttctggaagcaatacagaagaagctttcccgcttgtctgctgaagaacaagccaaatttcgcttggacaacacccttgggggcacatcagaagtcatccatagaaaagcactccagaggatatatgctgataaagcagctgacatcattgatggtctgagaaagaatccctccattgctgttccaattgtccttaaaaggtacatgagcaaatgtgcccttagtgctttagtgtacttcactaccggttcagtgtctcattaaataaggctctcattttcaacctggttgtcccatgagacctctctttctccccaaccctggttgttggaattcaggtgcagaatggaacttcttttgggggtcctgtgtaaccaacattagagaacaaatcttgtaagttcatggtggaaggctctgtgtgtatgtttgggggagtattttaaaatacagaaaagaaaagaagataattaccacccatgttcctgccacactcaggactaactgttgttaacatctttgtggtttgtttgtttttgttttgttttgttttgagacaagatctcactctttcacccaggctggagtgcagtagtgtgaacacagctcactgcagcctcaacttcccaggctcaggtgatcctcccacctcagcctcccgaatagctgg

SEQ ID NO: 80660 - DNA, 1785 bp, Homo sapiens
tgttttaccatgttggccaggctggtccagaactcctgacctcaggtaatccacctgcctcggcctcccaaagtgctgggattacaggcatgagccactacaccgagtctggaatctttactatatttgacaacctaagaattatgtgaacattaaagcaatattcttgatcaaaagaatggcttgttattttgcctggtttcggtacaactctttgatcaccactttaactgatctgagagtattttattagaaaaaggggaaaccaaatgctcagaagcagttcttcttaggcaggaaataattcatccctggtagcagatttctgatccaaaaccagatggtagtagtcatacctcaggataactgcatcctgcccctaattgcttgtcactttttggtttgattcttcaggaaattccctgagttgtttaattggtttaaaaactttctgggctataaggagtctgtacatctggaaacttatccaaaggagcgagccacagagggcattgctatggagatagattatgcttcttgtaaacgattgggctccagctatcgagccttaccaaagagttaccagcagcccaagtgtacaggacggactcctctctgtaaagaggtaaggccttccctagcaaagatcagccctgggtcctcagctttttccagaagggagtggtggtaccaaggattgagaatttatatgaatgatgaaattaagaacccttttaatcctttttaaaaagaaaatgttttctacttttttgtttgtttttgagacagggtttcgttttgtcacccaggctgtagtgcagtgatgtgatcacggctcatagtgcctcaacctcctgggctcaaatgatcctcccaagtacctgggacttacacatgccttcacacccagctaaaaatataaaaataaaagtttttagttttgtaaagattgggtcactcctcctgggctcaggtgatcttcctgcttcgtcctcccaaagcactggaattatatttccgcttatattcagcacccttttcttactaatagctttttgtaaacttgctaaaggtgaaatttgtgaagtaatattagttgcctatttctctgctagagttttgtcttttcattcagaatgcttaatcaccagaaagcttttttaggcttttgtttcagtctctcttcttctacccaaaggttttaaatgatacctgggtttccttcccttcgtggtctgaggactctacctttgtgagttccaagaagactcaatatgaagaacatatttatcgttgtgaagatgaacgctttgaggtacaagcttgtttggcatttgaagttgggggaaatgggagatgctcagtgagactatcagtacctgtctctgagggttattaagatggaagagccaaaggctcacattcttctatggtaagtgcttgttgtggtactttccatgctttatgcattggtcaaatgtatatattagtacatgctttatggcaaatgtgacttatctaggccactttagcccttttaactgaaattgtccattgatgactaaataatagttcttttgattttgcatggcattttaagattattatgttttgcatggtgaagaaaatcagtatcctaaggtttatagtactttcttgaagctgtttttaaattatttaagatctgtgtgtattgttacccttagcaagtatcttgccatggttagcaaaccagctctgagaactggcatttttctttcatgtttctggtattgattgctttgt

SEQ ID NO: 80661 - DNA, 1033 bp, Homo sapiens
ccacccaagtagctggaattacaggcgtgtgccaccatgcctggctaatttttgtatttttagtagagacggggtttcagcatgttggccagtctgggctcgaagtcctggcctccagtgatccacccaccttggcctcccaaagtgctgggattataggcatgagccaccacgcccagccacaaatttccccagtttttaaaaactaatggcagggcagctgggcaatatatgacctcgtctctgcaaaaaatttagaaattagccaggcatggtggctcacacctgtagtcccagctacttgggaggctgaggatgggaggctgcagtgagctgagattacacaactgcgcctcctcctgggcgacagagcgaggcccttttcagttccccactttaagaaaaacaaaaactgtttttcttcccgttgtctccataaggtccgaaaggctcttcggagtgcagaagcctacgaaaatttcctacgctgtcttgttatttttaaccaggaggtgatctctcgtgctgagcttgtgcaactagtctctcctttcctggggtaagtgaagtgaggggcttagccctgatgcatgatatggagaccaggtaatgtttgatttgtgagagtatatgataggcaaagttaatttacttgagatacatcagttgactcaaatgttagtgccagaagagtcctgagaagtcttctagtccagctctagagatgagaaaatagagagggcattaagtatttatcgactaatggccaagactagtggtctcctgatcttctaaccagtgctggatgtttatcaagaaaaatctctcccagagttctggaatttttttaaaaattattattattattttttttttgagatgaagtctcactcttgttccccaggctggagtgtgatggcatgatcttggctcactgcaacctccgcctcctgggttcaggtgattctcctgcctcggccccccaagtagctgggattacaggtgcctgtcaccacacgcccggctaattttt

SEQ ID NO: 80662 - DNA, 1081 bp, Homo sapiens
ttgcagcttgttggttgtggtggtacaacttctaacctgagatactagctgtcgaatcacaagttttaccgtttttgttttgtgaaatttgcttatgtttcctatcttggcatcagtgcctgatccagagaagaatatactcaaatgtttgtggactgtatgaatgcatgtcggtcaaatgttatcaggattgtggggccattttaatacaaaataaaccttaaaattcattttttggctgcttccttttgaactctctattgagcacatatatgattggctacaggttagtacagtaaattggcccagtaatatatcttacagttcaatctttttaaattcttaaaaatttttttttttagtttttagtttcagagatgggagtctcactgtgttccccaggctggtctcaaactgctggcctcaagtgattctcccatcttggccttcgaaagtgttgggattacaggtgcgagccactatgcccagctcatgcctgtaatgttcttattacctttatctttttattcctgtttatgaatagctgaattgactcacatcatcaagtccattcttagtaaaacacatgctcctttttggggggaatctttataaagttcagggaaaactgtaactgtgaatgaattatcagtgttttcatattttctgctgagtatgtgtggtacgttttcagtgctttgaaattcatgaggcatccctggagaagtgaagcttgtgttcccagctaaccttgtatctctgaccacttgaatgttacttttcaaaatatgtgattgttgcagcaagtgttcaggtttcaatttttctaattttacgtttatataaaattaagttcaggaaataataaatggaggaactctgaagagatgttaaatcttcatttggttattgcaacctacttatgttgcttgcaggcacgaatgagaaataaaccctctaaggacatatccatatgcagcaaatagttgtttcttctgttttccctgatacttactttagttcttcttgatccctgccctcgttggtgtggattcttgggaacttgtttaatattggccta

SEQ ID NO: 80663 - DNA, 1014 bp, Homo sapiens
tcgggaggctgaggcaggagaatggcgtgaacccgggaggtggatcttgcagtgagccgagatggcaccactgcactcagcctgggcaacagagtgagactccgtctcaaaaaaaaaaagaagaagcacttgaatatttttgcagcatgtagatatgtaattaatattaggagtgatagcatttgaggagaaaactagagaataaagggaaacaaggttgtgtttatatttttaaattggagcgtatttttcaacttcataataccaaattaattaaaattatgttatttaaatatttgtctttttcagttataacttgttcactgtgttggggggtggtatgcccacatgcacttaaacttcatcactaagatgaaatagatgatcagttctgggagtcaagcttttactaaacttgggtgactggtcctaagtggcgtacatcatactggagtgagaattgacttgcatgctattgcttttggtttctgcaggttttgtagtgcatccctgagcatgagcacagaatgaagcggcgtttggatgaccaggagtcaccggtgtatgcagcccagcagcgtcggatccctggcagcacagaggcttttcctcaccagcaccgggtgcttgcccctgcccctcctgtgtatgaagcagtgtctgagaccatgcagtcagctacgggaattcagtactctgtaacacccagctaccaggtaagctggagccaaccaagggactagaatgagggaagagaaatagtggttttaggcaattataaaactttttttaatactgtgttagatattaaaaattgttgagtatgtgtaaggtaaaaaaaaaaataactgtgtactcaccatacaagtttttaaaaaaagaatgttgtcatgacctttgaagttccctgcgtatcccactctgctcccttcttttccctcccttcagaggtagccactgatctaaactttgtatttatcattcccttgactttatttacttaaaaaaactaac

SEQ ID NO: 80664 - DNA, 1071 bp, Homo sapiens
aggtgggtcctaccttctctgctaaggaagttgcaaaagcaatagcattttagtttagcaaatgatggctgtaatagaattggtggggagacaaaaaatccaggtggttttttctgatgccataaactgagagagatagtggagaacgattgaccattgaggaaaatttgggctacatatatagttcccatgatttgcagtgctgtatactggggaacacagaagagtctataaggattcaagtaagaacctggttttgctgtattaggaacattttcataaatgcttcataatctccagataattattttatatactataattttgttcagagataaatagcttagaaagattggcacttcgtaattaagagggttttaataatttacatacagagaaagactttttttcttttttaaggaaggaggtgtgtagtaatttgacaagattcctggtgaagtataattctttttacatcttcagtgggagcagacaagacactggagagctgtgcatggcagatgttagtacctgggaattttaactggaattaagaggttatatccctggcattcagtagtttagcatagtgcttttcatggctttctctcttttctgggcaatccaccagccaagagtttgttaagctttactttctgtaggcctttaaaaaaataaatagtatatgctttttcaaaatacaccttcctcgccccttgaaaaataaaagctgatatttattgagcacttactgtgtcacagatactgtgttaggcactagacttttttttttttttgagatggagtcctgctctgtctcccaggctggagtgcagtggtgcaatctcagctcactgcaacttccgcctcccgggttctagcgattgtcctgcctcagcctccacgaagaagaagctggggcgccaccacacgcctggctaagttttgtacttttggtagaggcagggtttcaccatgttgatcaggttggtcgcagactcctgacctcgtgatccgcccgcctcagcctcccaaagtactgggattacaggcatgatccactgcacccgg

SEQ ID NO: 80665 - DNA, 1041 bp, Homo sapiens
tacttttcacccagtgattcaattgactgagctactgcctattttccagtctccagactccagttggggtgacccactgcccttccaaaatcagtagttcttcccacctaccctgtctcctcagtggtaagcttcccccacctggatcctatgtgaggtccttagagtctatctttttttcttttttctttttcttttttttttttttgagacggagtctgtctctgacgcccaggctggagtgcagtggcgtgatcttggctcactgcaagctccgcctcccaagttcacgctattctcctgcctcagcctcccaagtagctgggactacaggcgcccaccaccacgcctggctaattttttgtattttttagtagagacagggtttcactgtgttagccaggatggtcttgatctcctaaccttgtgatccgcccaccttggcctcccaaagtgctgggattacaggtgtgagccaccacgtccagccgagtctatctttctattccaatttccaaccccatttcacagggaaactgaggctcagagggaggaagagacttgcctaagactataacaccagttgctgaccatgctaagtgcagaactcagattacctaactagtagcctcaagctctatcaactcttcacacagcaggccacaggctacttctttccctctactacccacactgaatcactcacctactccccttgagtctttctcaaatacaggctctccttcaatattcttctcaccggctgggcgcggtggctcacgcctataatctcagcactttgggaggcagaggcgggtggatcacaaggtcaggagttggagaccaacctggccaacatagtgaaaccccatctgtactaaaaatacaaaaattagccgggtgtggtggcacacgcctgtagcctgtagtcccagctactcgggaggctgaggcgggagaatcgcttgaacctgggaggcggaggttgcagtcagccgagaccatgctattgcactccagcctgggtgagagagtgagact

SEQ ID NO: 80666 - DNA, 1086 bp, Homo sapiens
acacgtgtgcacgcaaggcagcctttccctttggctagataaatgtggtgaaattgccactagaaagggccagtagcaatgtgttcttaattcctagcatctgctatcaaactgtgccttattaaaaccaaattgtggctattgatttttgctagggtccccgaggtaagtggggaaggaacctccctcctcctttctcccgccattctttttctgaggtctcctgtctcccactccttccctttcctaggattttatggggaggtttgatgagcatttgcctttctccccagagagcttgaccaagttacatattctagagatcgtcctgagtgccaagcacgtttataagtagggcgtgtattccagtcctttctgtcattctgtgtgtgtgtgtgtgtgcacttatgtgtatgggtccatatgtacgtgtgtatataatatatattgtatgtgataatatgatcgtattctataaatacatatacacacgatactcctttccagaagttcctggggctccgtgttgcagttcaggactccttgcttcttggaccctactatttatcctggactagcttgggttggtgatcatgtctcctcttgtcaggctacagagtggtggaagaggacacacacacatctcctccatgttcctgccacagggccccttccttaagtaatgacttatctccttccagttgccacctgttggagccaagaatgtattagtttgtggtgacactgggttagctcagcatggatttcccttatccgatgatttttctacatttacttggccaatttggggaacagacctccactgtgattccatactctctctttgctttcactatcccagggatgggaggcggagggtagagatgaactcactgagcagccagagccaaatgcaatcggtacgaatcttagaaggaaggagggggagcccaggtatgagaaagaaaaaaccactaagaaaatacctccctgggaggatgagctggggccctttttcttttgctggatggttcctttatgcagcttggccctgtctaccgagatgcccatctcttcctgcctgct

SEQ ID NO: 80667 - DNA, 1043 bp, Homo sapiens
agctgagatggcaccactgcactccagcctggatgacaaagtgagactctgtctcaaaaaagaaaaaaaaaaaaaaaaaaggcctaggccaggcgcagtgactcatgcctgtaattccagcactttaggaggccaaggtggcggatcacctgaggtcaggagttcgagactagcctggccaacacggtgaaaccccatctctactaaaaatacaaaaattagccaggcatggtggtgggcacctgtaatcccagctacttgggaggctgaggcagaatagcttcaacctgggaggcggaggttgcagtgagctgagatcgcaccacttaaggttgcagtgagctgagatcgcaccacttaactccagcctgcacaatagagtgagactcttgtctcaaaaaaaaaaggcctaaatctaccttgccaccctccagtggccccaaagtattccaaggtagaacttctcccactacctcctctccaaataagtggtggttataacagtgctaaggaagggaatttaacattcacattcatttttttccttcctcatctgaaataggttattccttaaatttgccagatttgtagaccaaaatttcaaaaatattcctttcattaaaatcttccggccaggcgcggtggctcacgcctgtaatcccagcactttgggaggccgaggcaggcggatcacgaggtcaggagatcgagcccatcctggctaacacggtgaaaccccttctctactaaaaatacaaaaaattagccgggcgaggtggcgggcgcctgaagtcccagctactcgggaggctgaggcaggagaatggcgtgaaccccggtgggggcagagcctgtagtgagctgagattgcgccactgcactccagcctgggcgacagtgagactccgtctcaaaaataaaataaaataaaataaaataaaataaaaataaaataaaatcttcctggccaggcgcagtggcccacgcttgtaatcccagcactttgggaggctgaggcaacagatcacgaggtcaggagttca

SEQ ID NO: 80668 - DNA, 1049 bp, Homo sapiens
atatattaactagcttgacttagtgtctctgcaatccatacatattttaaaatattatattgtataccataaatatatacaatttctatcaattaaaatttaaaaacaactaaatgtcagaaaacagaatggaaaaatagccccataggtggaaattccatgagagtgttaagtccccaaagctaagtaaataatttttttttttttgctttcggcccgcaaagtaaataatgtcaaaaaaactaaaaactaaaatcaaaataaaataaaaaaaaagcctaaatactccatttactataaaaataaagcctccgctaatgtttcagtaaggagagggactacaaatcagacaatgatcttcatattaaccacaggatgattagaagaatctcccagtacactaagattcactcattcacaaatatgtcctgagtgtctgatatgtggcaggcactgttctaggtactggagacagggaagtcaacaaaatggataaatacaggtatctctgactccagagccccaactcaaccactgtactccactccttcagggcatatacgatgatgatctcagcagtactgatgaatttaccctccagccagccagtctcttagctcaaatgctcctgcaggaaaatcttctccaagggtcctggataggactgtgaattcagtttatgtgcttgaaacaacagggacaagagagttggaaaccatgatcctggggtcccaacccacatgtcatatatgcccaaatacaaggcagtaagttttccaaaaattattccccagaaagagaagggatataacaagtccttataatgtgtgtcatgttaaagaggtactatttaaattactttactgtgtgtcatgttaaagaggcactatttaaattactttactttgccggcgcagtggctcatgcctgtaatcccagcactttgggaggctgaggcaggcggatcaccccaggtcaggagttcaagaccagcctgaccaaaatgatgaaaccccgtatctactaaaaatacaaaaattagccgggca

SEQ ID NO: 80669 - DNA, 1039 bp, Homo sapiens
cagccttctgagtagttgggattacaggtgtctgccaccgtgcctggctaattttgtatttttagtagtgatgggttttaccatgttggccaggctggtcttgaactcccaacctctggtgatccacccacctcggcctcccataatgctgggattataggcatgagccaccgcacctggtcgagaaatgtttaatgttcagtttattcatgatctcatttttccttcaagttttaataacataacttttttaagaggcatatatgtatgctgatgtgtggtatgtgtaggatatctgttgagatgagaagtcagaatagtttttgatccataaagcttacggtagacaagaacttaacattgttatttttaaaggtaaatcagcttctaatttcttcagtttgtttaaccacttttcctctagctgctgagatcaaacctgaattaggctgtagactccccctgctgggtaagaatggggagaagagcagaaaacctaaacttgggcttgaagagtcacaggttccattacacttaaatcctcatgtgttttctccacagggagcatttccagctcgtttgaagaaggtgctgattgtgggggcacccatatggttccgagtgccctattccatcatcagtctcctcctgaaggacaaagtccgggagagggtaaggcaagcttgcccttttttatctggaggtgaatagatacagtgaattcctgccaattaattttctaccttcaaaaaatcctcctggcgtgtcttctagagcctgttctgcttctgttagtgcattcacttatattctctacctgatgcattagtcagttcaatacagactgcctctcttactgtcctacgagcttcttgaagttcaaaactaaacacagtttatctggttctcactttctatagcaccttgcataagatagtactgaaggaacgtgtcctggaggtaacttagggatagctgctacttccaaaatttatcctagtgctgcataggcctttaatatttaacagcttgtaatata

SEQ ID NO: 80670 - DNA, 1091 bp, Homo sapiens
ggtgggaattgaacagtgagaacacatggacacaggaaggggaacattacacaccggggactgtcgtggggtggggggaggggggagggatagcattaggagatatacctaatgctaaatgacgagttaatgggtgcagcacatcaacatggcacatgtatacatatgtaacaaacctgcacattgtgcacatgtacccgaaaacttaaaagtataattaaaaaaaaaaagccaaaaaaaaaatgaagggattgaattgccttctttaatatgtgactaatgctgtcttatgtgtacaaaggaaccatgagccaaaggagacagaaatagcatttgaaaaggaatagaacattttctgctcatcaggtattggagacaaactattcctgatctggggctgtcacacttggctggtggagtgctgataaaccttagcccttcacttctgctggtaggaagtcattaacactgaggagcttttcgtgtttaacagttcagttaactctggcccctcagtgttgcctgaagctttggactcagatgggaaacttcacttggtcaaccctggtttcctgttgatccgttcccagtgggatattaatcctttaatagcagttagctttttttcttcttgggttcttgcataatgcttgatgtggtagatggaagagtcccatggtttcagaaccatcctatttggtttcattaggcagatgggtgttaggcctttcttcatggttatttggccttaccctttctgatgagatttgtagggctttgagtttgaagtgcacatagtcccttaacggatgaacaagaaagactttctatcttgcaacatgtggatatcagaataaagagacctgataatatgggttatcttttaaaggaagaaaatgtttgtaaactcattgtgaaagattctgtgccacatgtagttttaagcagttggttctgagttcccaatatacatttatccagattgctgggagtagacctattaatgatttatattttattttattttattttattttatttttgagatggcatcttgctctgtcaccaggctggagtgcagtggcaccatc

SEQ ID NO: 80671 - DNA, 1012 bp, Homo sapiens
ttagacattgccagagataaaatgcaaatgtagttcattcactccttcagcaaacatttgtgcctaccaggagataagcttgtcctaggcccctgccaagtagaggggttatggaggtggacagtacttagtccctgcccttgaggagctcacactcctgtgagaaaagaagcccaccaggacagtttgggagaagaggctggagagagatagcaggttttagattttgtgtcatggatgaaaggagctaagaaagaactttgagcaggcaaggtctcttgagatttgtgaactggaggtctttggcagctgtgagaatggaagattgtgttggaaactgactaattagtttctgctttgtattcaggaaatggatcccacttcctgtggcttcagtcagctcccatattgcttcccatctttctaggactctgtcatggatacaagtacttcaccattccctccagcagcactagtgtcctgtggacagattttcacagggatccaggtcagctcttgtctgacatgcagtggtccctgcatgttgattagttctgggaacagatttgggcagaggtagtagttatttggagcctgattatacaacttcagtacatccagtggaactagtcttagtgtcggctcttagagagttgctcaagctgaccttgtaaaattggaagactccccgctcccaccctcatccattgatgatcctgctggctgcagattcaagcatttgcctacatcaataagctctttcctgaatttaggtcaattctgtaataggaacattgtgttcctcttgccaaggagcatgttttaagtgcctaaacatttagtctctgtttgataattttctgagtgctctagtctgtgctatcagcagccaaccatatcagttcagaagctatgcatgctagtgtcaatagtgacttggccatactctgttcagaaataatcaggtctggaaggactacttccccaaagggcgcacacaggcactacaggc

SEQ ID NO: 80672 - DNA, 1068 bp, Homo sapiens
ggattacaggtgtgagccactatgcctggcctgacagagattttcaattgcttgggccagtatcatttataacgtactaattccttgttctaatttctatttcagtttaaatttgtggggctaaagaacttcccttgcactcccgaaagcctgtgtgatgtgctatctatggatttcccttttgaggtaacgaaaccattgtctttattgccttgacatgatgataggctgcagagagacttagttacacaaagtcttaaaatattccttgattgtgctgtgtcaaagcatcagaatgggacaaagctgattctggagaaaggatgtacttgctgcccttcagagcctgagctccacccatgctggataagtcagaatgctggcactggaagggcccttaatggacagctcgtccaactccctcatcttacagatggagaaactgaggtccggagaaactgaggcccagataggagcaagacttgcatgcctagatccttcttgtgtgcctcttcctactgcaagctgagacccaggtccctggtttggctgtcgtggctgcttgtaaagtgaaggtgcttctgtgactgaatgactccaacaaatgtccaaatccctaatcctttcctcaccaaagaagatggcccttggggacagcagcacttgctgagcaggagcatgagtcaggtgaccacctcattccagtttgctcaggactcgccctgttttagcactgaaagtctcacagcggctgggcatggtggctcacgcctataatcccagcacttgggaaggccgaggccggtggatcacttgaggtcaggagttcaagaccagcctggccaacatggcaaaacctcgtttctactaaaaatacaaaaattagctgggcgtattggcagatgcctgtaatcccagctactcgggaggctgaggcaggagaatcacttgaacttgggaggcagaggttgcagtgagccgagattgagccactgcactccagcctgggcaacagcacaagactctgtctcaaaaaaaaaaaacaaaaaacaaacctcacagccccag

SEQ ID NO: 80673 - DNA, 1095 bp, Homo sapiens
tacatgtattcacaacctacaaatttggtaactaaaaccaaatatatttttataacgtaaacaaaagactgtatgtatctttttaaatttccaaaagcaaaataatttaaaagaatgaagaggcccggtgggcgcagtggctcacacctgtaatcccagcactttgggaggctcgaggtggagagatcaagaggtcaggagatggagaccactctggccaacatggtgaaaccctgtctctaccaaaaatacaaaaattagcctggtgtggcagtgggcgcctgtagtcccagctacttgggaggcaggagaatcgcttgaacttgggaggcggaggttacagtgagccgagactgtaccattgcactccagcctgggtgacagagcaacactccatctcaaaaaaaaaaaaaaaaaaatagcatggggtgtttttgtttatattagagtttgaaatggaaagtatttcatctttctgtttcccttctctgtggcagactgatttccgattctactggatgcattcaaagttaccagaagaagaaggactgggagagaaaaccaagcttaatcctgtaaggcctggtgttaggatcactgagttccttatggggagtagtgtggattggtctgttatctaaatataatcattatgtatgaaatgatcttttttgaggcagcatggtataaagggaagagtatcaatcatgtagatctgaattccatttttggcttttattattactaatttaacatcctatgttctcactcataattgggagctaagctatgaggatataaaggcataagaatgacacaatggactttgggaactctggggaagggtaagggggatgagggataattgggtgcagtgtacgctgcttgggtggtgggtgcaccaaatctcagaaatcaccacaaaagaacttattcatgtaaccaaacactacctcttccccaaaaacctattgaagtaataataactaaaaaaagactaaaaaaaatttattactaagttaagttaataatctcacttacccttagattttccatctgaaaaatagggtaataacatctaatttacagggttgt

SEQ ID NO: 80674 - DNA, 1047 bp, Homo sapiens
attttgagggggcggtcactgttttagccttgcaaaggagattccatcatttcttacttccaccagaatccccaagttgctcccaaatttggagcttttgaattaaatgtgtcgcattatagggcatcttcctaaaagacataaagacctgccctggccagatgcggtggttcatgcctaataatcccagcactttgggaggctgaggcaggcagatcacttgaggccaggagtttgagaccagcctgggcaacatggtgaaaccccatctctacaaaaaatacaaaaattagccaggggtggtggtgtgtgcctgtagtcccacctactgtggaagctgaggtgggaagatcacttgagcccaggaggttgaggctgcagtgagctgagattgcaccattccagcctgggcaacagagcgagaccctgtctaaaaaaaaaaaaagaagaaaagatatgtccttatgccttttttttccttccagcaagcggctggattatgtgaaccatgccagaagactggctgaagatgactggacagggatggagagtgaggaagaaaataagaaagatgatgaagaaatggacattgacactgtcaagaagttaccaaaacactatgctaatcaagtaagtggtccagagaagatgagacccagctaatctcactccctttactatgcagtcaaagcccactgaaataaatgctgtcataaagagaggagaatgaggcaggaaaaaggaataggaactgcaaagaacatgccagtgtacgtagatcatatgggatgataagtagagatggcttactgtgctatggactgactaggaatcactgatggaatctgtgggtagtggggtttgggaactattagcctgtgctgttaccaaaggctgccagcccactgcagaaagcccctgagctattgatatagtaacacactccatatccttgtcattttttttagttgtcactgcacagctgttctggattgggcctgcccagcctaccactgactccttccacttccctgggtggtagagtct

SEQ ID NO: 80675 - DNA, 1044 bp, Homo sapiens
ggctcacacctataatgccagcactttgagaggctgaggagggaagattgcttgagcccaagagttcaagactagcctaggcaacatagggagatcccgtctgtaccaataaattttaaaattggctgggtgtggtggtgtatacctgtagtctcagttactggggaagctgaggtgggaggattgcttgggtccagtagattgaggcaacagtgagctgtgattgcaccactacactccgacctgggtgatagagagagaccctgtctcaaaaaaaaaaaaaaaaggaaatatctgtaggaaaataatgttattgctaatatatgactcatttaccctttaacttccttttgtctcatggaaacacttgtgattttgcattaagttaattttttttcaggaatgtggccatcatatcataactgcataactgtctgtatacaggagatgatatgaaatgaatgaaccattttcttacgttttcctttgtagggaagatggaagagttgagtcaggccctggctagtagcttttctgtgtctcaagatctgaacagcacagctgccccacacccccgcctatcccagtacaagtccaagtacagttccttggagcagagtgagcgccgccggaggttactggaactgcagaaatcgtaaggaagctttaactccttgtcttctttctctgggctaggagctatgaaccattccgaaggctctaggcttgtctctacagactctcccttcaaagtagactctttgtaggctgatcttcttgcccacaggttgggaggggtaaatcctggcagaggtaggtttcttttatacccagagcttaggagaagatgaggaattagggagacaccgaagtttgaaaccaaaagctcaattatttggttaagtttttctttttttcctggcagctgtactgagctctgtggtttaggaacttgcgaaagccacgcccagactttcactccccacatttcctgggatgcttgtgtttggcttctgcactctgaatgctggtattggtgtggtc

SEQ ID NO: 80676 - DNA, 1112 bp, Homo sapiens
ggcaggtcactcgctgctgactctattcttctctgggctcctgggacgtataaatatgactctatgtaagaaaaccagaggctgggcgcagtttgctcatgcctgtaatcccagcactttgggaggccgaggcgggcggatcacgagttcaggagttccagaccagcctggccaacatggtgaaaccctgactctactaaaaccacaaaaattagccgggcgcggtggcgggcgcctatactcctagctactcgggaggctgaggcaggaaaattgcttgaacccgggaggcggaggttgcagtgagccgagatcgcgccactgcactccagcctgggtgacagagcaagactccgtctctagagaaaaaaagaaaaccagacagattaaaaagttgcacttacaaagcagttggggcatttattgacatttaaacaagggaggagatcctgaacactagtctcgctcagtttataaaaacttgaggccaaactctccatcatctgtacacagcttaaccacggccaggagcaagaattcgagttaaacgaattgaaccagtccaaccacaagacgataaagggaaacagggcgtggggatttccagtttttccttttacattacaaagtttccaacacaagaagccaacaataccccagtgctgcaccaagttacttcccactgtttcccaaggcacagtcaattaataatcagtagtccaagttctaagaacattccctggaaaacaaggacgcacctcccgtggctctatgcatggcctgccactgatgaatcaaattcttaagaacctacgaccgtctgatacccttgaggagagcaccctcatagaatctccagcatcaggcctcagttttcccatctgtaaaagacagccatgcaaagtgggagatccgctaggcttccagatcgaagtcatcgcgctcctcattgtactctagcacgtgccgcttgatcttggacgagtccacccaagtgacaaagtcctccatgctgcgcgtgacaaggaaggcggggtcggtaaccacgtcagggcccacgcgtacgtgcccttgctccacaaaggccacggcagcctgaaggtgctgcgcca

SEQ ID NO: 80677 - DNA, 1059 bp, Homo sapiens
gctccggctgcgcagccggggtcgaagagttggcggcctgttgtgtaagcctcagtccttgttttcccggcctggctcgttgtgaagccggacacatccacccttggactcgattcaggcggctgctgcttttctccttgcccctcttggattttccggatttttgaaaacccagtggcccaggagcaagaggaggaaggaggaaggggcagatctgcagaggaatgtgagagcctcccaaagcgagagccgccaaaagaatctgggagccagagggacagccgagccctgcccgggtttctggaatggtggtttcagagtgagtctcttctattttagaacgttgttccagtggaaagtgtcgaatttttcccctcgcagggcagatttctccaggtcacttgacttttcttctgggagtaggagttaggagagattcccctctaaccccccagaggctgctaagggaggaggagactgtggacatgagccctccctgctcacaagcatatgcccggagacctgatagggcagtttctgggccatggacattgctttgaagagggggagactggacagcatctgtgggtgctgagaccccaccttaggacctgagagattgaactgtgtaagcgccattcagctgcgagtgcattcttggactgccttgtgagcatccccggtctgggcaggaccctctccttcccatctttctataccacccagcccagccatggcactgaaaggccgagccctctatgactttcacagtgagaacaaggaggaaatcagcatccagcaggatgaggacctggtcatctttagcgagacctcactggatggctggctgcagggccagaacagccgtggggagacagggctctttcctgcctcttatgtggagatcgtccgttctggcatcagcaccaaccatgctgactactccagcagccctgcaggctctcccggagcccaggtgagcttgtacaacagccccagtgtggccagcccagctaggagtggtgggggcagtggcttcctctcaaaccagggtagctt

SEQ ID NO: 80678 - DNA, 3323 bp, Homo sapiens
tggcttgggggcttctggcccatctcggtccccgtctcctagccccgaggggggagtccgcggcggcccaagcccttgtggggtccatggccgccctcagccggcctgctcccgggaccggggcggggcggggcggggcggcgcagctccggctgttgtttgagcccaggccggcaaggggaacggcccttaagttttaacgcctcatttttcagtcggattttccttcttcccgcttgttcagccaattgtttttaagtttgcgtttaaggagaaactgacaatgagaatggactcgttgacggaggaaaagttggaatgcagactctggtgctgtttgagcgacccctctcccccgggcctggctgcgcgctgctgtgttctggaaaggagcatagtaccgtcgttgcggcaggtggtgttgagtgtgtattcgtgtggcccctcccttgtgtgtaagcctcgaaaatggataggtgaaaggagatacgcgccagggctgctccccggaaagatcacgtatgtcacaaagccgaaaagacacttttaaaaactcactcattaagcggaaatctcattagaaacccaaggcttggtaaaggaattgaagtattaagtttctccataaaagtgtatcgtgaagctattcgtcgtgaaattgatgtaggatattggtccaaactgcagaatattctcttggttataataggcgtcaaggtggtggcttcgggctccttttcaaacatggctaaaaccaagtcttgtttttaactccctttggttgagtcagtgggtactcaagtgcctgcagggtggctggcgtttgcaaaaaccttgatgttataattgaccttaaaatggttaccagactatctgggcagaaggtgtgttaatttcaaaaaaaaaaagacaagtgctgtactgaggagataattcatttattgaatgaatacgtctgagtgttctgggcactagtgttgcagaattgagtgaagtcgtcctcgctctcagaactcagtcttcttgggggaagagttcaataaggtgacagctcctgtggtatcatcaggaaagccaaagcaactaattttgacttgggggaggtgcgcttcagggaaggctttgatgagaggctgagacagttagagatgagcttccacaggtgactacaattttggaaggctggcggaagggcattttagactgaggaaactccacccaaagaagacacggagatttgagaaagtgtggtttccttagaagtagaaaatttatgctaagacttgagaagcccacgatacaggctggagaaggggaggattttccaagagtggaaaacagaaagtgtagtagttgtcatgaagcaggtgttttaaggagacgggcctgaatggcttcgagggtgattactctggtagaagttggggcatggccacgaaaaggtagggctggtttgaatgataggagactgaatttgtaggctgtggggagctactaagtttactcaggtaagttgggagaatgtatctttcatccaggattagaaatggttctctacagtgggtggcattaggaaatgtggttatcccagtgggggtggggtggtcttattgctgtgccggcatttagtgctaggagtacagggataccaaatgttttgcaacgttcaggcagtctgccacagcaaagaattatcccacctaaagtgccactggtgccccatcgagaaccatattgaaggctggtaagagtctgctgcagataaaaataaggagtgatgacctggattaggcagtggcaacagaaatggagcaagaagtgaatgagacactttcagtacaaggaggatttagtgaggactagtgtaatggcacccaccgctaggtagaaactattaaaattgacttgctagtgaaatatgacagactatcaggagataattatcatggcagctgctcagtacaaatgtctgctaactttttattatggaaaatcatcaaatgtacaaaagttgaacagtgtaatgtagccagcctcaacaatgataaacttttggctaatcttcatctgtactccactttagattattttgaagcagattccagacagatcacttcatctgtaaatatttctgcttgtatcttttgaaggtaaaagactcttttattttttattattattttttgagacggagtctcgctgtgtcgtcccagctggagtgcagtggtgtgacctgggcccactgcaacctccgcctcccaggttcaagcaattctgctgccaccgcctcccgagtagctgggattacaggtttccgccgccacacccggctaatttttgtgtttttagtagagacggggtttcaccatgttggccaggctggtcttgaactccacctcaagctcccaaagtgctgggattacaggagtgagccaccgttcctggccgtaaagactcttttaaacatggatgactgttttgataaaatgacatggcttgttcatgtcgataccatttgcttagaagggaaagatcaagggaaaaatggggttggatttcaaatgatttggtttgatcgatgatttgttattctctaaagttgtaactctggaaaaggtaatgagtttgacttattctttaacttttcctctttagacagttcaaatatttgaattctacatgctaggacttgttttctttatacttaccaagaaacatccttatgcagtttctctaatgtttgagaaactaagttgttttttacacacgtgcatgctagttcctgaagagtcctgtacaggtgctctgctggcttttcctttcaggtttctgtatcagctgtatttctccctgtagaatgtgcccctgacctccaccccttaaccttaccccatttgtctttatatgcctgaccatccgtcaaggctcttctgggtcatatttagttcatgctgttatttccccttcctcccttctttagtccttactatttttgctttggtcatgttttcttatgctgtattctgtaagcctttaaatttttctttttatggtggcaggggagaatattttataattatgctttgtgctttttatcttccactcaataaatgcttcataaatatttgagtatatagcgctattctagctgtattgtatttgaacaaaaatcttaactgccttgtaagttaactgctaagaatttgtcaaaagtgcagagataacatcaataacttgtcatggatagtacaaaaaggtctctaagggcttgatggaagtctgtaaattgacttcatatgagagtgtaagaagtgaaaaagacc

SEQ ID NO: 80679 - DNA, 1050 bp, Homo sapiens
accttttgttgcccttcctttttaagcctttcctgtgcatagtgaagaataccatgactactagtagtttggtgttaccgcctttatttgtgctaaagtgccagcgtttttacccaccattgtatctgcacccttacagcatatgtcaacatgttagtattcttgtaaaaatagtttggacctgggggtctgaggtccccactttgggaaccattgaaataggtacttagatctacagtgtatcatatcttttcatctacaagattaaaaacatgatttcagttaattgtttttgtaattttcttaatatggttttgaggggtttcagtccagagtgaagacatgtatgtttcttggcttatgctgaagtttactagacaaatactaacctaataatgagatcctaagtgtagttgcagtttctttagcctaagggaaaagaaacctaaaaactaaaacagtaaaaatggtccagatggtgtattcccaatgtgtgctgaagaatttgaagaagaaaatgcagtactcaataagtggtgttaagaacaggattaattctggagagtttctcatttagcctgtaaagagatttggggcacagtaagagttagaggaatgaaaatagtaaataacccattattgaccaggtatactattaatgatgtcctccatcaatacaacttattcttaaaagaacatttggtaaaatgctttaaaaatattcagtttctgtggcttcagctataaatcagattatagttctcaaagcagtgtttcctaaaatcgtttctgtgaaattgttttccatgacttgaacctagttgttctgaagctaatatacgataataatggcttttccccaatttataatagaaaatcatacaaagtaacagagtaaatgtctgttagtgggtgaaagcacataatgcttagttcattagctttttaaagaaatcacatgtaattgtgttttaaaaaagatatgggcctggcttagtggctcacgcctgtaatcccagcactttgggaggctgaggtgggctgatcacg

SEQ ID NO: 80680 - DNA, 1553 bp, Homo sapiens
tggaaagagcaggagaaggatgggcaaggcagacatcatagtctctttgtagcctaatctcagaagtgatgttattacttttgctgtattctctttgttagaagtgagtcactaggtccaggggcgggaattttacaagggtgtgaatgccaggaggtgatggtgatcggggccattttagaggctgcctaccagtgttgaagaaaatcattgacttctatgagctgtagcaacagacagtgctatgcaaggagaatggttgtctcaaaagtccagctcctcacaaggtttttaatatgttgccttttccccccatacattttgtttaaatccatggtcatcttgccgtttagtggtgtggtttaattgcatatttgggttagtctgtatgtaaatgtttaacatgtgtctctgtgttaaacaggaatcctatccatcttcttcaccgatatggtttgtggattctgaagacccaaatctgacatcagttctggaacgtctagaagatactaagaacaacaatttggtaagaaaataagccaagctattttctcttttcctcatgaacattacatatagaaattaaatgttaagagataatatgatataaaagcatgattaatgattataatcttgtaggaattaaagactagtttgtttgttttttttccttcaaattctatttactacctggtctctcttttatttcccacatgtataaccttaatttagattacaaattagggatctctttttccctgaattctaaccattaagccaaacaagcattttgggtagagaccactagccaaggtgggaagcagaaaaaagaccaaggtaggagtgaagggagagatggggagaatgacaccagaactagtatgagggaattgccttttctttcaagggtctgtaagtctgcagtaaaagaatagaaagttttatttttgtttttagtatataaagaaatataactttccatgttgaaaaagtttttaatgctttttttcttgattataaaactcatgagcaagcattattgagaaaattagtaaaatatagacaggaaaaaaaattaaaatctcccataatttctctacctaatataaccactgttgacatgatggttattttctaccagtatatatttttcctttgctagtaaaatacatatacctttatacatgtgtttaaatagttgaggtcatggtctatatagttttacatcattttaaaaaacatttactggccaggtgtggtggctcacgcctgtaatctcagcactttaggaagctgaggcgggcggatcacttgaggccaggagttcgagatcagcctggccaacatggtgaaaccctgtctctgctaaacatataaaaattaactgggcatggtggcgcatgcttgtaatcccagctacttgggaggctgaggcaggagaattgcttgaatctgggagacagaggttgtggtgagccgagatcacgctattatactccagcctgggtaacagagtgatactccatctcaaaaaaaaaaaaaaattactgtat

SEQ ID NO: 80681 - DNA, 1899 bp, Homo sapiens
tgcagttttcctagtgaattattgttattttttatacagacacttaagagcctactaaatatcaagtgttacaggtttcatttaatctttaccattctgggaaagttttcatttctttgttttacagatgggtagactcatactcagggaattagataggatatccaaggtcatctagattgccaggctctgtctactagatatttgcttctgtatttttaaatgaatatgactggaatatataattttgtaatccatctgtaacaacactgcctgtgtgtgtctgggttattttttctgttattttttgtttttatttttttggtagcctcattaatgcattaatgttctcttgtctgaagttgtaagtttctcagaaaacgggttagcagtgagaaattggacaatgtctggaacttccttcctctgcccttattgttgtcattctgctaggtatcagttgtagtgattataccccaagccatagtaactttcttacactagagggtcctgaaaatattttaaagactattttttaaatctgtaagctgcagttgagcagtaacaaactttttcatttcctactggattgattacagtagtcataacattattgatgtcttctaagggctctttaacataatgcttatttactgaaatgtgttttgtagcttcgtcagcaattgaagtggttgatatgtgaactctgcagtttatataaccttcctaagcacctggatgttgagatgctagatcaaccactacccacgggtcaggtaaagtaaaaattctctagtgttcaagagctaaataaattgtctcaagcaaaagtcaaactaggatgatttttctttttattgttcaacttatttagaagttagtttcatttttgttcctattgaattgttttgtttgttctgttttaggtactaaaaataaacttttcattctttggagctgctggtatttactatacaggcaaacaattgcccttctctctaccaccacctttttgttaatattgctggtttccgtaaatgctcttgcttctttcatagtttgtctttggttattcaattaccttcacctagcaatgtcatctccttaagtctgtctgtgctttttaaagactaaaccaaatgttatctcctgcaagcaacagaaatttccactagctcaccaccatcactaatttcattctggatttacctatttaggcatctaaatatttattacctatttattttttttttactataatacatgataatttagctcttataccacccacttaccactcacctccccttcctcaaatattatctttagtcatataagtaatcactaattatcattaggactttgtagagtaaagccaagttttctagaatatttaagataggatatttcctttcttggtgcagctttttgttttgcagtgtcttcctcataatagtaatttttaatttaaaaaattctgttgtagccctttctgtgaggtttccctttcttctgaagcctttggttcctctgtgcccatcttggcaggttgttctttgggttggctgtgcagatgccatcttgaggtttttctcatctgctctcctacagtagatccattgtttcttggatcccatgccatctttcttggctgaccctttctcattttgcctgactatattctcaggtaaaaccctaagaaagcatggaggagtacattttctgagctctagcttctgaaaaatactgtccagtgtttggtttttggagccagaccgtgataggtttgaatctttgttctgctacttactggctgtatgcccttgggctgattccctaattgctctatgcatcaattttccattggcaaaatgggggaaccagtaataatattagtac

SEQ ID NO: 80682 - DNA, 1184 bp, Homo sapiens
agaacagtgcctggtgcatagcacatccccatcaacgttgacttctgttatattctaccctccctcacacttgattggtagtttggttgattatatatttctaggttgaagataattttaccttagaatttcaaagtctatgctgttgtcttctaaccagtcgtggtggtgaagcctcatggcattctgagtttcagtcatttatgtatggctttctctctggaagcttttaggagtttgtcttttccttggtgtgctgaaacagcacaacagtatacttagtgtgggtcttttttcactcattgtgctcagtacaccaaatggataggcctatggataggctctttcaaatttggaatcttgaatcttctcataattttgttaactttctcctttccattttatttgttcattttgaagtgtccgttaatgggattttagacctcttgtcttgagtcttgtatctcatattatttctaaattatttttctttaattttaaaatctgaaatatttttctttcaacttttggaaatgttatttggacagtcatagctttaagttttatttattgttgcttaaccaattatcccaaaacttaatggcataaaacaacaaatttgcctatctatcactattgtatggcttaactggggctagttggacaggttttctgctggtctcatttggcagctctcactatgtggtttagacggtggcagggactggtcatctggatgctcagctgcagtggaatgtctgagacgacttcttcacccacaggtctgctgccttggtgtttcttcatctggcctttctctctgcatagcgtctcatcctctcgggcctcttcatgtggcttctctttctccaagaggatagtcagttcctatttttggcttccagaagcacagaagtggagctgccaggtgttcttaaggcttagatctggaacaggtccaatataatttctaccaaattctgtaggttaaagtgagtctcagggccaacccagactcactgtgggatgggcccatccaaggacgtgatgacaggaggtgtggttcattgaggaccaactcccaagatgagccctgagttctaagaaccttttcttcgctggttattttttattcatattctatttttgttccatggttgtattcataagtgtctttaaggagc

SEQ ID NO: 80683 - DNA, 2618 bp, Homo sapiens
ttgttcacattgccatactattaaaactttttattgtgagagatgacatgtattaaaaatatgtaaaacataagcttagtgtaactcataattagagtgaatacttgggagccaacacctagccagcacccaggtgaagagaaggaacattgctcgcactacagaaaccttctgcaggcttcttcctgatcactgttcctctgtgcactcatctttccttacatttctctagtgttaccacttatgtatgcatccttgaacaatacagtgtagtgttgcctattgctgaacttttgaaaatcatactgtatgtattttttcgtacctttgttgtgcttaacattgtgtgtgaaatttgttcctattgtgtgtagctatagttcttttgcattgctgtatttattccattgtttgaatacaccctaccatttatccccttgactggatacagacatgtgggttgtttccagtgttaggaacagcgaatgctgctgtgatcattcttgcttgtatttcatggtacccctgtgccagcatttctctggggcacatacttaggggcatgaggatcaatttcttcttttactcaagagttatctaggaaaaaaaaaactttttaaaaagcattttcagatggcttttcagttatttttagtgcatcaatatggtcagagaatatggcctgtgacctttcagctgcattatcagtaatcgtttagacttcactattggtgttactgctgtctttgcttcttattgctgctccttgtattatgtgtcctgctccctgcccctcaagtatatccctgaataatatctggttgttttttttttttttaacctagaaagggtttaaagggatgtgcatggagagtgtcccttgaatacttgctgtctgttatttgttcaacaaatatctgactctgtataaagtattccacattggtgtggagaatctggaggtgaacgtacacagataatgcttcctgtcttgatggagctagatatagaattctaagttcataattgagtctattcccagttctttacgcttttatcttctgatatttgttacaaatgaaaagtctgatgcctatctcattcttaattctttctgtgtattttattttttctttctggtagttggtatgattttctctgtaactgtaaagtgtgggggttttacttttcagttttactttttttttttgaaacagggtcttgctctcttgcccaggctagagtgcagtggtgtgatcacagctcactgcagcctctaccttcctgggcataagcagtcctcccacctcagcctcttgagtagctgggactacaggtgtgcactgccaccgtgcatggctactttttaaaatttttttgtagagatgtgttttcaccatgttgcccaagctggtctcaaacttctgggctcaagtgatcctcctgccttggcctcccaaagtgttacaggcatgagccaccgtgtccggccttcagtattcctatggggctttcagagccacttaatattctaaagtctttctttagctcagcagcacttgtctcttttgtttctttttattccccttcatcctctggatgaatgttagatctctatatcttcaatgtcccttaactgttctcttacttacatctcttctgttttctcccccatctcctttttttctctgttctaaggaaatgtcactgtttgtttttcttaatcataaataccttgttgggtcaagtccatagtactctggcccttctacaagtggttttttgggggtggaggggatcttatttttactttctagaattgtgcttgcatagtaatctgttttttattttgtggatgcagtatcttcccaattactgctaaagatcccaattaggttttaaaattctatttatttccttcattagtaatgcttcagatcaattgtgcttacttgacttggcactttcagattgctaattttcttcagctctctggtgatacctggttatctcctcatttatagatgagatatacccttgatcagtatccattgttgacctgagtgtcttcagaattgtcactcttttctactgtggcctccccctcctggtttgcagacctgtgctcttcctatggcatgaggatggggaggtgctggctggtgagctttccagctcctgagctaaaaggaagaggtggagtctaagattttgctgctgcattgagttatactaaaaacactctctgtcttttctgtctggttttgacactcatagaggccatcaagatagggttcctatataggagagtgatccttaccaactgtagatgggacaagtacagtaaagaatgtctgattcttctgaaaaaaagtggtccctgcattatttggattgagtctgtgactttctcaagcccagcagtctgattccatctcctttgtatcttccagcatgtccttatagttttagttcactaagggtattctccttgtatttgtttttctgctactgcggcagacctactctttttttataaaattctgtcatttcagtggggttttgaaaagaggaccaggccacatcttgaaatgaaatcatcttagggtttcccacga

SEQ ID NO: 80684 - DNA, 1710 bp, Homo sapiens
ttctcattttaaaatgagggatagtaactgggctgatggtgacagacccagatgcatgtgagaatcacctcagagagcttttgaaaaacagattctctgggtaggctttgaaattggcatttcgaaaatgctctttcaatcgttgatgcaaccaaactctttgggagttttaggctaggtatatagtctttagatacccagaatagtttgatttggaatataacaatttagggaaatgaaaaaagggagaattacattttggaagctgcttgcttccattttccattagtttttagaagacaatgtgtctaaagagatgcagatttaaaggaaatacaagttaattctgcatgggtatgtttacatggaattctccagctgactaatccagaagagttctaataccctctgtgatcatgggtttgtttttcttgagaattattccatcagagtgtctaataacagatgcttagatactgccgagacctttgttggtcttacttgatctctggatcctggtttcgtgatcttttacatattctgtgttctaacctgaactggccttcatggttaaagatgcatgtataaacagtgtcctggcgagggcttaccttttgaactttgtcaaaaatggatatgaaagtccttcctaaaaccccatcaaattcatttctgaacttgataaattgtaaattgtgtaaattggttaagttgtgtcttgtagggaagtattttgttgtaaaatgtttttaaaaagaaaatttgctttttagtgaggtggtaatcatttcataattcttagttttgtgaaatgtctattatcaataacacatctgactgttcaaaatgtaaggcaattgaatttatgtaaatgattcaggctttccaaagttaaaaagggagctattttaaggaatcggtagtttgggagattttattttaaataagccattgatcttatgcatatagccatataagtaaaatgttttcttattttaaattagattatgttttaacatttttttctgttttgctttatatttgattgcttttctttgttcctaaggcagccattaagttgaattgttcaaaattgtttcatttttaaaagctgataacttatttgttagtcaaagctggatttaaagataaacattttaattttaataaactgtctggtagtgggactccagtgacagatgtttgagagtttgtggcaccagtcttctaatgtactcagcctgtgcatatttgttctgtatagccctggcagattctttctctgtttcagaatgggacaacagaagaagtgacttcagaagaagaggaagaagaagaagagatggctgaagtaggtattttatataaaagaagagttcataaatttcttcatttttgaacatttgagtaattctcaaatcttttttatagactactattaatgtggaataattgaaagcacattgtgtttggaatggaatataatttcccaactctggctttacctctaactaatgatatgcctttgagcaaatttatctgaattctttggatttgatttcctggaaaacaaaagcttttaacatttagcaccaaaattatatttatgtttaatactaatcagtacttaatctgtatttggttatttttaggaagaggaactactaagtttaaaaaattttatgtttgcataaaaggagaatttgagaa

SEQ ID NO: 80685 - DNA, 1056 bp, Homo sapiens
ttttgctattttgcacatgcagattttgtgtttatttttgtggctgcaaggttgaaataggtatccttatgcctaaattagtgtttatagtttaaactagtttcttagaatacaattctagaagttgagtttctggaacaaactaggaacacttaaggttcttgacacctgctgctaaactgttttaaaggttcctcttaataggagatttagaagatggcttatttggtaatagttatgattttgtaaagcttttaaatctgctttacccagagtctagattttaaataaaatataggatataaaaggtgggagcctcttgaatggaatgtgggggctttttctctctccctataggatagttacattttgtttcttgttcctcatttgagtcaagaataatttaatgttattttggcataagaaactgctgaagaaaaataggttgaataagctaacatttttcgtctctttgtaggatatagaagacttagatcactatgagatgaaggaagaagagcctattagtgggaaaaagtcagaggatgaaggaattgaaaaagaaaatttggcaatattagagaaaattaggaagactcaaaggcaagaccatttaaatgtaagtgtgtgtagatatctagaacctggacttttgtggttaaataattgtagttaataccaggcaattcattaacatgcccatctcagctgccctcttcctccatttctgccttagtggtggattcagtcatgtgtgttttaaaacagggtcttgctctgtcgcctaggctagagtgcagtggcacaatcatagttcagtgtagtagccttgatctctcaggctccagtaatcctgctgcctcagcctcccaagtagcttggactataggcacatgccaccatgccaggctagttttttttatttttagtagagatgaggactctctgttgcccaggctggtcttgaacacctgagttcaagtcatcctcccatcttggcctccgaaactactgggattacaggcatgagccaccgtgcctagccttagtcatatg

SEQ ID NO: 80686 - DNA, 1088 bp, Homo sapiens
aggctggtcttgaactcccgacttcaagtgatccacctgccttggcctcccgaagtgctgggattacaggtgtgagccactgtgtccggccacaacttaatatctcttttacgtgaagcagcaggatgtgaaaagaacactgagtctggtgacaaacacacaatttatggtttcactttcctcagctctaaaatatggctagacagtacataccttttggatgattgctatcaaaaataaatgaaaatgatgtgtgtatatatataaaatgctcagagtagggaaacatcaaatgattgtctgaacacttactactttttgccttgtgttagagctattgaccaactccgtgaaatctgagtagcagttactttgtcttgggcacaggttccccaaaacagggaatgaattgttaggtaagtagatgccaaatgttgaaaacaggtagattactctccctccttcagtctaatttatatattaatctaatttataatttttagtagagcaaagaaatttagtcaagcccccatatcttgattacttaaaaaacaaagtttgtcatttgaattaatgatgactgtactttatgtcttgtgatcgattccagtttgagttatagtcaaaacaactataagttactgaacacttttgcatgatggatactatgccaagtactttatacttcacatatcttcacatttagtcttcatagccaccgtgtgaaataggtatgcttcatattttagagataggaaaaacttctcatattttgtagatatgaaatgagctaggaaacttgatttttccccccttcaaagtatagtgcaatgtttaaaatctttaatttcacgtgaccaaaaaatagttccgtttgtatttagtcttatgataagatattgatgtgttttcatctttagagatgtccctgcactgaaaaactgaaaccagtcgcatgtaggcagatgtttctcagtgtcttaatgtgcgaactagaccatctgtgtaatattcttgtttgtagtcttatgaatggaactctattttagtaaataatgtgtcaccttgagtgtcttctagtattttca

SEQ ID NO: 80687 - DNA, 1021 bp, Homo sapiens
ctgcgcaggcttcttggatactggctggaatatatttctgggccaggttgatggttacatgagcacataatttacaatagcttcttaaggtatatctctatattttatgtacttttctgaatttatgtgttatatttaataaggtttttttttgtttgtttgtttgttttttgagacagagtcttgctctgttgcccaggctggagttcagtggcacagttttggctcactgcaacctctgcctcctaggttcaagtgattctcctgcctcagcctcctgagtagctgggattacaggtgcatgtcaccatgcccggctaatttttttatttttagtagagacggggtttcaccatgtttgccaggttggtcttgaattcctaacctcaggtgatctgcctgcctcggcctcccaaagtgctgggattataggtgtgagccaccacacctggcctaataagtattttaaagatgctaaaaataatggttaaagaatagcaatggaatctagaaaaaatgttaatgatttttttttttttttgagacagaatcttgctctgttgcccaggctggagtgcagtggcccaggctggcgtgtggtggcacaatcttggctcactgcaacctctgcctcccgggtttaagcagttctctgccccagccccccgagtagctgggattataggcatgtgccactatgtccgcataatttttgtatttttagtagagatggggtttcaccatcttggccaggctggttttgaactcctgacctcatggtacacttcccttggccttccaaagtgctgggattacaggcgtgatttaatatggatctggatgagatgtaatggtttaaaatctgtggatatatgagatattttgatggaaaaagcaatacttcctttgtacttacaaaaaaggtagtaattttctaaaagcttcttacgtagcttttttatgtgtgtgtttttgcttggggatatatcttatgattgaactttcttgaagtgacccaaat

SEQ ID NO: 80688 - DNA, 1089 bp, Homo sapiens
atggtcagaaccatttgattctcacaacagaatgggtaaaaacaatttgaaccataaaaccatacagatcttcatagcatggatagggtaaggtcagtgtcattgtcaggggaaaaactcatggctgtaacatggtagagaaagtttcagatgtaaagaacacgtgaacgccatttaaggaaactgattcttctgcccctattctttggaatatttagggctaagttcttaattactgatatcatacaaatctgaaagtattatgttctaagaaccattagaaaaaattgactagaatttcagagggattacattagcatgataacattagaatttttaaattacccatagtcctgtatccctaacaactgttgtcatgtttgcatgttattttctcatccttacttgtgtgcatattttcttggtaatggcacttagaaattgtttaaggaggaataattctcgagaattttgtatgactccttttttctttttaaggtatgtattgggtggaggagcattatgtatggaacttctcacaaaacaggtgacttttcttacgatactccattttcacccacaatttagtgttttgatcatgtaaattagattgtaagtagaaaattctttaatagctcctactcttaaattttagtttatttttaaaatagcgtctactttcaagaatgaaaaaggtaaaccaataaaatgacattgtacttggtgctgaatctatgctaggataggcattaagagtgacctttatttaaggttctaatttgctcatgttgggcacttagaacattggtttgttgtttttttttgtgagattctggaaatgttccaattttactttttccccttgactacagtctttttaacactgatttgctgctgttgagttatataccattttgttaggccttcccaagtgggaatcagaaatactactgtattttagagatactttgttcttctgtagggctggagcagtgcctactcaatagaatcggtcatcatgcaaataaatgccaccttagtcaaaggcaaagccagagtgcagtttggagcaaataaggtacttctgtt

SEQ ID NO: 80689 - DNA, 1325 bp, Homo sapiens
ctacattgtgtgtgtttaatttcttttgattccattttggttaagagagcagtaaatagattttctggtattcttgttcacttgattacatttgtataaagttctgattgccagttgctcagataacaagtgacaaggcagaattctttaaatcagtaaagttccttaagcctaaggctaaatcttgaatacattgttgaattctttaatatcctgatggcaagcagactgatagctgcacatttggcatgctttgtttaatggattttatttttaattgcagatttatttggcaatgtacagtaaattttgtaaacttgcatcaagtttatgaataaagaaccatttaaaaattttgtttgtgctgatcatggcaagcaaaaaaaagattactttctcatttttccctcataagaaaactctgcttgatgtgtttgtaggctttattgagtttctggaataagatatttaaggagggaagtggtgaggggaggcttggaagacaggcagatttaacaagagaaagtgaaagtgtgaaagaacctggaaatagtctgtacaatagtcaccttttcctccgcctttttcctcttccattctcattataaattcaagtgctactttttccttatggctatccttagttcccccagtgaaaataatctgctccttccttagcatacccatggcctccttgcacacaattgacagattatttcacatacaagaagtccagaggtaggacaactccaggtactgtacatctgggctttgctctgcttccttgagatttttctatgttggtttcatcttttggttgcatgttatgtgcagcccccttacttgatccagaggtagataaatggccctgtcttctagtgtctccttaggaggtgaggaaatctctaaaagcaccatcccatcaagcacactgcctcttgcctttccttggctacatcagggacctgtgcccacccctaaaccaatggtggtgaaaagaatgaaaccatcgtgattagtttgcacaaatggttctcaaagccttatttggggaacactggagacccctgagaccatttcaagaggttttaaaagactattttcataatattaaaacatttgccattttcactcattcttccatgtgtacaatggaattttccagaggctacatgatgtgattttgcaacagattgaattcagaagcaaatatgagaatctatttgtcttctattaagacaaattaaatatttgcaaaaatgtagtgatgccgtcactggtaaactgtcctctttccctactttatatcagccacaaagaaagaa

SEQ ID NO: 80690 - DNA, 1739 bp, Homo sapiens
gaggtggtggagcgtgtgctcaccttcctgcccgccaaggcgttgctgcgggtggcctggtgaggagaggaggcggaggcgggaagcttgcctggggacacgccgtgggcatgtcccaggctggcggggtggggggagagacccttgggacccaccagggccgtccccggctcgctcgccctacctgaggtgaccccctacccgcgaggtatctcccagccgtggtgccccggggggacttccctgaggggcgaagttccccttaaggttttctccatatctggctcttcttccgaactagcgccctgactgacacctacctaccccggggactttggatcccgcagggatctcctgctgctgcgccagcgggtgggggtttgtgagctgtgggagagacgaaaatgaacgtccgttcgcaatcctttgtgcgtttgcgtcctcagcgtgtgccgcttatggagggagtgtgtgcgcagagtattgcggacccatcggagcgtaacctggatctccgcaggcctggcggaggccggccacctggaggggcattgcttggttcgcgtggtagcagaggagcttgaggcaagtagcaaggggtgtcatgcacagtcatttgcaggttggtggttcagtctttgagaactatttttttttaaatcccagttttgttaattaaaggaacatctcgttccgtgaaaagattttgtaaacatcagttttagtgactacacggtaaggatgtgtcatgatttatttgaccgttcatcaaatgttgggcctttttttttttttttgagacgtagtctcgctctgtggcccaggctggagtgcagtggcgcgatctcggctcaccgcaagctccgcctcccgggttcacgccattctcctgcctcagcctcccgagtagctgggactacaggcgcccgccaccatgcccagctaattttttgtatttttagtagagatggggtttcaccgtgttagccagaatggtctcgatctcctgacctcgtgatccgcccgcctcggcctcccaaagtgctgggattacaggcgtgagccaccgcgcccggcatgttgggccttttaagtatccacattttcactattaacaacaacgctgtgcagaaccttcccttcacctgcttcccttgaagcaactttttgttgtctgttttaccgggaagacaactgggtgtgtcttgctcagtgagcacacctagaaagccaagaaccaaaacttaaagccaaatatttcaacttctgatcctgtactcttttgcttctctggcccccaacttcaaaaggggagccaacaccaggagagatgaagactcgaactgtggagtcagaggggctgcagggtgtaccatctctggggagtggaagggaaccatttgacagtaaagtgccaacctgctgctctgtcactctgtttactttagtacggcttacagacagacataactacggtgcagccgtcacaatcaggaaattatcactgatacatttctaccattttatcctcagactcggttcagattttgccagttgtcccagtaaggttcttcatggcaaaaagatctgttcccaattgcaatttgctctgagtaagtcctgtttctttaatctcctttgatctggaacagtttctcaagctttgcttgatttttcccaatcttgacacttaggaaaatcacaggctattttgtagaacatccatcaattgtgtcttt

SEQ ID NO: 80691 - DNA, 3313 bp, Homo sapiens
ctattaaattatagactgcaaatgcattaatgacaagagaaaatgttgattttaaaagtgaaaacagattatgaaattatatatttagtatcatctgaattattaaagacaaaaaagggagagtagaaaagaaagccaaaatgttagcttttttttccatttactgtttttaaaaagttttctatggtttttaaaaagttttcaaatttttaccacagcaggcatgatttttctatagctttaagagtttatacattgtagtggctgttaatagccagacagacttagttgtgaaccatagctttggcatataccagcggtgtgactttgaaaaagctactcaacctctctgagcctcaggtgctatctccataaaataaaaagaaaaataataattttcctatgcccttatagagttgttgtgaggattaaataatgaaaaggtaatgcatataaacattacttacaataccaggagcataagttctcaatagatgtctattaaatattcttttattagtatcattattaaagttcacatagttatagtaatgcccttagaggagttcctccattgtagtaaactgctggtgagacaaaaacatgaaaactctatccaaatcatacgtgctgtttatttgtgttttccaagttatctagtggacatgggtacttttatagccataaagaaagttgatttaacttttctattagaaatattttaaagtccgccaggcatggtggctcatgcctataatcccagcactttggaaagccgaggcaggcaaatcacttgaggtcaggagttagagaacagcctggccaacatggtgaaaccccgtctccactaaaaaaatataaatatttaaaaatatcaaatatataaataaaaatattaaagtacaaaagttggctgggcatgttagtgcaaacctataatcgcagctacttgggtagctgaggtaccagaatcgcttgaaccagggagatggagtttgcttgagctgagattgcaccacttcactccagcctgggtgataaagagtgagactgtgtctcaaaaaaaaaaaatttttttaaagtccaccaaaagctttataaaacagcttgccatttgtaacttctttgaacagtggaatgtggtgtcagctgtcttaactgtgctttgagaacatttcatattgaggcttgttatgtcactacttctagtgtgaattaggaaggaaaattcagcagttgcttttcagtggatgcctcataaactctcaggaccagacttttaatacttgttcaggagtaagaaacctgaggcctaaaagcttgctgagggttattctgctggtttgtggcagagttgccactaagacctaaatctgttttttgttttgtttggttttttttttttttgagacagagtctcgcctgtcgcccaggctggattgcagtggcccgatcttggctcagtgcaacctccaccttcctagttcaagtgattgtcctgcctcagcctcctgagtagttgggactacaggcgcatgcagccatacccggttactttttgtatttttagtagagatggggtttcaccatgttggacaggctggtctcaccctggcctcaggcaatccacccaccgtggcctcccaaagtgctgatattacaggcgtgagccactgtgccttgcccgtaaatctctttttctgtctcctttactcactataccaggcatcacagattcagatgactcgaaggtcaggcaggtagctgaagagggtcaggtagctcaatagtcgtagcaccatggcagtctggaaaggcttgcctccgtttagccttagttaagaggcacgtagtctaagtgttgccaaaatgtccagtttttaaaaagaatctggaaatccacattttatgtaaaaattcggtggaattttgaacattggcattcagtttacattttctgaaaatgctgtgtggaccaaggaaactatatccgtaggtcttgggcagccctgggccccacaggccatcatgctatctgtctcttttattagtttatctatgtagaatgtattctgaaacatcttggcattccctcaaattataatggaccaactttttttttccatttaactaacaatgaggctttgctatatcctaagtacttcattttattctggtagtaaaaaatatttgaaaatagctagcttggaaaaatatatcatccttttcatttaattcagctgctttgccgcttgtcttcaattggaaagtttagttgaaaacaggtgagtctgaataagcccagctcataggggagataggggacaaataagattaactaggggtaagggatgttgcatctgaggtccagagtactgagggagtttaggaaaaggttttggagaggaggtggcacttaaggtgtctctagagggaaacagtcttaagttccacaagaacagagcaatagaacatatggggaagtcggtgtgtctggataatattaatagtaagctaaggggccctgaaggaagccttgctggcaagcctggaaatggaggcttggagtatttgatttgataagcagtgaaaagggagtgatacagcctgtataccttccccagtgctgagatttttctgatactgtgatgcctgttcaaataaagcaagtgcatcttttgctggtacttgatgtttttgttctaagagcttcagttatcattatgaaaatgaactttttgagggctggaatgaagaaattataggtgtttagtaaatgaactgaaaatgaaagagcatgagtgaaaagtaaatgagaagtagattgactcagaatgccaacattgacctgaaagaaggtagggtaccagcagtttggatggggtgatacttttttttttttttaaatttctgcgatacatgtgcagaacatgcaggtttgttacataggtatacacgtgccatggtggtttgctgcacccatcaacccgtcatctacattaggtatttctcctaatgctatcccttccctaatctcccactccctgacaggccctggtgtgtgatgttcccttccctgtgtccatgtgttttcattgttcaactcccacttatgaatgagaacatgcagcatttggttttctgttcctgtgttagtttgctgaaaatgatggtttccagcttcatccatgtccctgcaaaggacatgagtgcatcctttttctatggctgcatagtgttccatggtgtatctgtgccacattttcttcatccagtctatcactgatgggcatttgagttggtttcaagtctt

SEQ ID NO: 80692 - DNA, 2706 bp, Homo sapiens
attcattgagtttttgaaggatttttcttgtctctatctccttcagttctggtctgatcttagttatttcttgccttctgctagcttttgaatttgtttgctcttgcttctctagttcttttaattgtgatgttagggtgtcaattttagatctttcctgctttctcctgtgtgcatttagtgctataaatttccctgtaaacactgctttagctgtgtcccagagattctggtacattgtgtccttgttctcattggtttcaaagaacctctttatttctgcctttattttgttatttgcccagtagtcattcagtagcaggttgttcagtttccatgtagttgtgtggttttgagtgagtttcttaatcctgagttctaatttgattgcactatggactgggtgatacttcaagggactatgcagaagcactgatggattcatgggatccaattccaattttttttttttctttgcagaatgttcgcatcttaccacatacagttctttacatggctgattcagaaactttcattagtctggaagagtgtcgtggccataagagaggtaaatatcaaaagaaaagcttttgcttctgtttttttatcatgtgccttccgttcggagttcaatattatacttgtcctgagagttaactgactttctgaggctctgggactgccacctgtagtatgcatcaatatatctatctttgaaccttgaggaaccctttctgcttcagattgatttctaaaccttgtagtgcaattgaaacaaattcgttagaaaggtgttgttctcaatttgagatgctttaattctccaggcactttttattattaaaacaggttgtatgacttggctattcaggccttttactgtattggaacatgaggtcccatttactaaagttatgtagagaaatggtgcatttttggcttgctgagggaaaaggcagaatgggtatccaagatgcgcacactcaggtcccaagttagacttagataatggattctcattgtctaatttgatccaggtgactgttgatgcaaatagtagttatactgcaatatcagctgaacagaaaggtacaatagcaagtctaaaattcagctgttactgctaaatttgacatcactggggcaaaagcaatatatgaacagaggggaaaggcagactagtggtgcaaaagatcagatttataatttaaaagccaggaccaaaacaggtaaagtgtttgttttaatcaatgcttttagacctttatttagagcattctcgtgttaaatgacttaaatatttccagtatttgcttttttactttttcattctcagatttgactttaaatggatgatatttatcattttgctactgtatttttacagcaaggaaaagaactagtatggaaacagcacttgcccttgagaagctattccccaaacaatgccaagtccttgggattgtgaccccaggaattgtaggtgagataaattagcaacttgatgatttcttccttgcattaatgtggggtcctttggattggtgagttatttttagcttagaaccacatttctatttctgtccatctaaaatacaataaagtcagtcatatttaccatggcattatatttgccttatattaatgtttattaagttattgtacttctcatctcaaggttacctgtataaatatccagtagtcattcataagaggggaatgatctcattctgccttcctccaaattaggaagtatttgtgggcattttcagagttttgtcagttcaagcagtattgtgtttggtgggtaggggtgagatggggctgggattaggagcaaagctgggccttactaggagacttctgtttctctgctttggtaccactcttcaatgtttacagcatgaggttgtgcccctttccatgcttgattgctgctggtgaatttttgctggtttttattatttttgattcttttctgtagttaactgggggaggagagattctgttgaggcagtaatggtgcaatggttagatacctggattcgaatgccggctgtaccgcttagtatctgtatgactttgagcaagttacctaacttcatggggcttcactgtcctcatcaaggaagtggggatgatgacagtagtaccttccttggagggttgtgagaattaaatgagttaacacttgtaaagcatttacaatagagatacacaaagcagtaagtaaatgttagctgtcatttatgtattgtttttgagatggagtttcactcttgtcaccaaggttggagtgcaatggcgtgatctctactcactgcgacttctgcctcctggattcaagcaattctcctgcctcagcctcccaagtagctgggatcacaggcgcccgccaccaccacacctggctaatttttgtatttttagtagaaaccgggtttcaccatgttggccaggctggtctcaaattcctgacctcaggtgatccaccgcctcagcctcccaaagtgctgggattacaggcatgagccactgcacctggctgctgttatgtttttttgttccaactcagtagtactctactgagaattgtcatttttaatcttcactgaaagatttttgatctgaatttgagtcttatacagtgaggtaaaaagaattttacatgtttacaaatgaatattatttgttcagttgctctag

SEQ ID NO: 80693 - DNA, 1789 bp, Homo sapiens
ttagggtaaacttttaaaaattggaattgctgtgaaagtgtatttactacccccccaactttttaatttgaaaaatatggagaagttgaaagaataatagaacagcatgataaatacccatataccctttatctagtttagcagttgaaaaaattttgcaacatttattttttctcactttgcttataaaaaatttctttctgaaccatttgaaagttaaatggcaaacatcatgacactacaccctaaaactgtcaaagctgaaaaacttttactcagatagtggcttgttagcttaatgattatcttagtgacctaaactgtagttatctagtttttactgactctattggtgaaactgtttaactttttctctagtgactccaatgggatcaggtagcaatcgacctcaggaaatagaaattggagaatctggttttgctttattattccctcaaattgaaggaataaaaatacaaccctttcattttattaaggatccaaagaatttaacattagaaagacatcaactcactgaagtaggtaagttacttttatttatcattaactgctcattttattgattaattttgttttctttttaattctggctagttggtggatattaggttcctttgggagaatctgaattaagtacacctgtcactggagatgtggctaattcaaacaggtgattcacagaggccagtgtgatacatgtttggtagaattgatttactttttaaattattttacttgcattaaagcccaagagaaccagagatgaaaaatttttcataaatactctgttgatgataaacttgtttgtatttagttctgaattttaaggaattcttgctctaatagtttatttcattttgctctatttttgttttgttaaccttttttattctagtaacaagcattttagaagtttttagaatacgcgggttagttctttgtgaactaattagaaagatgggaacaagtaaagtgaccctgatgagtcttaggaaatatatgagttaaggcaagtctatcaagcaaggggtgtgctgggaaacatcctgcaggtagtgtggatggagccctgaagtgaatttgaagaggtaaagggttggcttaatgtctaagcttggatgggaaagcttaacttaatatagtaaacaacaaacgaattactcaaggaaagcagcgtttagccttttatctacatctgcagatggactgattgaattcacttcattcattaaaaatcactgttggcataaaaactattcagtggtaacacctcatttttgcatagatcagccagcctatagagataaacctctgttatttgaaatgggacttaaaccagctggagtaaaaaattgtgtagcagcaaaggtaaaatttgttttactgatgaggaaaaaaagggggtatacacattgagactagtttttacaactatccctgacaatgtggaaaaaaaaaaaaaacttgcaagtcattggtggatgggaggggaagcacagaacaagaggcattagcagcaaagactcagccgggaacctcttaataatgtggaagagggtggtcaggtcaaagtagatggtggaaagtctcaacagccagctctggtgtgacacagggtagtgtagctattaagaatgctgacttagaaatgaaatcagtatgttgaagagatatctgcactcccatgtttattgcagcactgttcacaatagctaggatatggaattaacctaagtgtccattagctgatggtggataaagaaaatgt

SEQ ID NO: 80694 - DNA, 1021 bp, Homo sapiens
agggggcactgttcaccacactataagtggttagcgccttttctctcctttaaaaaataaaaaatctgtaaattctcactgctgctagcacagctctgtgtaaaccagtgtttttttttttttgttccctactgagagccagcttgcaccttggtctaccaagagttgctgctcagtacatagctgcttcattatttgtgttgattgcattatttattaacacaaatagccatttagtttttttaatagaaaaaataattaagattttgcataatgtttgtaaaaaatggaaaacttgatacagagatcgaagaggatataaaataagataaaaaataaaaaatggaaaatttgatagcttaagccactaaattgcccttaaggtggagtgcaagtcagtaacatttcattttgcagcatgtataaaataatttctgttttaaggctgtctttaactgttgctcttcatttctctgcaggtcttttagataaccctgaacttcgtgtggtccttgtctttggttataattgctgtaaggtgggagccagtaattatctgcagcaagtagtcagcactttcagtgatatgaatatcatcttggctggaggccaggtggacaacctgtcatcactgacttctgaaaagtatgtcttgtgtgcttctgatttcgtctgtgaatgaagggaaatggtctcaggttttgtcactttggggttaacaatttaaaaaacgtgtttaaagaattattaagataatagttcattccattttgtagtagacattggctaaggggcttactgaacataattctgcttacggttgaataattacatttttatatatattgtccttcaagaacttccttgagtcacattctccttaaaatttgacattgcctgttgatctttcctttgacagatgtggtactctgtgtgacctcaatgtgtcacctcctttctagtttcctcctttaaaggaaacacatggttagagtgtatctttatggcaaaacttctcaga

SEQ ID NO: 80695 - DNA, 2005 bp, Homo sapiens
gctgcagtgagctatgattgtgccactgcacttcagcctagctaacagagaaccctatctctaaaaaaataaaatcaccctccattattatatttttaatatacatctttcagaatttgacagctgaagtcggggggaagagatgttaatgtaaacaatagcagaaggcttcgtttagtggatatctttgtgtatattaataaaattataacattccttttaaggaagtcagaaaggtaaggaaactgtactttctaataaccggatatgggtttcagaaatcgttatggatgtgcattgcccctttgtatttgtgactgaaaaaaatggtggcttctcttgatctgccttgtgcattttttatgtattaattttgatttttgaccctattttactcacctatgagggtgagcctcagattaaccataggctgctaaaggcagcagcctcccgtcagtgaatcaggaggattttgcttctatacttaaaaattttaatgtttcatgagatattgccacttttctaaattttccaggaaccctctggatattgatgcctcgggtgtggttggactgtcatttagtggacaccgaatccagagtgccactgtgctcctcaacgaggacgtcagtgatgagaagactgctgaggctgcgatgcagcgcctcaaagcggccaacattccagagcataacaccattggcttcatgtttgcatgcgttggcaggggctttcagtattacagagccaaggggaatgttgaggctgatgcatttagaaagttttttcctagtgttcccttattcggcttctttggaaatggagaaattggatgtgatcggatagtcactgggaactttatattgaggaaatgtaatgaggtaaaagatgatgatctgtttcatagctatacaacaataatggcactcatacatctggggtcatctaaataataattaaagtggctttcataatatgtaacttttgggttctgcctttttcagaaaatggaaacttgggccatgtgtatttcaaacaaaaataactttagatatatcttttttgtagctttgattgatgctctaagatcacatgagggtagtatttaatatattagatgaaggacaactttggacataacactgactaggagttgagagcttttgcatcaggcagaagcaaactgattatagttgtgttgcaccagatcatgtagctgctgtgtaacatgaccttaaatagtcttcctgcataggaagagcaaaagggtattcatcaataggatatagatttaagacattccctgactaccccttgcgttgttaggtgatgtcttttagcagaatcatgaagaccttttttctcccttaataaaggagaaaaatatactgatggctggagaaatttttctctgcctttcagttttatgaattttttcagaagtaacaatattattattgactttttacttatttgataaaaattaaagaactatttttgttttggtcagataaattgacaagactaatcagtattttattataagtaaaagatttttcttctttccttaaaaatatttttttttcacctaggtctaaatagctaactaactggtagaccagagtattacatcatcttattttggttttataccaataaaacatagcgtggaactcattcaggtaatgttttgcatttcattgcttttggatgaacaaaggaagtaaactaatcctttataaatgaaaacccagaatagttggtatgtcagctagtcattcctgtcatattcccagtagaatgattttcaagtttgaatttctgtacaaatatctaaataagagatgtgcagagagcaccaattttccttcaatatccattctttacttttcacataatgatagaacctttgatttttcaagtgggtatgcctcctagaataaagactacatttcccagtctcctgtgcaggtatgactgtgttctggacaatggaatgtgaggg

SEQ ID NO: 80696 - DNA, 1047 bp, Homo sapiens
cactgtatatgccgcccacccattagctacttagtagccatctcattatcagagctcctgttgcagtatcacagtgcttgtgttcaaataacccttattttacttaataatggccccaaagtgcaggagtagtgatgctgtcatattgttataattgttctactttattattagttattgctaatcttactgtgtccaatttataaactttatcataggtacaggaaaaatagtatatttaggttttgtgctgtctgtgatttcaggcatccactggggtcttggaatgtatcccccatggagaagaggggactactgtacttaatgctactgaacttaaaaatggttaaaatggtaaattttgttaagtatatttcacaataaaaagtcagtcagcctgaaagagatgccattattaaataatgctatcagttgatgtgttttattgtgctcagaattatcacttatcaggagggataatctgttcccatactttactcctgtacatgagtaaaagcatgtcttttgtttgttaggtttgtagatctttgctatatttgtaatgtctggagccacattaatttttaaagtgcttgatggttaaataaccatgaagaaattctcagagaatacaggagttcgagaccagcctggccaacatggtgaaaccctgtctctactaaaaatacaaaaatgaaccgggcatagtggcgggcgcctgtaatcccagctactcaggaggctaaggcaggacaatagcttgaacccgagcggaggttgcagtgagctgagattgtgcctctgcctgggtgacaaagtgagattccacaaaaaaaataaaataaaaataaatgataaaaaatatatatatcagagaatggaaagattttaaatttatcgtggtgttaactggaaaggttaatgctaggggccaaatctgatataaacaagtttgggaatagaatcctgccattagatcttgaatgcacaagtaccatgcttgtaattcatcaacagcattttccccaaaaggtttgcctcttgatt

SEQ ID NO: 80697 - DNA, 1050 bp, Homo sapiens
accagttttttccagttcacagtccagtaatgtttcttgaagctaaatggtgctctgtttgtttacatgactaaaaactgagttattttattcatgtgaaaggtctcctatgttgtaacaacttccttgaatgccacagaatcgaatgaatgtatttcatgtcaatgtactaaacgtagcttctgtgtttgggagcagataattggtggtattcagccagaaaaccaatttgtataacttagattctgaatttcagaatttctcacctagtggagtatttgtacctgttccagcatccatcttcaattccaggaaaacatgggtgatcctttattgcttggtattcacctcattaggtggcacaactgtttgctaaaacagtttgtgcagaagtaaggtccagaagtaatttagcaagagagttacttacataaagactgagagctacgtagttctgggtaaatgctggtgcaacatgacctctttgtgttttgtataaatgctgtgctagtactaccagttgtctatatccacttaatccacccttacttttgaaggagtcgattaattctgtttgcctgaaatttgataattgtatcatcaatgaagtcataacattttcataaatgagctagagctttaaaagtagaatccttgtacacagtcattggtaggcagtgtttacttttttgtttggtaaatatctgaaattttaaaattcatttttaggttagccagtcctacttcctggatagtaatgtaatatttaaatttgtctttgcctttccctaggttctgttttgacctaacaatgataagattgtttatcctttgaatttgcttaaaattaccatcaggtttctactttcccacaagagcatgtgattgctttatcccagctgtaagataatagaacaacctagtgttgcttggtttactttgtatgcctttttctatttgcataaaccctgatctgattacaaacttgtatttacaccattcccttgactccttccaactcaaagtatttattgtccagttaaaacattt

SEQ ID NO: 80698 - DNA, 1091 bp, Homo sapiens
atttacaaataggtatgaaactagtcggtatccacagggcaatctgttttattatactggacaaaattcatttgcattagcataagttttctacaatttacagagttgtaaaatagctcgaagacaatgaaaatcacaggtatttatagaatcagataacccagaaaggtgcatttgacaggacacctggtcatctttttctattgtctgcttcagtctttctctggagaacaatccaggaagcaatccttgacttcttggcccacttagacacaaggtcagccaggccctaatctttcaacatttcagctggaacttacgagattctttgagcaagcatgggggcaaggagtttgtcttcacctatccctgcatccttagctaggtgaggccttttcttgctgtctcactttcctccatgcatcttgtgacccatccagaggatcacttcagagccaaacattgcacagtgtggaggtgggactctgatgggagaaggtttaacttggcaaagaattaccattggaataattatcgagagtgacctggtaaggtctggtttcaccagggccctccctgagggtcattcccaaccagtaactgcccatagagccacaggctcagacctgggacggtccctgctgcctaggccaaggcccagctctgtaccctgtccacaatagtagcacccccagtcttcgataggtggaattatcatttgtcaggtgataaaacaaagactgaaatctatttaagagaagcagtttaggagtacaaacatagaatatatgaaaagctagttatatgaaagtaaaatgataaaggttgagtttcacttataatttgaaaaccaacatttattgtgcttcttcattggacgtgttgtctcaattgtattttggtctctcagcaattttgctggaccttgctatgtgtttcactaaactcacttttcaaaaggagttgtcaggattttatgaattgttttattaaccccagaaatttttaaggctttcttaagatcaaatggttaagatagactggctcgtggcactcttattagataagagttctgcattttcatctgtaaa

SEQ ID NO: 80699 - DNA, 1146 bp, Homo sapiens
ttggcactttttccaattttgtgaccaaatctcttctttgctactctaagaaattttatgtcaggaactattatctagtttcctgacctttcaaaagtgtgttcttttgtatctctttatttcactgtcttctatagctaaacacacatgctctattaaaaagcaaggctcatttgtttaataatgtgaataactgagcttcaaactcttgtagttaaaagattcatactactcaatgaagttggtatatctagggaataaatagccccaatgagtactgtgtgaccatggtattatcacaatctgaggtctcccctcagtgtagattgttaagagttaaatgaagtacattgtgagggatctcatctctcacagcagatacacattgattaggcttacagagctagtgtctaaagtaagcattcttatttatttattgagacgtggcctcgttatgttgcccaggctggatacttcaatttgttaatgtatgatgatatataactgacacaggcttgagttgatgtgagccaggcattctttttctctgtagactgacatgtatgggaagccaaatttgtaatcagaatattttaatggatatagagaaaacaagaaaacaacaagaattatataatatgaaagtctacctgtaattagtctgatgcatttatttccacaagagagataatctgacttagaactgtaatgcatgaagtcttctggctacaataccctctctacttaacagtgcttagataggcactgccgatgtttgcctctgtgcctctcctttctgtgagtgtcccttgccaaccaactcctcagactgacagctctttctttagatatgttaatgcatattcagctagtctctattatttaaaggaactttgctttattctactctgatccattgactttataattcaatttgcattatataatcttatttccttcagctctaagtattagacatcacatcagtttcccacttgtacttaatacacaacctaaatatagttgaggtgtgatatagtttggatatgtatcctctctccaaatctcatgttgaagtatgatccctagtgtttggggcgggggggcctagtgggaggtgtttggatcatgagggcagacccttta

SEQ ID NO: 80700 - DNA, 1013 bp, Homo sapiens
ctaaaaattttatagtttgttgttcagttttagatttaaacattttttcattatgatttcttctgtaacctataggtgttttcctatccttttatatttatatccgatttaatggcattgtggacagagtacttggtccgttaagctatgcacttaatatctatctgtatactagctatctgttatacctcactgaataagttgaaagaaagaactaagaatgctggaatttggagattcattaaaatggaaagaaacctaggttgtcatcctgcttttgtacgttggatagatgcgtttttagtgtattttcaaaaagttaccaatgatagagaatggccaagtttgctggcaacccacaccaggtgtaaaaatgtgtatagtttcttcctaatatcagaatgtaaaagtagtaattgggagtagctgaaaccatgccacatgggttcatgatggatagcaaggtcaccacattgcacaacagcaggaggctctgtggcttggcaccctctttgcaacgtgaatgtgtattctggagttgctaaacaccctggaaggaagtgaagtaggggagtggggtagggaacaaaagggcgactgagaaaaaaggataaaaaaaatagtgactgcaggttcagtaacattgaatggcagatatatttaaaatcatattttataaaaataattgttttccaattatcttaggagcacacctctaatgtagccctgtaggctgtaatagcaatagctaagagtgataagctcattttccatcccacttcatactgttttctgtatttcctgtttctattatgacatctcaaccatcttgtcactgagaaaccccagacttatatttgactctttattgccctcttgtccagttgtcaaatcatatttctacctttgctgtatctctcatctctctagtcctttctgttcttactatcaatatactagctcagagtttcttaactccttgctttgtctatagaaatagtccctaaccaatt

SEQ ID NO: 80701 - DNA, 1029 bp, Homo sapiens
caacaaatcactatggtatccttgaatctttccagcttcccacactttttgtttttgttagtccttactgttctctgtagtgagcaatgaaacctctaaaatgcaaaagctttatgtgttgtttgggggaacagcaagaaagtagagaagaatcgggaaagatctggcttactcttgagccggtgttgggaagagaggaacctgtaaagatggggaaaaagtcacctgagggttgggatgtgtgacgaggcagcaaatggtacgtggggagatggcctgggatggagaagagatctgtgtgggttcccttgtaatgggaatgcataatgtttttgaagaacttccaaaggagactctggattccttcagccatccatcaactctcccagtggcctgagtcactagaaaggaaaaggagcctacggtcattcctactggctttttacacagacaggtgaatccttgcactgcctgcattattagcctgttgcattttttaaacattaaatacctgttggtgtcatccctgtttgagccagggtctgagagttcactgccaaagcacttaccccatgtgtctgagaagcatcacagcctgagatgtctttggtgtaagcagtcccaggaaggactccacatatatctttcattcatctattgtttgcagtagttcttgggccgtagcaaaatcataggcactttgaggactgattcatctgcagaacactttagaatggactacactgggatgctaaagggagttcatggttatggaaagaagcctgggagaaactgctcctcagccacaaaggcctcctctcctcctcccggatggctttaattgctgccctaggcagtctgaattacccgccaggagaggatttccccttcaaaaaacacagcctccctaaaactgcttttgatttgtaatagaaactacttagtagctaggacagaggctgataactcctattcccagaactcattaaaacaaggaattttaataagtatttttgccctttgcagccc

SEQ ID NO: 80702 - DNA, 1103 bp, Homo sapiens
cccagggcctggcatggtgccagcagacttgggccccagtttcagggcctgtcattagagttcaacctcagaaagtttcttcaatctctctgagcctcaggttcttcaactgtaaaatggggttagtgatacctgcctcacagtgtcgctggaagggttaaaggagcccatgtgagtaggggccttggcccagtgtccagtgatggatgctatggcagtgctgctggtgacgcctcaggttagccactcttgccctttgcaaaagcttccccttggtaggtcttctaattacaccgcaagagtgactcagttggatgttgccacctttagcacttttttaacaactgttcatcaccccatgaatcaggagggtgctctttgccagcacgtggtaatttccttccctttcttccaattcagccatctttcccaagtggctccatgcccaggcctgtgggattctaatggggctcaggcctgctcgttgttcttgaggaccagcctgggaggcaggcagggaagcagatgctgaccaagccagggacatggtgcactgtcaggtgagtccaggggggccacaggagctccaaggacacccagcctagtggtgaggacaggcaggacactgtcacggtgagcataacccagaccaaggtagaggggagaaagaacaggctggacagaggcatgggaggacagccagaggggcaagcaagccagctcacgaaggggctgagtcacactcaatgttctcttgaggcaatgggagcccttaaaaaaaattatgtcttcttgccgggcgcagtggctcacacctgtaatcccagcactttgggaggctgaggcgggcggatcacgaggtcaggagatcgagaccatcctggctaacacggtgaaaccccgtctctactacaaatacaaaaaattagccaggtgtggtggcaggtgcctgtagtcccagctactcaggaggctgaggcaggagaatggcaatgaagccgggaggtggagtttgcaatgaaccgagatcgcaccactgcactccagcctgggcaacagagcaagactgcgtctcaaaaaaaaaaaaaaaaaattatgtcttc

SEQ ID NO: 80703 - DNA, 1080 bp, Homo sapiens
ctgtaatcccaaggcactgtaatcccagcgctttgggaggccaaggcaggaggatcacttgagtccaggagttggagagtggcctgggcaacacagtgagaaccccatctctccaaaaaatgaaagaattatctgagcatggtggtacacccctgtggtcccagctactcaggaggctgaggtgggaggatcacttgagcccaggagatcaaggcttctgtgagctgattgtaccactgcactccagcctgagcaacacaatgagaccctgtctcaaagtaataatgataataacaattgttatatagtataatgaaaaagctttcggatgattaaactcccagatgtctgactaagtggcctctagaagaataatttaccatcaataactaaacaaatctctgcttatcgccgtgaagcaggttacacattcccaaaagagaaacacgccaatgcaaatcaacacctgcaattcagaatgtttgttcttgtgcctttggatttgaggctcacgtttgaaacttgtttattgtctctgactatgcatcttaatgtgtgtagcatgtttctctggattagcagttacctggactataccatgttccaatcttagacattctggcatcttctgcacatctctctgaggaacccctctaagggaaatacacagatgttggatatcctgtagcctgtattttaagtcaggctacatcaaaatacttaatgtattttttaataccagctgttttcacaacatacaatgccaggtaggtagaaacttaattttacttctagagatttgaattatttttagtccacaatctattaaaataatactacattagagtctaactgcagtggtgttagaagcatctgtggggaataccaaactatttgtactgataaactatctgatattaataaaagaatgatttgaatgatagcttttcctttttttttttttgagacagagtctcactctgtcacccatgctaacatacggtgcacaatcttggctcactgcaacctccacctcccagagttgagcgattctcctgtctgagcctcccaaacagctgg

SEQ ID NO: 80704 - DNA, 1041 bp, Homo sapiens
aaccatgaggaattagactaagatattagtctaattgcctgtacatgttttttaaaaaggagggaaaaagcctctcttcctgagagagctatcagagcctcagagcagccgccaaaatccctatacttgttctgggttattgtttcagtgcttttatgtttattcagaggaccatgtttgcaagacagtaaaataaagtcctgttggtcatgtggatccatttggaccatttattgtgatcagaaaggtagaaatggccctggagcaactgccttcagtttgttttggcccagaatctcttatttccttagtgacacttatggttaaagtcaatggaattcatttttggggacacagggggttttaagtaatttcatttatattatgtttatgtttactgccagagtgaatcaacatttttattagcattttataatgcacatggagcttttaagacttgaatttgctgtagacatgtatgacagaaagactcgtttacaggactactggtcttttccaatgcttgctttgagaatatacctaaaagagtggtgtctagctaaatagcttgctttaaaaatctttatgttagaatttgtttgccgggtttttctgaatatgaatgttagtatattttgattaacagtttaacaaatgtccctttatgaatgaaatgctagtcagaataaactgaggtgaccttaaaattacctattgaaggctgggcgccgtggctcatgccagtaatcccagcactttgggaggccgaggtgggtggatcacaaggtcaggagttcgagaccagcctggccaacatagtgaaaccccatctctactaaaaatacaaaaattagctgggtggggtggcatacacctgtagtcccagctgctcgggaggccgaggcgggagaatcgcttgaacctgggaggtggaggttgcagtgagccaagactgtgccattgcactccagcctgggtgacagagtgagactccatctcaaaaaaaaaaaaaaaaaaaaaagcctattgaattacttctaa

SEQ ID NO: 80705 - DNA, 1555 bp, Homo sapiens
gaaattactccattgtttcaccataggtattatgttggctgtctgtttttagtggataccctttatcagattttaaaaagttccctacaataggcagtgtcatagaatagttaagaatccagactttctagccaggttgccaggattcagcccttggtgttgccacttgctggctgtgtgactttggacaaatcacttaacccctctgtagcacagttttctcaactatacaatggtgataataataattcatacttcatactgtagtattaaagattaaatgattttaaagattaatatgtaaaacaggcttaaatgagttaatatttatataacacttaaaaactgtgcctggtatatagtaagtgctgtgtattagccatttttacagtactgtcataaatccttgttttctaagagattttgttttattttgttttgaaattatgaacaggtattgaattcttatttctttacctgaggtttgacacacttactggattttgttagcacattaatatttgttgaacttaatagagtctcagatttacgctacaactagcatttaatttctatggccttttaaaggttggcgtatttggtggtagtttccatttaatacttatttctagattgccttctattagcttttttgatggtgctgaccttaccttcctaaccacctgaacatataagcatattgcaattattaaagaatctgttttctaatgccagggaaatgtgttcttacgcttagtgcaacttcttagtgggagtagattattttgtgtatattttggtattttactaacagaccaactgtccattcataatggtgagactaagtgaatagaagtcagtttaaagttaccaggtgaataagcagtttttgaaaaatgtatcaagataataaattttgtttctgggttctcttttgaaaattcactattgttgaaaagtctgtgtaggaacaaactttatagacttacttgtatacagctaggactgaatttatgggctgcctttctaacttgctaaaaagctgaagattgacagctgctttcatagtgctttatctagcttggcttttaactccaagagaactgtgttcacaaattgatgctctgttcctttggggttggtatagaagcattaaattgtactaaaatattcatatgtgagtgcatttagctgaaagcaattgatgttttgttcccaagaggacagagagaaatgctgtatggacctgtactccagaaaaaaccctaagcatgcttcttaaaggtaattacatggcctggattatcaaagcccatacagtgaagtttaaaacgacaaagaagaagttgtagaatttataaactgtggtttgtatatataaattatttggttgtacaatagttaaaaacttaattgccaaaaaactaggagttttaattatatctttggtttgtcttctcagctaatttttactagactgattgctctaaacatttattccagaggtccaatatcagtgaagttctttatccattatcattttattatataaagt

SEQ ID NO: 80706 - DNA, 1045 bp, Homo sapiens
gtctcaaatcctcttaaaatcttagcacattcatacctgttctttatgacctattgtgttttcaagatattcctcctttagcatgcacagtagctacattcttcctaagttgttgcagctcatagttttgagttactgattgtattgtttttggagaaggaagctttgttcatattccttttagaggtgtagtgtaccttcttagtgtggatgcctgttcgagtttcttccttctaggtgtggtagtacctgtcctgcttttaaagacatccagggttatacagatatctgctgatatgtttcttcaccgttatggttcattttttcctatacttaatagagttagaagacaactggtcaatagttatttcttgccttgtctgtgaagtaaattccaagcatcaaaggagtgctagttttgttgccttttgctgttgcttttaagaaatagattgtatgtttcaggaaatgctctatgtacagtgaagtgtgatgagaaagtgaaagtgttttctgtccgtggaacatcctttgatgctgcagcaacaagtggcggtagtgccagttcagaaaagggtgagtgttcatttggagtttttttgttttgtttcttacttttttaattcatagactgtattataataagagatgacctctgcctacatttctaatgaatagtatttgaaagttcaatttaaatgatattcccaagcttatacaaaaataataaatatgtataacttacatctttttcacattatctttggtactaggatagttgctttggtagatcaagggagtgggagacagaggatctattaagattaagcttttttactcttgtcactgtttcctattatatttgggtgattcagtataacagaagaatgtaataggaaacgtgtggagggtgtcacactttaacatatatagtgtcttatttgaacctcatagaaagaaagttattctatattcagactcagagaattgaatgatttctggagtcatacagctaatgtggcaaaggctggaatctagtctcctt

SEQ ID NO: 80707 - DNA, 1024 bp, Homo sapiens
acaagcaaaaacaatgtcaaaaatgaggctgatgctgggcacagtgtcatgtgcctgtagtcacagctactcatgtggctgaggcaggaggatcacttgagtccaggagaccagcctgagcaacatagcaagcaagacccagtctcaaacaaatacccacccccacaagaaaaaaaaaaaaacaactattgaggttgaaaaagagaaggaccaaaatgtgttcattggacttagccataatgaagtttttggtgactttggaaagattggattcagtgttgtgaaggtgaaagccagtttgcatgagtaactgaaaaaatggaaggtgaggtaataagagttggtgtctgtggaaattattttcaagaaatttagctttgaaagggtgcagagagggtgataacctctttaaatcctgcccacaagaagtatactatcttataaaggccagtcaactttatatgggtatgtggctggcatgagaaagaaaacttcatattttgctatttgcaaccaagtctaaacagagtatagagaacttctctaaaagcatgatggtgtgtctgttttagtgatgtaacagtttatgtactgtttagttacccttatacatgtttagttgattacattatcaatgaggaaacagttgctttttagtttttgataattttaagaaaagttttcatttagttactattcattgagtgccaactgtgtgccagagaggtagataccaagttcacagtggagaacaagacagacctagtccctgcccttgtgatgcaaacagattaaggaagaaacacattattttaagtgtggtcattgttacagaacatagagggtgtttgggagaggtttaatcttgttagaggactggaaaacactgaaaggatatctgtgaaattatgtttgcacactgaggtgccttaaactattgttactgagtgataaagtaatagagcggaggattttctttctttctttctttcttttttttttttgagacagagtctcactgttg

SEQ ID NO: 80708 - DNA, 1045 bp, Homo sapiens
tctcccacctcagcttcccgagaagctgggatcacaggtgcgcatcatcacgcctggctaattttttttttttttttttttttttttttgtagagacggggtttccccatgttacccaggctggtctcgaactcttgtcctcaagtgatccacctgcctcggcctcccaaagtcctggaattacaggcctgagctaccgcacctggccttagacatcttttttcttgtgcgtattccttgtttaataaaaagttctgaccctcccctcccctaaagagttcaaacccatgtctttcaggttagtgtcctgtcttcccctcaggacatgttttctcccggttggggatctagacataaacaagtgaaaatcatgaatttggggaaattccaggaacctgagccagaagaatgctgctctatgcagcagttggaaaacagttttgtggacagattacaagtctggcctaagtgaaattataattgtggtgggggatggaatttaggactcagtaattttgtagagctaacagaaaaaaatggaatgattaagtaatttttactatccacatcgttggctaatgtgtatagacattacttccagatattcattgtggtttgccaaagactttgaccttgacttatttttaaaatttgaagtcaagctaagtagaatagctgttttttttgtttgtttgtttgtttgttttgagacggagtctcgctctgtcgcccaggctggagtgcagtggcgcgatctcagctcactgcaagctccgcctcccgggttcacgccattctcctgcctcagcctcctgagtagctgggactacaggtacccgccaccacgccccgctaatttttttgtatttttagtagagacgggggtttcactgtgttagccggtatggtctcgatctcctgacctcatgatccgcccgccttggcctcccaaagtgctgggattacaggcgtgagccaccgcgcccagcctagaatagctgttttaaagtcattaagaatgttggagagatttggatttctagca

SEQ ID NO: 80709 - DNA, 1326 bp, Homo sapiens
agctttgttattccatattcaaaacacaaagcctgatttctgttccacaatccattaaatattaaagtttgttgggaatactgccacagggactctgaatttcccagaattatgcagtctttcaatatgtattaaattttgtgtaaaaacttatagccataaactgtctatctctgggaatccctttccttcctcaattgcatagagctatccaaattaatagttaagtcttctgagaaaatcgtattctaaagtgaatctagctaaataactcccactttccacctatggcctcttttattgaattttttactatgcaattgggtatctcatattaaaagttcagtaagtataaaatacaacacttgtcattgttacaggtaatttaatttatggggaaatccctactgtattacaaaagatgtttaaagatgacttgggaacccgtaaaactgatatttattaatgtaactaaccaagcgtagatgtgacacctcactagggaccactgtaataaggcttcagagttgaatcctttccctggaaacccacatagaaaacgatgcacccctttgggtgggtagcaactatggaagagaaaagcttgtaatgttttgtacagtgatacagagagatgcaggaatcttaacacacaataaccacttttatctaggtaacttcccaatattcaaaaaagacagacacaatcatataaataacaaaaagaggaatttgatttttgattcatggatgatgaggaaagagataactaattagatgttgagataactaatgtagacgtttccattcatagcgttaaaacgctgcaatctgtcaaaagcaaaaattcagagctaattaaccattaatgaaattctttattcaataacctgttatttcctttttaaaaaaaatgagaaaacccaaatattctggataaatcaaaagtttttgacagtgagatttattcgaagttttagccccctatctaatggccagccagaaggtaaaaggagaaatctgtatttctgttgggaaggaatggtctaagttaaagaaaggaagcctcaaagaacccagacctgattattaaagccatttctgggcacttgagaggtaaagctggtcctcattaactctgcatatctcttcccttatctctaagtttgcagcagcatttcctatatcccaaagaaggggaatgttccctttaatatttgtgccagcatcaccttgacattcaggaagtaaaatataaatgcagctccattttcccacctcccattttctttcagtaattgccagcaagccttccatcatctgcaa

SEQ ID NO: 80710 - DNA, 1054 bp, Homo sapiens
cccgacttcagccttccaaatagctgggactacaggcgcgcaccactgtgcttgcctggttgctaatttttttctcattgtggagtccaaaaacatctttttgtaatttatataggggttaatgtctgaatatgttaaaggacaaactggattgtggttaaaatatatgtcatatattttatactacagatagattgatacatatagatcaatcaccttatttacctaaattgtgtcatggtttatttgaagtggatatctccattttatactcagatatcaaaataagtttaatttatgaatcttcaaagaatttaaccctcttttatttaacttttttctcttttatccccctctcagggaaatgccttggttcccaagactatcttgagctggctaacagatttcctcagcaggcctgggaagaagctcgacagtttttcttgaaaaaagagaaaaaataaatgttttggttgattctgtatttgagtacccttgttaatattttaaattgtccaaacaaacattctaattgttccttaagaactcattttcccatgtttatactcttcccacactgtagatatggcatgtactttacactatttataatgactgtagatacttgaatgttctacttgctaattttgcaagttgagtttatttcatttatgcagagtatcttggagtttggtaatttccatcttatgataatatatactttgcatttgtgatatgggtgaaaggagacataaaattagcaagtctgttttgttcttgtaataaagtaacttattctgttttcattgttgacttttcatgttaaggaaatacgaatctgaaagaaaaatgttaactccagctcttgaagtatcttaaataaagacttaattaaagtttacctgctctaaatttaactttttaaggtctacggtaaagatatttgcaacacttttgcattctgactacataatatgtttgggggctatttgaaatcaacttagggcgttgtattcattggtctgcccgaactctcctagcagataatcctctc

SEQ ID NO: 80711 - DNA, 1074 bp, Homo sapiens
ttactacaatacagtaatgctctctcaagaccaactgaaaagggttgagatacttttacaccaaatgattctaggcaactttttgaattctcatgtctgcttaaaataattttaattctcacgccttcacttactaatgtcagctggtgcttcttcctcttgtcaatttatttaaaccagcagtgtcttttctaattgctgatttcagtctactctaggccagaaagcccacttttattagacttgcttctgaaatgtgacttggtagattgagttggagcttggaagactttcttgtaagtaactggtgtggattttgtggaaaaactgggcactcggtgaaggcaagaatgtctctgatttgttcagtattccattcccagtgcctaacaccatgcttggctagagtagatgctcagcaaatatttgatgaatggactcatctctctgctgaaaggcccgcttgcttcttttcacgttcttgactgaattccatgtggtcacagttggaggaaaggtccctctgggtgagggaatcaggctgttttacatttatacaacgtgatagactctccatgggccctcctagccactccttggaattttatggagtgaatttgacagttgtcattttacaaatgtgaaatctgcaaactctctccaggagaatttgcatttttaatccagattcgtgatcactcactatcccacctccactttcctttttttttttttttaatttaaattttgggtaacaccaagtattaatattacaaatatatttgacataatagcatttctttcaaaaatataagaccagttttgcaaggcactcaaaacctgtcaaggctgctccagaaggcatccaaataaatggccatcctaagacagtactaatttagagtcatgtgttccaacagttcactcctgagaatctagtcccatcaccaacccttcctctctttcaagttcttacatctgataatttgagacaaacccttggcacagccagcacataaccaagaactggttatttgataccaagccaagaagagtataggtttttgaaaaaaa

SEQ ID NO: 80712 - DNA, 1048 bp, Homo sapiens
ctgacttggcaattaattctggctaaaaaggaaatatagtttccttgaaaattggtttaatttttatattcaaacttacatgccccttgacctgctcttatcagtgaaggttaaacagagggcactgggtcacagcatgctggacgtgactaattaaataaaggctgagctgagaaggtgtcactgcttgatttaaaggagcaaagtccttctgaagtctctttggggcttgaaaaacatttttttgttttggggctgtgaaacagacaaaaggcactcttaaaatttagcagtaattttgtttcaggaatgctcgctaaaatggctctgtttcacccactgttaagtgaagtgaattcattgaaacttccaaggtgcaacgtatccaacctggttcaagcccactaagacctcaaatcaagagatgagtttaaaactctgccttttcccacaggccagcagtggtgcttcattccagtgtgggctgcgagtatattctgtgggcttcgcctctcccctttgccctcctgtcgctctgtctgtttgacatgtttattaaatagaagctgcaggctgcacagacagactcagactctcttcttgagtcgcccaccgccgacagccctttgcctgtctggagaaaggatcccagaagtcccatagctgagggatttcatggttttagggagaattttttgttttgtttttttacattcttttgggagccttcggtttatagagctacttatttgaataataactagttgttatttacattttttgtttaaacataattagaaatatatgtttaactctgtgtacaagaaaatattttctccttcagaaaaaaaagtgttggaatttagctaaatggtagatttacaggtgaattttaggttctttatacttttccagattttctccagtaagaatatttgtatatgagaaaaattaagttattaaaaatagaataaataactgtgctttaggtagataatgtcttgatccacgtggtacaggcatttggtctactactgtcccttttcag

SEQ ID NO: 80713 - DNA, 1032 bp, Homo sapiens
acccaggatactaaacaaagtgaggttatgtaggctataaagtgtgggaagggtggttggcagcctcagcactggctgcagagtgctcagttgacactgctgcagcagcctggtcttccaggagaagaaaaagccacagtgcagttggtggggagggctgcatttattccttgaagtttcttgttaccatactatacaactcagatggtttgtttttaacggtctgcttgtcttgtttcatttaacctatacaaattgctaacatccattaagtagtttttctcaaagaactgaatgtttctttgtcaggtcatacagcatatttgacaataatcgccaggatcccacagggctgacagctgctcttcaggcaaccgacctggctggagttcttcatatgctctactgtgtcctcttccatggcaccatcttggaccccagcactgccagtcccaaggagaattacactcaaaataccatccaagtggccattcagagtttacgtttcttcaacagctttgcagctcttcatctgcctgcttttcaggtaccaagtattggtttatatcgatgttaaccaatcaagagttagtattttagtgtagataggatgtcagattcttctcctgaattggggcataaggaataaactacaataaatggaattataatatatattataatttattaaactactattttctgggaactgtattagatgctctataacatctagcattctcatttattctcatagctaccatgcaaagtattattatacccattttacagatagagaagctgacagttaagtaatgtgcccaaggttacatgtttgtgaaccaggactagtaaccatgactctcccaccccaaagcctatgttcatcctttgccatgctgctatttataaatcttttgtctggaattctttatatcaggacattatcatctcatcaacttttaaatattaaggaaagtaatggtttcttacgtaaatagaaccaaaattagataaattgattgatatgac

SEQ ID NO: 80714 - DNA, 2117 bp, Homo sapiens
ggaaatatgagtttggtcctagacatgcctaagggttgttatatatgatataagattatcatatacatatacatatcatatacatatacatatatgtgtaaactttggtctacttggataatcttcaggcatgcctaggaccaaacttatatttccactaagaaaaactgcttatattctcaaacttggaaactatactgtctaccactcaaaattttatatttattatatatttatacatctgataaattacatgtttacacatctgatacattttatttaaaatttttaattactatataatttattttattatgtatatgaaatataattccttctgtgtacacatacaactggattttaaacagtgatttactcttgatggtttttaagaattcttaatctatttatctccattataatttccttctctaacctcaattgcttagcaaacttctgttagtaggacttactacaaaaacagattattctagaaagaaggtccaggtggtttcctggcttaatttacctaggaaattatttgcagtatcagtgtaagctacttctctgaaagagctgagaaaaatgaccccttattgttgttcttcctctcatccttcagtctcccaacatttcctgaacaccaccagaccacaggaatacagggagttttttctacctcctcagattcatttacttctgatatttacagattgttttctcctgcttatttcttcatgaaaattatatttctaagctataaatgacagtgacaagcattttgttgcatgcattaaatagagtttctgctataggtcatagccatgtctaagaggaaaggtagtgtggtttttgctttattggagtaattcacataatgtctattttggctaccagaagctagccagaaccagagtcaaggaaggctttgtcctcctagcccttttgtgacaggaatgaaagaggaagaggagctagagagggcttcaaaaattgcctcttgtgatggcagagcctgagataattaaggggactaattgatatctccaggctttgagtaaacactgcagtctgctggtggcccagcctttgtgatggtgattaccgctagtctgcctttgcactactctcctattgtgcccttaatcttctaatttttacctaggttttcttttcttttcttttctctttttttttttttttttgagacggagtctcgctctgtcgcccaggctggagtgcagtggcgccatctcggctcactgtaacctctgcttcctgggttcaagttattctcctgcctcagcctcccgaatagctgggattacaggcgcttgccaccatgcctggctaatttttgtatttttagtagagatggagtttcaccatgttggccaggctggtctcaaactcctgacctcagatgatccacctacctcagcctcccaaagtgttaggattataggcctgagccaccttactcagccaaatttttacctaggttttccgaaacacgatttggatgtcagaatttgtgctgttagtctttgtttcaacttgggatagaaaagcaatagctgatgacttgtaccaggcttagttttgaacaatgaacttgcatttctttaagtaaaaattgaaatcgtgatcctctgatgaaaggattgattttatgtcagaattgcttcagaattttaatattgttaacaaatgattcttaatcacttcagcaaaattcaatagtctgtaatgggactctcagaaatgcctatttctggccaggtgtggtggctcaggtaatcccagcactttgggaggccaaggcaggtggatcacctgaggtcagaagttcaagacgagactggccaacatggtgaaaccccatctctactaaaaatacaaaaattagctgagagtggtggcaggcacctgtaatcccagctgtttgggaggctgaggcaggagaattgcttgaacccaggaggcggaggttgcagcgagccgagatggcaccactgcactccagcctgggtaacagtgtgagactccatctcaaaaaaaatgaaatgcctatttctttggcctttactgttaacagttttctattcttggtccta

SEQ ID NO: 80715 - DNA, 1063 bp, Homo sapiens
gggtttcaccatgttgaccagcatgatctctgtctcctgatctcgtgatccacccacctcggcctcccaaagtgctgggattacaggcgtgagccactgtgcccggcccatttttcttttttatattattccttctgtttctataaaccaagaaaccacatcttgttacagttttatgaaattagaatctttagggtctggacaaaagcctgaggatgagcaaagcatcagtctgctcccttgactatgtatgtgttaggtactcaaatgttagatgagcaagtgtttaaataaatgacatcaattttattatctcagaagtcttttttatttcctgttgactctcaactgtatttttaaaagttccagttactggataaaaaaacttctagataaatgaaagattgctaaatatgacatgcatacatagtgttttatttgaaatacttcatgatgaaaaacagtacaaggttgttggagaaaaaggaatatgaaaatttgtgatgaatgaagaaccctgacattacctagaagtgtattactcatattctttgtgtagtgtgtaaaagaaaaagaaagttgtattttagaggatttattgagttaattttagaatatggccagttgaacacataaattacattctctctgtcgagaggccttactaatattctagtaaatagatgaaagttataaaccctcaaagaaagagcacaggaaggaaaggaaagcaagtattttttttttcaatctggaaagcacatgattgaaagacagttgcccaaactagcaaaacgccagaagaaaatttgtgccacagaatcctagcagggctcaagaattagagttactggctatctcagaaaatgagggtgcacgggggctgcaaagaggggaattggttgaaagtctaaataaaaggcagtttaggtgccctgggtgccttagaacctacctactatatgtatagccaagtgactgccattgcccaaccctcagagaagacaccagtttcaatcaaagttaaatagaacatggggacaaccaggcacagccatacaaa

SEQ ID NO: 80716 - DNA, 1077 bp, Homo sapiens
cccacacatatgtaggactgacttttcatatatgcagcttccacagagctgactgcaggacttgagaatatgcagatttgggtatacacagggagcactgaaccaatcgcctgtgtatactgagggacaactgtacaaacaatggaatattaatcaaccttaaaaaagaagggaattctgtcatatgctataatgtataaaccttgatgatgctataagtgaaataagccaattacaaaaacagaaatactgcatgattctacttaaatgacatatctaaaagaatcagcctcatagaaacaaagtagaatggtggttgccagggaccaaggggagggggaagcagagttgtttaataggtttagcgtttcagtcaagtgagatgaaaaagttctagagacccattttacaacaatgtgcatatagttaacaatattgtaatatgcacctaaaaattgataaagaaaatttatatgtctttttacaaaaaaaaaaaaaaaaaagaccagtgaaagtactactgagtgctgtgaaaatagatggataagcttttaatgttgggcaagatctaaacagtccaatatactgatgagcaaattgagatgtggaaaaggatcacagagctacctagtggcagaaccatgacctggaccctggtcttctgagtccctgaccaggacttcccttcctataagctaaattgatgtgtcctcattttcttaagttgacaaatgaaacaaagcaacaattttgtgactttaattttataagtttaatagtattactttggtaagatatactgaaaaagcacttaattaaaagatttataatttcttgatgtttcattgcattttaaaaggcattaaatattttattagcagtcttatttttaattcatagtgacctgttccttatgaaatatttaatgaatatgctgataaattgtgtgtatgtatttttgggagccaaggagattgttaattgaaaagtgatgtactaaccttaaataattgatatgatactgttgaatcagagaggctgctggtgagctcttcagaaggtgacaagaaagccctg

SEQ ID NO: 80717 - DNA, 1303 bp, Homo sapiens
agattttttcctacagagttgtttgagctcttatatattctggttgttaatcccttgtcagatagatagtttgtaaatattttctcccattctgtgggttgtctctttgcttggtggattgtttcctttgctgtgcagaagctttttaacttgatgtgatcccacttgtccatttttgctttggttgcctgtgcttgccatctaccaattttaagcttcatggaggacagcaaccatatgttttatgctcactccttttgacctatatttcctagtactgaaacaattagcagtgagtagcattcagcaaatatttataaaataatatttgtagaatagttgaaccatcagtatgtttcagactacagatatcatttggttatagtttaatgcctgggaaattgggctaacttctgtttgtatttctgtctagaatgtggcagatcagattgcatttcaagctgctggtggattaacagcccttgaacacatccttcaagcagtagtcccagccacaaatgtgaacacagttttaagaattcctcctaagtaagtatagtttcttaatctattttttacgtttcatttgtgagtcatttctgccctatggtttccatatggagaaccacaagaaaattgtatgtgtattcagggttgaataccaaaatcttacactccccattagggagaaaaacagaggtgctcaacgtcacttacgaaactcaaattgagcctaaaaagccttataaaggaaatctctttggtctgtgatgtgctctaatctgaaatcaagaagaattgatgaactcttgagcaattctaactgcttccaaaaattgagcaaaataaataatagtaacagaaagctaacttactgtgttacatgtgaaaaaagaggtgagtaagtacattagcaaaagtctgagctgtgaaattgcaagaagttcctaccatacaggaagagcagtcagaggcgaagagtgccatagtctagcatcccagccaaattgctgggaactgagttgcacgttggtctttaacggtaaattgctttcctgttctcttaagtccccctttagtccctggccacctggggtatagcagcaatgttgtttcagaagtattgtgttcctgggttgtaacgtctgcagtttctgggtattttgtggagactcttatttacagagtttaaataagaggttttaataaaagttcatttaggcagggcgcaatggctcacatctatgatcccagcactttgggaggtcaaggcaggaggatcacttgaggccagaagttcaag

SEQ ID NO: 80718 - DNA, 1050 bp, Homo sapiens
attctacctacatactgtgattaaccacccttccctaaaacagtgctaagaaaagttactcaaagctggtaaaatagcacacttccctcaagtatcggttttattaaaacatttcagggaacaaaaacattaaaaaaaaatttttataatcctaagtttttgtccatacctgtgcaaaagatactaaaaatatctcttgaagaaaggtagtatataaaatactttatggtaaaataatttttaaaggaaatttcaaccaggcatgtcaattattacaataggtaagaaatatcatgaaaatgatatttgagaaccagaagtaggaccattaattatttaatcttaattttaagtaaataaattataagctcttttggcccaacatgtgacattgagtgatgttatttctcagtaagcagatgtgcttattaaggtttctgcttatagcagcctgatagtattccatcatgctaactctctggctatattctactctaagctcaccttagtgattgattgcctcacgcagtgagtaaatacttactgtttttaaccacatttatgtaagtctgggttctcggaaataatgacactaaaaaaaaatgagagaaattgcccgtgtatggatcctgatgctagctgtcttcagttcagctcagttcttttaaattagtagactccatgacagataccctgtgtattaactaatgcaggtagaaaactcatttctccttaatataatacattattttctagttatgataaacatgggccatatggaaaaaattgagaagtcttgaaggtatttctttctagtgctaggtgtatatcccccagcactgcatccctgggaattcacttttctttgatactacaaagtcgtaaatggatacttggagaactgtactctagaataaattaaatcatttagcttattttctattccattcccaggaactatgaagaaacaggattgttgaaagtgatgatgtgggttggatttggatcatcattgggaaggtatttagggaagcagttaagagcagtgtt

SEQ ID NO: 80719 - DNA, 1044 bp, Homo sapiens
tagagctccaaaaggagaagagagaagtatttgaagtgataatcatttagaactttccaaaacttacaaatcaatttacagattcgagaagcccaatgatgcccaagcagggtaaataaaaagaaatccatgttcacaaacgtcacagtgaaactatagaaagtaaaattataaaccaatctcattcataaatgtggattcagaattcctaaacaaaattttagcaaactgaatcatgcaatatctaataaggataatatatcacaacaaagttggatttattcaagatatttaagtttgctttaacattggaaaattatgatctatcatattaacagaagaaaaggaaaaatatcatctcaaaagacacaacgaaagcgtttggtaagttcagcatcaattaatgataaagattcatagtaaaccaggaatagaatggaatttccttaatctgacaaattgaatctaccaaaaaaattatagcaaaataatatttactggtgaaatgttgaaaattttccctttgaaattgtgtacaacaaaaatatttactgtcaagacgtctgcttaaaatgggggttctaactagtggaaaaataaataaataaaagttgtaagatttgagagaaaaagtgaaatagtcattgttagcaaatgatatgttatatatagaaaatttaaaataatttacagataaatagcacaaataagttagattaacaagggtactagacaatgggcagtatataaaaatcaattatatttatatattatcaaaatattaaatatctaggagtaaatctataatgtttatggattggaaaactcactatagtatatttttcttttctacccagtttatttgtagattcagtgaaatctcatttaaaagtccaacactttgttctttggaaattctaaaacactatttagaatttctaaagaacaatatgtaggcgcagattctaaaatatggaatttcaaagatccaatgaaacagtatgcaaaaccctgttgaaaaagaacaatatgaccagcactttg

SEQ ID NO: 80720 - DNA, 1044 bp, Homo sapiens
tggtgcttccttgctgaagtttccccctcttccgcctagtgaacagtgatcttgtttccctcttcgggttcttaacggcactctaaatctctgattggcttggtattatagatgatattatagttttgtgaatatattttacctttcctactctacttgtgtgatatcttggtagggtttatgtccatgtagccttagcattggcacaattgatatgcaatgaagtgaagtcagtgatgtaaaatccttaagtaaaacagtttcttcaacgttttccataacaattgtagaaaccagtgtattacggagattacttttagtttcatcaaatgtcttaaactcactgtagtctatagcaatcctatattatatttaaatgatcatcctcattattattattttatttatttatcttgcaggagcatctttccttgaagaagtacattattgacattgtggttgaaagtacagctccagcagaagctttgaaagatggagaagagcggcaaaaaaataaaaaaaaagccaaaaagataaaagcccggatgaacttcaggtaccttaaatacccttaaaagcaaaagaaaaacttttagtgatgtatcttttaatgtaaatccaaggaagacaaaaaaagtttaaagttgtttgcttcatgaaagccttggaaataacactgatgagcctaatttatagccactttccttgattgagaaagaaaactgcatatcgatctaaagcccttgctttcacctgttaagagctcttcttataattggatgccaaagctctgccaaacttgtgcctcctccagcatacaatagtatgtttaagtatgtgtaaaccaagcctatttttctttccaactattgatttttaaatgaagtatcaaagaaaatcaatagcaatcaacaaatagaagtctactggctgtagtgtcaaatcccatgactaggcttaatcaatttggttgcctgtcacaacaagaaaaagttcaagaaatatcttaaaatggaaagtgagttgtcagacctgtagtttatc

SEQ ID NO: 80721 - DNA, 1024 bp, Homo sapiens
tgctgggattacaggcatgagccaccacactcacttctatttggaggttgtgggaataccttgtcacttagtatggttgtaaatatttttcatgggttttactttaatatctaattgctctttatgtttgtatatggagattcagagagttcaaaattctgctaccactgccaccatcttctcagaattttcttttataatctcaatctgttgcccagactggaatgcagtggtgcaatcacggctcactgttgcctcaacttcccagactcaggtgatcctcccacctcagcctcccatggagctgggaccgcaggtgcatgcccatgatgtcctgctaatattttgtgaagatggggtttttccatgttgcccaggttgatctcgaactcctgggctcgacgatccacccgcctctgcctcccaaagtgctgggattacagatatgagcccctgcaccaaacctttaataaggattttaatgactattacttcttcatagaaatataccataatttactaaaccactccctcagtgttgaaaaagcttctttttacatgctttccatcttcagaaaccatgtcaaaactttcttcctgtataacactgtaattattttaatggacagatagatgatttttactcttttatcatcaaaaggtgatctctctcttagaagaagcaaaagcataatgcaaaccattaaaaggtaatatgtaaagacttgaaatgtatttatagaaaactggacagaagaaacatcctaagtcacagaaaacaaaatgcagacaaatggtcaagcatactaataccaatatttcagttaactaatccagagatttagaaacaaaacaggaacaccacatactggcaaaccacttgcggggacataaattaattcccattttgattgttcaatttgagaatagttatcaaaagtcttaaaaatatgtataatctgtggcccaggtttttcatttctgtgatttgatcataaaggaataattgactatttgtttaaat

SEQ ID NO: 80722 - DNA, 1033 bp, Homo sapiens
aatataaatttcgcatgtttttatttcagtgagaaaaggttagaaggaaataataggattcacgcacttcggaagaaaaatgtgcaatattatctaatttttgtagccatagcagtcttatgtttagccattatggtttgagatttgattggtgtgttcattttgtgtactgtttcagtttgaaggaattaaattttcttaaagttctaacttaattcatgttgttattcttggttatagcctcttcttcctgaaaacaagtgtataatatagcatatgaattatgtgatataaaaaggttattttctactactctcatggaagtttcatttttttaatcagtagagggtatctatagtaaacatacttgttctacttaaagttattacttgtcatctatgatgtctttatattatatacaccttgtctgtgacctttcttctttgacatgtaagattttatttatattacctctgacctaataaaattgtacctttgaccttatgaacttaacatctcagataacttactcttgatctttgacacattttgttttaagcctgttaaacatagtaggtagctgctgagtaagaaggctttattgttttgtgtttttattgtaatttgactgggacatttttctactgtttcttgagacttaacaaaatggactgtgtttgaagtttatgtttgatttgtttcctcattcatcttagaattcaaatgattaaaaaagtgatttttaaaagtcaaaaatgggtagtagttttaaatacattctaaaatttaactttttacatgcattgctaaataaatcaatgaagtattatttttagtacttgatatctttgtggtcctgttttcacactatctaaagaagctgatagtatcttttctagaagttgcttgaagtagcaagcatgtagcaagcatgtagaatgaatttaaaaggttttttttccattttaaatcaatatatttctatgtttgtgagattcattagctttaaaagcatgtacattgtacaagctct

SEQ ID NO: 80723 - DNA, 1054 bp, Homo sapiens
accagcatccaggggcgtgaactgtcagatgaagaagtggtaaactttatttttgttcatttacaattgtttattgagtacccaatatgtgctgttttattataaagaattccgtgtttgtatttatttctatgattatttaaaactatatttagcacttaatagctactacaatatagtgtacaaatgtgtcattattttagtgtatatattaatttaacaagaaagatagaaaaaagaatttaatgctgttatttacataatttcagtataaggaaatgttatggtatattgatattttaataatgcaggaaaataatcactcaatgacatgccacattcttggaaaacagttaaccacataaatttcacttaagaggataattttggatcagtataccatttagaagcttttggaaattcattatttcttcacacataattattgtcaacatggaatttagatttgtataaatatgtatatgaatatttttcatttaactctttttgaaacttggatgatatagctaatctatgaatttattgtcctatttattatagtaaatttttaaaactactcaagaataagaaattcatatttgttaagcaactcaagctgtccaggaaaagttattgtgggttctttgagggcaggtacctttatgtaggtgcatgtgtatattgaacttttttttttttttaggtatggcattcattagtcaagagcataaatctcaagtatatagctgatgaatttttacatatgtataaactgatataaaaccacccagatcataatatagatcatttgttgtaccctttgggctcctcttatgccccctcctacttatgtccccaaaagttaactactgtgaatttttgtatcattatttagtgttgcctgttcttaaatttcatacaaatgttatcatacagtatgtattcttttctgcctgacttcatacattcatgcttaagcttgtgaaagtgatccctattgtttatgtgaagctgtagttattcttcttagctttatgtcagtgccctcctgtgt

SEQ ID NO: 80724 - DNA, 1079 bp, Homo sapiens
ttataggtttggtcatgatgggccttgcctgctgtatggataagcatatgctttacccgtaggttaacatttcccatggtgggttccaggaagtggttctcaaaaatgtgttattggcaaataatttgtaagttgatgcctactaaaagctaggtgcattgagtcatatatcacagtgacgtactggaggttctgtaaagttctacattaaaaacctgtttagttttagcttgctgttttccaaatttatttgaccatggaacctgttctgtaaaacacttgttaatatctcctggagcacactttaataaacattactgttcatgtgggtgatattaaagggctttgtgtaaagctttgtcttcagtgtgtaagttgtcatagaaacgacattctattatttttgaagttttaatggaaatattatttttccaatttctcaccataatttgaataatttttgaaattcttgcactttgacttcatctacagcatgatgaaagtattcgaaggcacatggaacagattgaacaaagaaaagaaaaagctgctgagctaagcagtgggcgacatgcaaatactgattatgcccccaaactgaccccttatgaaagaaagaagcagtgttctctctgcaatgtcctggtaggttgttatatcaatattgtaatgatatagtttactactaaagtttatgaaaccatggaaatatattcttgcagtcttttaaaactcacgctaaggcaggcgagatgtggcagctcacacctgtaatttcagcactttaggagactgaggtgggcggatcacttcaggccaagagtgcaaaaccagcctttccaacatggtgaaaccctgtctctactaaaaatacaaaaaattagctgggcatggtggtgcatgtctgtaatcccaggtactcgggaggctgaggcatgagaatcctttgaacccaggaggtggaggttgcagtgagccaagatcatgccactgcactccatcctgggtgacaaagcaagactctgtttcaaaaaataaaactcatgctaaggcatctgctgagtgacctggatttcttt

SEQ ID NO: 80725 - DNA, 2055 bp, Homo sapiens
agaaatgaaatgcaatatgtggtcatttgtgactgacttcttagcatattttagaggttcattcatgtcttagtttgtctcagtactttgttcttttttgtgatcaaatagtatagtccactgaatgaatgaatataccacattttatttattcatcagttgatggacatttaggttgtttccactgtgctattatgaatagcactgctttaagtatttgcataacagtttttgtgtgggcacattttttatttctcctggatatatatctaggagtggaattgttgggttatatgaactctatgtttaaccatttgagcaactgtcagactgctttccaaagtggttgcatcattttacattctcattaggtttatatttttttgcatttctataggtttttgccttatatattttgaagttctgttaggtctataaacatttaggactgttttgtcgtcttgatgaattgacccttttattattataaattggtcttctttattcctggtgatattttttgcactgaaatctgtgtctgatgttaatacttcagctttcttttaattagcatagaccttttacttgtaatctgtttttttccttctaggaaacatatagctcagtcttattttttatccagtttgataatctctgcctattacatgttaacatttacatgtaatataattattgacatagtttgtttaaatccaccattttactatttgttttctctgacttgtgttcttccttccatttttaattttttaataatttcattttatcacctttgatggcttattaaccacatgtttgttttgttatttcagtgtttgatttagggtttctagtatacatctttagcttctcatgaggatttattaattaatgaatctcatgtatatttttattatttgcagtgcattttttaaagttaggtgtatgtatgttcagaaagcatcatcaccagtacagcatatattctttccatgttcccattatagtatactatttcggttttatatttaatgagtatattcaatctataattgttttgaattttggcactcaaatgaaattcacactacctgttatttatataatttcacagtttctcatacgtagctgtctggtaaataaggcaagtcattgattattgttccattttatggaataccaagtaggttcttggtttttagaagcttctaaggcacacagctagtaagtggatgagcctgtatggaaccccagcttttatgattctagatcaatacaattttatgtatactgttgagttcatgttagaacataaaaaatgattactttccagtcaagtgatcatttttctttttgtttatgtgtttttaactttatagtccatggcagaagtccttgctaaaaaagaagagctagcagatcgtctagaaaaggccaatgaagaagccattgctagtgctattgctgaagaagaacagttaactagagaaattgaagctgaagaaaacaatgatattaacattgaaactgacaacgacagtgatttttctgtgagcttttagactttttaacataactattcaaaatttatatttagaaacaaaattatctgggccagaaagacttggagtccatctagtcctatttagaattatttatttaaaaatcatgttcagtaatcataactattattctcagggtgatttagacttacacaataaacaatagcaaatcttttgttagcactttaccattactattttcatgtatgatacagttgacaagttagaagttgttattgttattttaccagtcaagaaattgagtctgggccggttgtggtgccacatgcctgtaatcccagcactttgggaggccaaggcggtaggattggtcaaggataggagttcgagaccagcctgggcaacatagcaaaaccccgtctctattaaaaaaaagttaaaaaattgagtctgacataaagtaagaactccacattactgagattataatttatagaaagtgaagatgaagctaaggtattttacttttgta

SEQ ID NO: 80726 - DNA, 1021 bp, Homo sapiens
taacagcaattattatttgaatcctgataacttggagataaaattatgtagctaaaaatggaatgttgacttactttagcgcaatctctagagaattaaaaaaagcgttttccaaaatattttatgctgaagaggtcttttaggggaaatatataggatgtttgtgaaaactggtctctttcacacttggacttgttgatatgtaagggatggtgcagatattagtccacagcagtgttggtgctctttaggccactttttcaaaccttagattatatttattatttaaataatttgtttattttttagagttacaaaactcagtgtttttagatctaaaaaagacttgtgacttccttttctctgtttaaccacccaccacatcccaaattagttttaagtgttttctttctgagaaaaatgtgagaaataatgactttgttaaatatatattttgacttatctaataatctaataagtaccatcttttccatacataggcttcattccagcgctccaatagtcatgacaaagtaaggagaatagttgcagaggagggtcgtacagcaagaaacctaatagcttggagtgttccactagaaagcaaagatgatgatggtatgtatttaaaaaattagtttcatttttgttgtaaataaggagggtgtatttagtcctaaagagatagactgaaaactgtttgcaattagacttctagggctgattagtatgttaaataagaaatacttttttgttgcttttatacacacatggttttataaaagccttattgttagttttgctttttcagataatagtgaaatttgaaattgggtttattgtgttattatgaccagcagattaggggttgttaaagtgataagagatttagtgatatgtttaggctttgtctccccacccaaatctcaccttgaattataatccccataatccccacgtgtcaagggagagaccaagtggaggtaattggatcatgggggtggtttcccccatgctgttc

SEQ ID NO: 80727 - DNA, 1053 bp, Homo sapiens
taatgtatggcatagtgaattttctgacctgatatacacacacacacgcacacacacacacacactcagtgtctctctctgtctcacaggatgttctgtgattgtgtaagggaattatctgaagtagagctgaaaagtaggccatctatttatacttgttcatttggcctggaagcaatagtgatacccttggttagaacaatgctaaatgatagatgccagtgtaagttagatagaactgaccaatacttaatgggagatgtgcttaagctaaaggacgaagttttctggtgttacattgattggaaagtatgagaatgagtagagaagtgacttttgcaaatctacaggacactgaatggggtttggacagtgatcatagacaaatgagtttcagtgaaagaccttaatgagtcaggtaagtagatgacacatggatattcagggtaaggtcagaggaatgaaggaatatgggtacggatgtttacattaaagacgtaaaaagtgacaagttctggagaggaaaatttgggttagactctcatcacagagaattagagtagaagaatatagtctttgtttttctggtagttggatattagttggcgagttgattcatttttgtaccgaaacctgtttcctgtcactcacagatttagcacctattgtcattccctctttcttaccataacacaatttgtctctgtactggatcatccccatcagtatgaaagtatgatatactatcactcatcttaaaaatccattctgtttatttatttctttgttctcctttatgacgaaactcaaagtatcttaatactcagtatccccatttttctcatcattctgttttgaaccgttttcagtcaggattttgaccctactataccactaaataggcaataagttaccaatttattagagtttattataaattattacttttatcacttcctggacaatgcaaggctgtcagtcttatggctgttgctttaaaggtaatgagttgatttttccctctcctctgtactcaagatttttctctttgtt

SEQ ID NO: 80728 - DNA, 1062 bp, Homo sapiens
actgaacaggattccagcttatcattctgtaatattaggaaaattgtactagttacatggtttctcaggtaagctgcatgactagtaatcttgtcttcatgctacccaaagtattaagggcgttagtagtgggaatttaagagaaaggttcttttctgaattattcagaaagctgaaaaacattggaaaaaagatacaagaatttcattttatgggcagatagtggtatgaatggattttgaagaacttgtataaagtagaaagttttatggagacagatacatagacatttagtaaacagtacttgtaaccttttcaagattatggggaaagttgttgaaattatttagatattttaaacctaagagaaagaagtttctttgggagcaagtctcagaagtacctagcctctttggtaactattgtaaacactttcttagattatgtactgtaagatttgaacataaaaactttcactgaaggctgatctttatacttttagttgaaacattaagtatttgaacaggcctctgtaaaatctccatacagcactaggtggcacactgtgactttggatgaaaatacacatattttgttgaagactcctgtgagaaaagaacctaggttaaaaaaaaatactgtttgaaatagacatctattttatgaagtatctcagaaccatgtattgcatttcaaaccctgatactgatattaaaatgcttaaaactattttatttacattactactgacatttttataagaactggactactaaaaatcattagaatttatgggtttttactaaaaggaatccattcagcatgtattacaaaaagcatctgtgctttaaaatgaaaaatgattttcaatcagatcttgtagtaagatgagtagttataatgtttttgcttatcaagtattggaattaagaataaaatcaaagtcttgagctagtggtttttctttgaatgtgtgtctgtgtatatgtactaaatacaaaagagctaacttggtaaaatttatagtggagctgaaatgtttatggaagtaaagaatgttag

SEQ ID NO: 80729 - DNA, 1057 bp, Homo sapiens
ttagtttatgaacattcttaaggaaagttacacaggattttctatactgagttcagactcattagtgagtcagttcagtgaaagcagcatttaaaaactgaaatagaatacagaaggaaatattagagtacatctgttactttacaaaatttttaattcagttaaacgtgtatgaactgggtaagatataaaacatgtatgtgtttatgggttgtagtaagaaagtttggaacccctctgggttaggatgtccatgtaattaatactgtttcttttccattttatttttattttttggagagcactgaggtcttgttcagcatggaatatttaaagcatgctatattataccccaacaggtaatataaaggagcagttttttttgttgttgtttaatgtaagtgtggggatgagatttgtatctttttatgaataattatggttttctggtaatgttataactaagcgtatatatattttttattgtaggagtcatactccatgggtttatgtgataaatgatcttggcatagaagagaatttaaagaatgatggtaagtgatatcttaaagactagccttagtttttttgcctttctcttttcttcctttcttttatcttttttaatgtaatagttgtttcattcaagataccctatggaacacattgtcataaagcacagtgataaagtgagcagctatgaatgtactattcaaccttagagcccaggaaccctgctgctcctcaggcttgcctctaacacttatggtacctaggttaggaatacaagtggaagccagcttttaaaatttcttaatattaaatagttacaaatcaatggatgctaacagcctgacctggcctcctacccagggtctagccaagtcttaaaggaacctactctccctgggctaggtagggtagaagttgggctagagtaggtcttgaatctggtatggggaccgatgtgaaattccccagagagccagggaaaacaggtttctgtctcccacactttacttttctaactcaagatttttcaggcaattccaaacat

SEQ ID NO: 80730 - DNA, 1028 bp, Homo sapiens
tttcttttttaatttgaagctttattgagctatacttcacataccataaaatccacccatttaaaatgtacacttcaatgattttaatgtattcacagagttgtggatccattaccacaatcaagtttagaacattttcagtatcccaatatgaaaccccataagcattagcagccgttttccattctggcctccctccctacttccccatcttatctccagctacagccaccctctcatctactttctgtctttatggatttgcctattcaggacatttcacataaatggaattatacagtacgaagccttttgtgtctggcttcttccatttaacgtaatgttttcaagattcatccattttgtagcacatatcagcccttcattcctttttatggatgaataatattccatcatatggatataccacattttatttattcatttatcagttcatgaacatcttgcactgtttctactttttggctattgctgctgtgaatattcctctagaagtttttgtgtggacttgtgttttcatttctcttgagtataaacctaggaatagaattgctgggttatatagtgacttatcttttactttttgaggaactgccagattgttaccaaaccagctgtaccggtttacatttccactgcagtgtgtcaggattccagtttctccacatcttctccaacagttgttttgtctttttgacggtagacatcttggtgggtacgaagttatgtctcattgtggctttgatatgtatttccctaatgactagtgatttcaacatgttttcataggcttgttagccattcgtatacattttttggagaaatgagaacataacccctttaacctgacatagtggtgctatttaacctgacgtgggttcttattcttcctcttggttgctctctgttggctttttattcatataatcaagtgaattgctccccagaaatcctttgtggtaatctgtgaaatatacatctcctacttacgtttattattacattgt

SEQ ID NO: 80731 - DNA, 1052 bp, Homo sapiens
tttgtgagcagcttcctgttgctggtggactgcatctcttattctagttgtgacaagttattttccatgaaaatagctattcattaatagtcattttaccgaacagatactaattccttatatgaattatagtttgtcttagtttatggattaatttcatcattaacttttcatcttcataaataatctggtagaaggatggatgggctaggagtaatacttattttatgaatggagaaacgggggctcaaaaggttattacttgccttagatcaccagctggtgagtggtaaatctggggttaagttttctgacctaaggttggtagtctgaccactgtcccactctggcctatactggtgctctttcccttctgttatttctgttaactatgacttttcctcaaagtttgttggttgcagatgatttatgccacttgaagaatgatatccactaaagaattaatatttttaatcaatcaaagagtcaagttttaatgtgatttggaaggttgtctgtgggagaagtaatctgatggctttgaaggcagactgttttgagtttgaatctcagccccaacccttgtttttggcaaattaatttttctgagcctttcttatctgtaaagtaggaataatatccacctcataattttgttgatagtaataaattaggtgtctgtaaagtattgagaactgttcctagcccatggtaagccctcaacaaatgctcttttccttctttctccacactcccttgagctgcattaaaaatatactctatgtgtctttggtccatttgggtctggtatagcaaaatacctcagactgagtggcttataaacaacagaaattcatttcttgcagttttggaggctgggaagtcctagatcaagatgtctgatgattcagtgtttggtgatagcctgctttctggttaatagatggcaccctctagctgtctccttacatggtgcaagggtgaaggggtctctctctggcctcttataagggaatttatcccattcattaaggttctgctttcataataca

SEQ ID NO: 80732 - DNA, 1062 bp, Homo sapiens
gccggcaaggccgaggagctgcactacccgctgggcgagcgccgcagcgactacgaccgcgaggcgctgctgggcgtccaggtgaggcggccaggccggtgctgggagggccgggcctcgcaccgcggctgccgcgggctttgtcccgggacaaaggggggcggccgggcgaggcctggcaggggcggcctgacaatgggggccgggcggcgcggcactcgctctctgggggtcctggggcctggaaagcctgaggagatagcacggcccaagagctggatcccttctacccctcagatcatggagggtgtgtagggggtaggggccttgaagtgcaggtgcgggtcaccccgaaaccctttggcaagggggtcttctagtagccctgtttttctccaccattttgccccactgatagtaatgcttggccctcctgtgtgtcgcttccccctaaaggaagatgtggatgaatatgttaaactcggccacgaagagcagcaaaaaagactgcaggcgatcataaagaaaatcgacttggactcagatggctttctcactgaaagtaaggactgccctacacgactaacaatggagacaaacacaaatatgttaagcagcggtgtctgctgaatgtatagattgctagtgtcccaagttggaagtcctgtgagaaggagaaaaggacatggagaataggctttatacttacaaatctttagacactgagaaccaagtaaaactcggtgctttctccagttatatataaacatcattgaccctgtactctatgtggaagtcacaccttgagacaccctctttctcacgtgacttttgttagtgtcaacaatatgatttattttagagaaatatgccccaaaactttaaggcagtaaatgatttatcgctcttttgatatatgcttcatttaaattttaggaatttgcttctttttttaagcaagtagaaaaagacctgttgcctgtgaattacgtttattataacattataccaaaatgttagagctggtaggggccttgggatcatcttgtccacatcactttg

SEQ ID NO: 80733 - DNA, 1184 bp, Homo sapiens
gttatagtatggaagctccggccaggcatggtggctcacgcctgtaatcccagcagtttgggaggccgaggcaggtggatcacgaggtcaggagttagagaccagcctggccaacatggtgaaaccccgtctctactaaaaatacaaaaaattagccgggtgtggtggcacatgcctgtagttccaactactcaggaggctgaggcaggagaatcgtttgaaccgggaggcagaggttgcagtgagctgagatcgcaccactgcacactccagcatgggtgaaagagcgagactccatctcaaaaaaaaataattaaaagcttcatgagctcttctaaacagcctttcccacttcctaccccatttctattaatacaactaggccaattctcagtatttgcaaacatcaaagattttgccttttcagagaaggtttggaaatccttactcttaagtatcagaattaacgtcacatgcgttgtgttctgggaaattctcataggtgaactcagttcatggattcagatgtcttttaagcattatgctatgcaagaagcaaaacaacagtttgttgaatatgataaaaacagtgatgatactgtgacttgggatgaatataacattcagatgtatgatcgtgtgattgactttgatgagaacactgctctggatgatgcagaagaggagtcctttaggaaggtgagttcatgtgcacaagctgtttcttttgatcatgtcagttcactttaccttcctgcatgaatgagcacattgagggcctgaggtcataagctggattgtcttgttctctaggaaatcacctgttccacttcagcagtcattttgatggtttcctttctggccagatttaggactcttattctaaattacctacatgatccttctatctgtttttctcggctgcatcatttaattgtcctcatttccagagttgctttttaaatgtgttttgaatgagtatctcaatattttaatatcattgaataatcagttttatctttattaagaaggccattatggcccattcccatttttaaacacatagttttatatactcacttaaaaaaactgcggtttccacatctgtggattcaaacaactgagaatcgtaagtatccaaaaaagtaagtattaaaaaaaaaaaaactgtgtctctattcaac

SEQ ID NO: 80734 - DNA, 2462 bp, Homo sapiens
gtgtttgaaattaagagtttgcttttatataagcagctgttttttcagaattgttgcttaaagacaccaaacaatgccatttttaaattggtcaccagttttacttattctgattgtcactttaaaattacacatggcattactttgtgaaaacatgtaagaaactttgtatagaaacatgatatacagtaaaacattacccacctcacatctgggaaaactagatatcggaacaaatagcagttaacaaaattactagtttgtgaaaacatccaatgattttaaaactgggttgtttagactcgtgtcacttttgaaaatgactatatatttgttcttatgtcaggacttttcagttaagtagttctgttttattgggctttctttagtaaactttaaattcacttcctttattctagggatataccaaacttcttattggatacatgtgatattcttgtgtatgtatatttgtgtttttttatattaagctgcaaatgaagatccagaatggatacttgttgagaaagacagattcgtgaatgattatgacaaagataacgatggcaggcttgatccccaagagctgttaccttgggtagtacctaataatcagggcattgcacaagaggaggtaagtgttacagaacaactgtttctctccaccccctccccccgaatttggtgctgttgataggaaaagaagttcaaaatcttaagccaaagaaagaagtaatggagttatttgggattgatgcattactatgttttgaatttacgaactgtttagattgtcagggagacgaggaagttaagattgtgtcatgtattaatttgagagtacagtgaatagaataatagtttgtatttacctacagggactcaaaacaggttataataatttttcattgccttgatatatcctggattggatttgagtggagagagacagaacccagcagaaatgaagaaaggagataatgggaaaagcagtagacggacctggttacaacgtgtaacatttttagatacttaaacaataatgagtacttgtacacctggatgattttgacaagtcaaatcacattaaattgtgaacatcttgctgaaaatacttattacacttgacacttttttgttttattttgaaggcgcttcatctaattgatgaaatggatttgaatggtgacaaaaagctctctgaagaagagattctggaaaacccggacttgtttctcaccagtgaagccacagattatggcagacagctccatgatgactatttctatcatgatgagctttaatctctgagcctgtctcagtagagtactggctccttttataatttgttaccagctttacttttgtgataaaatattgatgttgtattttacactcttaagtcttaaccacagtcagaattatcttaatgtagattataattttggtcttttaggaaaaaaaaacaaaaatctgatatttatttcaaaatgtattgaagcaacaaaatattaatattgtgccatatgacaacaaagtctttcctaaatactccatctgtttagtactgtattgtggaatatttgagttctatttccatacttgaaaacatggaggattttagagatgcctgaacaatattatttaagtagtatgtgaccgagctataaatttttgtttttgttctaagtagatttaatttgggaactgacaggacaatgtttttaggtttagcattttgtttaaaaacctttaaagaaacctttagaaggacttagacctcacatattaatgttgagaagttctgcttaattttaaaatggtttctataaagggttttattgtatgaaatagaactttatatttttgcatatgtatagatagtaattatatttaatgtataactatagcattatggtgagtggaatttgacattgtccaaacctttttcatttttgagtgattaaaaatgaaatgtcctttgtatatgtttgtttgcttttctttaactttcagataaatattgaatttagcataggttttgtggtattgtacattatcttgcctcatccattcctttatgtggatagttcccaaaactgtcaaattattcttgctgcattttcttattttttttttaaataagagaatcatgttataatataattgaatgtgcacctgacacattttaataattggtgttgtagcaaatgtggttttgctctttggggctataaataatcttgagtaacgcaggttggaattaccaatagagctggtcagttatcaacagtagagctcagtatcaattttactgaaattaaaatcatacttgataagcatgataatcaattttaacctaattcagcaggtcaacttatttaactttggtggaggtgggatagggaaaagtgaagggaggaattaatttttttctagttctgatgtacagagattgtttt

SEQ ID NO: 80735 - DNA, 1105 bp, Homo sapiens
tcaaattccactcaccataatgctatagttatacattaaatataattactatctatacatatgcaaaaatataaagttctatttcatacaataaaaccctttatagaaaccattttaaaattaagcagaacttctcaacattaatatgtgaggtctaagtccttctaaaggtttctttaaaggtttttaaacaaaatgctaaacctaaaaacattgtcctgtcagttcccaaattaaatctacttagaacaaaaacaaaaatttatagctcggtcacatactacttaaataatattgttcaggcatctctaaaatcctccatgttttcaagtatggaaatagaactcaaatattccacaatacagtactaaacagatggagtatttaggaaagactttgttgtcatatggcacaatattaatattttgttgcttcaatacattttgaaataaatatcagatttttgtttttttttcctaaaagaccaaaattataatctacattaagataattctgactgtggttaagacttaagagtgtaaaatacaacatcaatattttatcacaaaagtaaagctggtaacaaattataaaaggagccagtactctactgagacaggctcagagattaaagctcatcatgatagaaatagtcatcatggagctgtctgccataatctgtggcttcactggtgagaaacaagtccgggttttccagaatctcttcttcagagagctttttgtcaccattcaaatccatttcatcaattagatgaagcgccttcaaaataaaacaaaaaagtgtcaagtgtaataagtattttcagcaagatgttcacaatttaatgtgatttgacttgtcaaaatcatccaggtgtacaagtactcattattgtttaagtatctaaaaatgttacacgttgtaaccaggtccgtctactgcttttcccattatctcctttcttcatttctgctgggttctgtctctctccactcaaatccaatccaggatatatcaaggcaatgaaaaattattataacctgttttgagtccctgtaggtaaatacaaactattattctattcactgtactctcaaattaata

SEQ ID NO: 80736 - DNA, 1054 bp, Homo sapiens
ctgtactccagcaggtcccatcctggatgcctcctcccactgggagccccgcctcccccatgggacctgccctagcagatggcggggcctcatctgaatgcccgtcagggccacccacgctggtgctgctgctgctccccaactgtgctctgagctgcctgagggctggagtggagcctcatatatgcaagtccagagtattggcctctgggcatctctgggcgccccacctcactttccagaggggaaactgaggttcagagaaggcagctgagagggcgctggaggaggggtggagtcccacaggcttgggtcacaacttctgtgcccagatctctggaggtcacctgtcccccagccgagggagtagctgagtcccagtaaaggcagagcagaagggagaggccttcccaggggaagggaggagggtgggtgctgtgtctggtgggtggggcaccagcagggacaagagtgttggtaggattcgggcatcaagtgaaggacagaggcccagagaaggctatgtgcacaagtcctgggctctgaagcccgatggcctgggttcaaatgcagctgtaacctggggcaagtactggaccttttagtgcctctgtttcctcatctgttaagaaagggaacagtaacagcagccacctcggagggcagctgtgaggactgaacacatgaagcgccaagaagggctggcgaatgggggaacacagcgtttactttgacggcacatatctggaatgagagcgccgcgcccatgattgtgcagccagggggagtgtgtgtgtccccagggtgaggaggtgtgtgtggggagtaccgcccaggcctccgccctggtcggacggggcagccaggcccacatacctgcctcggtggccgagtccttgcactgcctggctttgttctgactctgaggaaacagaggggaagcagcgctaagcccctgccccaggagccagggcccaccccagcagacctgaagtgactgtcaagcttccccggccaccctggggggaacattcaggagccaactatgggcaga

SEQ ID NO: 80737 - DNA, 1072 bp, Homo sapiens
gcagaagctggaggaccgtggctgctctgctctaggcctggtgcttgcaggagccgaggcgcagtccttcctctgctccccacatctccagggtgtcctggttccccttactgagcccaacctgctgggtgggtcctccccagcagagagggcccccagccagggtccctgagctctgtggatggatgcagcccagcacacggctctcccgggcagccctggcccccttgcctgctgtgtttcctgcctgacgctcctgtccggggctgtgggggttgattttcttgttgtttttgcccaagtgactcgagccccctgctgcctcctcgcctccttgaggtagaagggcgagctctggacccactctcctagccccaaggcctggctgtgctgcattctcgctgtgaccttgggcaagtcactctcctctgagtttcctcatctatccaatgggaaaagtggggtctaccttagaggacaggtgtgagttaagtcccttgcacagggccttgcacacagaaggtgttcaggaaacaggaagctgtcagccagggccgtgacccctcaggatcaaagaccccgagccgcgcacaatggcctgtgaggaggccggtgggtgggggccgctggtcagagttcaggcccacagaggggcagagtgggcatcgggctgcggcctctgctctttcctgccccagctctacgaggaagtgcggctgacgctggaaggctgcagcatagacgccgacatcgacagtttcatccaggccaagagcacgggcacagagccccccggtgaggtccggcttgcggacagcgcagcctctaggtgcattgagcccctgggaaggcccggccctgagcctcaagtgccaggaccgggctggggtagctcacagctcccttcagggcagagaagccctagcaggggttgtggggagttgggtcccaggcctgctgcctcctctcaggcaaagctaagggcatgatggcactcagaggaagaggtggggatggggattgaggtgaggagctcccacggcccccactccccgcctgtttggttccactg

SEQ ID NO: 80738 - DNA, 1068 bp, Homo sapiens
acttttaaaaatgtttagctgaagatcctgttagccaggggtttctcagctccggctgcgtatcagaatcaccaggagaatgtttcaaatatttatgcgcaagctcagtttgcagggatttggtttcagtttgtctgaggtgggacccaaccatcagcatttgaaaatctgctcaggtgactccgttgagcagctgggttgagaaccactgcacgtgcaatatgtaaactctccaagtagatctcgaagtggagtgggtgccccctttctcctcccactggcccctaagagggctctactgagcacagtttgataatcccgtgagggtgctgagggcagcgagcccagttgctggtgcgaccttgtcctgggcttgtgttggctcaaaagccgggatggagaaataggcagacacccaggtagtcagaccaaggcaagcaggtgacccttatgctgaggtttcttggcctaggaaaggctgtgagagtggttggaattaggtgttggacaccagtggcgcgtgcttccagtttggccaaacgtgagttgctgctttttgtcatcattgcgaaggattcactgacataaccacagctgtcccagagggtgtgctgagcgagggggattatgccaagcgcaaagctgctgttgagtgtagccaagattcagaggttgtgggtcttttccttaaaagtggtatcccttgctggtaagtaatacctaatcattgtttaatttgaaccttaggagattttgcatgggggcatattgcacccatcttactgatgctgaaacaggcccagagaaattgtgacttgcctaagaccacccaagaaagcgtgagcctggattcaggccctgatgttgtgattcagagaccatgcttgtcctcctgctccttgctgtctttgagtggccctcggtcaggaagaggctgcagttatttatacacccaattacacgctaactccctctttatctggcaccgtctctgctgggaaggccatccatccatgcagttggttcccagcagctgaggtggtgcccagtgatgggagaacggagaaa

SEQ ID NO: 80739 - DNA, 1036 bp, Homo sapiens
gactctgtctcaaaaaaaaaaaaaaaaaaagtcacgtttaaacattttcatggatacatctggttgctctccagaaagcttatatcaatttctattcccaccagcagtgaatgaaatgtgcatttctttacacccttgttgacacttttggtgtgatcagccttcatcttttcttccattctgagagatgaaaatatgtgtttatttgactgttagctagggccaggatgcttttaaaggtgtttcagccatttgtatcttctgaattttgcttctgtcctctgcccggtttgattggttattgggtttttttctttcggatcttaacagagtttacttaggaaacttttctgtgaagcttaatgtctgtagctattgtgaatgcaatggttttcctaacttatttccgagttggtggttgttggtgtgtaacagcacctgctttttgggtgcatccttgcagttcttgaaaataacttgtgtgttgcacgtggctttctattgcagtgcctgtgagatctgtgaggtctcctgagggtgtaacacagtgacgtggcagaaacctcgtatctactgaatggtgctgctgcattgctatttgtggggaagttgagtcatacataaatcctgctcccctgagtttatccaatgaagaaagtaagacagatgtagaaattatagggtagaaaagagacttgctgatctttttttttttttccccgagacagagtcttgccctgtcatccaggctggagttcagtggcacgatcttagcttactgcaacctccgcctcctgggttcaagcagttctgcctcagcctcccacatagctgggattacaggcgcgcaccaccacgcctggctaatttttgtatttttagtagagacggggttttaccctgttggtcaggctagtctcgaactcctgacctcgtgatccgcccgcctccgcctcccaaagtgctgggactacaggcgtgagccaccgtgcccggcctacttgctgatctttgttatcccaccatctggcaggta

SEQ ID NO: 80740 - DNA, 1033 bp, Homo sapiens
tctagtgtcttacggaacatcctgtggaggtgagagctgacttgtaggtggaagcagctctttggaggtttgatttggaaggtgaactgagaagaaggtggtgatgcaagccggccgtgctgaagccaggatgaattggtgtgactgggcttcagttaggctggcatagcagttgagagagcttagcagtgggcagcagggcactgttgggggcggtggtgagcggtggattctggctgtttggaggcaggacagtggtggaattcgatcattgattggacgtgggacagagaagggagaagagaagactcatctaggatgagtcccaggtttctggctcagtcaactggggaaacaaagtcacagagctagggagtagttagagaacacatctgggggtgtgactcatggtcagttttgggctcgtcagttttgagatgcccaaatatcatgcagatctgtcccacctgaaaatggagaagacacgggaaaggagaggagtaaaaactaactccttttcacaaagtggaagttaccagaatgtgatttcagaggccccgggggatttatcatgtgactactgacccatcccacctcttgcccctgcctgttgcacagtgggcaagaatgtttgtgacctttcactaccaccacctcccccgagcatggtccccccagttttcaatatgaaccatcctgtgggtaccctgtcacaggctggccctgaggtgagcaatatttggactgtgatgttggttgttctccactctttctacaggacagaacagggcctctagagtgggaaatggctttgggaaatatgccaagcagtagccttgttcttcaacttgcccaagaggataattctccacacccttcctgtactcagtcctcagtttgcctggtgagagagcagcctcctcccgtgtgctctgccagctggacccagactggccatattaccagtgagaccaaaaagatggaggtggggaggtagctctgaggtctgggaaaccattccagctcctgccag

SEQ ID NO: 80741 - DNA, 1824 bp, Homo sapiens
ccacatgtgtctacatttaaattaatttaaataaaattaaaagtgcaactcagttgcagtaactatatttcaggtgctcagtagtcacatgaggccacatgacagtgcatatgtggtatgtctccatcgctgcagaaagttctttcggacagcactcgctagactagtagtggggatgccaaataagagagacttgattccctgctggctttacgaagagttcctgggagggaagctgaagcttaggacttagttccttaaaaaataatgtactcataagaaattccttctatcactgttgttactgcctttttgatgatttgaagtcattgaactttgaaacagctcttttaccaacaaagaaatacacacctgccatgagagggttttcagccttttttccccattgttgttttctttcaacagctgctgggcatgctgtgtgcttgcatcgtgttgtgcagaaggagtagagatcctgcttacgagctcctcatcactggcggaacctatgcatagttgacaactcaagcctgagctttttggtcttgttctgatttggaaggtgaattgagcaggtctgctgctgttggcctctggagttcatttagttaaagcacatgtacactggtgttggacagagcagcttggcttttcatgtgcccacctacttacctactacctgcgactttctttttccttgttctagctgactcttcatgcccctaagattttaagtacgatggtgaacgttctaatttcagaaccaattgcgagtcatgtagtgtggtagaattaaaggaggacacgagcctgcttctgttacctccaagtggtaacaggactgatgccgaaatgtcaccaggtcctttcagtcttcacagtggagaactcttggccaaaggtttttgcggggaggaggaggaaaccagctttctggttaaggttaacaccagatggtgcccctcattggtgtccttttaaaaaatatttactgtagtccaataagatagcagctgtacaaaatgactaaaatagattgtaggatcatatggcgtatatcttggttcatcttcaaaatcagagactgagctttgaaactagtggtttttaatcaaagttggctttataggaggagtataatgtatgcactactgttttaaaagaattagtgtgagtgtgtttttgtatgaatgagcccattcatggtaagtcttaagcttgttggaaataatgtacccatgtagactagcaaaatagtatgtagatgtgatctcagttgtaaatagaaaaatctaattcaataaactctgtatcagcccccaacatattatttttcattatttgggggatatttcagttccagagcagcagtatcatgttttctttgttggtgctgtctatagttcatcatggtttacgtgtgttttcgttatagctgttgccagattctaaagggcttgatattcaaaaaaccacagatgctttcagtccagtatatcctagaaatatagagctctactttgtgcaatgcactggggatacagtggcgatactgtccttgtcttcaaggagttcggagtcctagtataggagacatacataggagaagataattttcacactgcagtggttgtagtaatagaatgggagtccaaaggggagttccggagaggtcaggggtgacttcctggaggagatgcccaagcttggaggctggataggctttgttgaaagatggtacacaagagtgtgaaacaaaattgtgtgtgcagggagcttaaaatacaaggctggggaaagaagttggagaagcaggaaagc

SEQ ID NO: 80742 - DNA, 1221 bp, Homo sapiens
tttttaaaaaagaaaaatgtagataacttttatttgttaaataaaaccaatgtaattgctagtttaaatgtaagttgcttggattgcttgctctttgtatatttgaacagaagctagtgtatttaatgggaaaggccttttaaaatggcaaaaggatgattgtttactttgctgatattcagacagccctgaaatgattcattaaaaagcctacctctttatttgccatggtctttgcccttctaagcatttactctgtagctctgcatagcagtaatctgatgatcagcagggatttatttcatattttgattatttatgcaaacacattcatttagctaaaaataatgaaatatgaggaaggtctcttttcccaaatagaattctgaactgtgcattcttaatgattttatgttcagtaataaagccacatgtactagcatgcagcaaaaaagttttggaactgtatggtacttgtggtcatgaaatatgcaacatgtatatagaagactgataaaaataatcactttagctatgtccctcatctagttaagcggcttagcctgccagacatttctttattaaatatttttcaataggggctaataaatattttaactagtctcttaatttaaatatgactgccatatgtgttttatacttaagtcaccctgacttaagtaaaagctgataaagcttgattttttcacttcagcaaggctgcttaagtttagggattcagagctttcacagactcaaaacctagtggttttgaaaattttaaaaacttgggttttaaggggagaaaatttatctgaattaataattttccctaattgtttttaagagtacctgtaaacattctaagcttctggtattcaaaatctgatagattggtgccctgggtgtggaaaacctgaacaaaggcagaaataactgaaagatcagtgagcttttgtgcttatacactgatcctaatatagacatttagagctggagaggatggttggagagtctccagtcttggccctctttgtttagccacaaaattttgggtgagcaaggatagtgtggcatgaccatcacacagagtgtcaactctagagacccctgcctttgtttgtactctgcctccaattacaagtataagatttgcagaagattaaattcctaaattttgtcaggaaacctgacagttaattgacactttagctggataaa

SEQ ID NO: 80743 - DNA, 1481 bp, Homo sapiens
gttgcccaggctggagtgcagtggcgcgatcttggctcactgcaacctccacctcccgggttcaagtgattctcctgcctcagcctttgtatttttagtagagacggggtttcaccatgttggtcaggctggtcttgaactcttgacctcaggtgactcgcccatctcggcctcccaaagtgctgggattacaggcgtgagccactgcacccggcctggcaatgtacttttcatatggagattctggagccactagccatgtctggctgtttacattaaaatttaaaatgcagttttctagtcacactagccacaatttaagtgctcagtagagcttcatgtggctagtggctgctatattggatcatgcagactttccattatagaaagttgtatcggacatcactggtctagagtagcttattttaaagctctgtagtacatggaacttcaggtatttggtttttgtgagaaataatacttattctcttctcctttagctgcattgttgtggaattcacaactactcagactgggaaaatacagattggttcaaagaaaccaaaaaccagagtgtccctcttagctgctgcagagagactgccagcaattgtaatggcagcctggcccacccttccgacctctatgctgaggtgagtctcttggccacgacttgagtctagcttgattaacctgtttttcaccatgtcttatcaccatctgggacttcttttctgccaccttgcttgtctttaatgtcatatattgttttactgtaaattattataaaatgcatgtctttgttttaattacatgtctgtaaattataccaatcatggaatcttttttccactctttcagtttctgtcattttcctttctgtaagtgggtagtggcctgtgaatctgcagctttaacttttaaagaacacttctaacgaggatgactgtgtttgttacaggggtgtgaggctctagtagtgaagaagctacaagaaatcatgatgcatgtgatctgggccgcactggcatttgcagctattcaggtaagcacagcttgccaaggagttctatcggagtgagttggttctctgttgtcagccctgaatggttttaatccccatcacagtgaatctttgtgtatgtaggtaatgtggaagtgactgaggtactggcctccagtttcccatgttttccatttcttgtctatacacctagacccggaatggtctaaagaaaccagaaatctggatggggagggaccacgtgttgagggaactcctcgtcttactgtctttcttgattagtgagtgacctgttcaaaacataaacgaactgttgtcttagtgtattcttggaagatattttattagaatgtcacaaaatttttaaaaattgtacttctttctttcagtttgggaatacaaagctttattcagtttttttgtatgctagttctccctctagttcttgtttttctgt

SEQ ID NO: 80744 - DNA, 1106 bp, Homo sapiens
ctgatttttttaaacctgccgattacttttgcacatttagccaactctaaacgttgaataaataaaatggaaataatgttggcatttgtcctaaaagtatcttacaggagcttcagagttactttgttttacctcctttaggaaaggaaaatgagtaacttatttgtaaaaggaaggcatccatttataatttaggacatctatcccaagcctcaacttttctcccttttgaatacattgttagcctgccattttgcacacaatcttctctttgaatgcttgaatgtatgtggtatatgtctgaatttttacctgtcacttttctccctcctgccttcatctatatctatatgaagatgaaggcaggaagggagaaaactttacaggaaattcatagatatctggcaacttgcaaacatttcatttaagtattttagtaggagccttgactaatgttacttttactagtatttttgagggactgaattctttgttctgattcaggtggaaaatgaggttgatcgcagcattcagaaagtgtataagacctacaatggaaccaaccctgatgctgctagccgggctattgattatgtacagagacaggtgagctttcttgaggcagatttgtttttgaggaccaatcacgattgggtcaacattaaactaactgctatttctgtgtaaattagccatgtttcttcacatacatggctatcctgatgtgaccaatatttttccccaaccttcacccttgaaaagtttatttcatcacctagccagatgagaaacatcttgaacttttttttatcatctgatttccccttccctgaccccagtctgtactctcccaaagtacttagccaaaggggtgatgacgcaagagagaggtatgtgtcacaggaaaggtgggagtccagattgactccaggggaggtgggaggtctatatatacctttagaaaacaagataagaaaaggcaacagaaaaactgtcaaaaaaaagttgttatggacagtctgatacacacaaaggtagaaagaatagtgtaatagatgtttgcaccccgaccttgcctcagtaatatcaacttttcgtcagtctta

SEQ ID NO: 80745 - DNA, 1369 bp, Homo sapiens
caaatccaagctctgtcatttctaccaaatttccccacttattgagggcaactgtagtgagcaaagatccccctaccaccatactgatccgtattggatgtggaattgagctacagtaagcctttagggatgtgtaggtgtgtgtcatcatcattgttattatttggttatggtttcttggtcctagctgaaccatcaattcgtgaaaagtaggtgaagtgtggataactttttaattttatctagtatagaaatgctcttaacaaggaatcatagaattttcagctttactgaaaaaagtctataacagttacggtaactctcattaaattataccatactaagcaataataggaaatttttaccagcagtgcttagagaccagtactgactttgttttctacagggggcagctggcattttatgctatgtgggagcctatgtcttcatcacttatgatgactatgaccacttctttgaagatgtgtacacgctcatccctgctgtagtgatcatagctgtaggagccctgcttttcatcattgggctaattggctgctgtgccacaatccgggaaagtcgctgtggacttgccacggtaagatgtgttgtgagaacatgcaggagtatttagtctatgctactctccttgaacatgagactccttggctcttatagttggaacagagttaacatttaaacttctagcaattatctctgataactttttttaaatcaagagtgtatttaaagttattttttcatttgtatataattttaaaccatgttttcttacagtttgtcatcatcctgctcttggtttttgtcacagaagttgttgtagtggttttgggatatgtttacagagcaaaggtatgttgtctactgtaattcacataatgccttaaaaggtggtttaagtgtttcaagtaaaatagaacacattcattttatcagagtaaacattttcttttgccttacttgtttaatctgtatttcaaatatctaaagttaattggcaaatatttacatgtcaagactccttacctcatttaatatagcagagtgttatatatgtattgttcttgattataggtatttatagctgcaaatgaataattagctgagaagtttgttcagatttcctcagcacacagattgcctatatgaggggaggcataattttctgatttctgctttagaagaaccaaactcagaattgcgttttccattgtctctttaaaaaatgctttggtcctaaacatagaaaaaggtgttgtgagttgtgatcccaccttccacccctgtcctgaggaacaaggggtcctgccaacttagaacaccaaggcagctggtgccagcactcctt

SEQ ID NO: 80746 - DNA, 1025 bp, Homo sapiens
cttacataagaagtagttgtgtttagtgacgtaaactgttctatcagattaagtcagaggtgaaagcatggttgaattagagaatatacattatggcaagtagaatgctaaacgatttaagatgattttaagacacttgtaatggcataagggtgaagtttggggaagctttcagaaatccactgtgtggaattaccaacgattcttcccaggagagaaaagaggtatatgaaaaataatatgacagtacaggaaactctggatttaatgttaaaaagatatatgcataagatggattcctgcctattttttccctctgcttttaaaacctgctttcttacaaagtctagagtacagcattttttgctcagtcttttacttcttgacttttttcctttctctcaacactccagtcacttctactttactaattgattctttggcaaaaatcactccgaagggagcagttcacacaggcaagcaagaatttgtcaggcactgtgcttttaggtgaataaagtccagatggtgccttgtctttacattgttttgattcttgccagttctagatgggaatcatcatcaatggctactacataccactgcaagaaaatcacttctattctttgcttcagcttcgcccaaaatgtcctgtgggatgctttcgcctttgtatttctaaatctccatgtaggtatacttttggcaacagagctactttatctccccacttgtagcaaatctgtttcatttttaatattgccacattccaatggcaggttacaccgtggttgatgaaaaggaatttaatagttttacagattttaacttttttttttttaattttttgagactgagttttgctcttgttgcccaggctggagtgcagtggcgcaatctcggctcactgcaacctctgccttccaggttcaagcgattctcctgcctcagcgtttctgagtagctgggattacaggcatgtgccaccacgcccggctaattttgtatttttagtagagacgggg

SEQ ID NO: 80747 - DNA, 1274 bp, Homo sapiens
acagcttggatcatcttggatctctgtttttatggaatgatgaggctttaaatataagtgtattcatgctggacccatgaggatttattgaagaaggttagaagtgttttaggtaaatgactaaattttaaaggctttttttttttttttttttttttttttttgagacgaagtcttactctgtcgcccaggctggagtgcagtggtgcgatcttggctgactgcagcctctgtctcccgggttcaagcgatcttcctgcctcagcctcccgagtagctgggactacaggcgtgcgccaccatgcccagctaattttcgtatttttttaacagagacagggtttcaccatattggccaggctggtctcgaactcctgacctcttgatccatctgccttggtctcccaaagtgctaggattacaggcgtgagccaccgcgcccagcaaaggctattgtattaaataggcattagcctattctgtaaactgcacctttgtaccaaggtcagacaggatttttagtttggtaagtcatttaatctgaccaaagagggctcgtctaaaacaagtttaaatcagtacttcctaccattaagtttttattccggtaaattaattgattatttaatcaagtcctatgttatacaaattacctttactttttttttaaaccctattagaaaaactaattggctaatacttattttgctcatatttatcttaggcattacagggactggaacagaaagctttgtccatgcttatagaatttataatcttaaatatctatttaggttgttgtttttcatctgagaggtgatagtataaaactgagacacctgtagagtgggggaagtaccgcaaaaaagtcaaacgccttttaaataaatgcctttagaaatagctttggaacgtggcaccttcactaaccatcattcattcatatgaaatacttcacacatataaattgtagttgaaagccatatgtaacctttaaaacttatcctgcctttaaaaataaaacttatcagccaggtgcggtggctcatgcctgtaatcccagcactttgggacgccaagggtggcagatcaccctcctgactaacacggtgaaaccccgtctctactaaaaatacaaaaaattagccagatgtggtggtgggcacttgtagtcccagctactcgggaggctgaggcaggagcatggcgtgaacccgggaggcggagcttgtagtgagcggcgatcgagccactgcactccagcctgggcgaca

SEQ ID NO: 80748 - DNA, 1050 bp, Homo sapiens
tctggtcaggcagagattagtgtctccaaccttcctaggggagaatgggctaggtagaaagatagcactcagagggctctgaatcatctataagggtggcatagtcataggaggagagtgggtttggtccaccagaacctccctagggagccatctgcgtccaagggcggccagaggccaagaaaaggcgctgaggccttggctcctttaagaggcgtggcctcactgcagcctccgcagaggcgattggctgaagctaccggccgcgtggggcgggactcggttgccagggagcggcgcgggagccctgaggggactgcggcggctgcgcggaggagcgaggcacttgctggggtcggggctgcgcgacggcgcaggggctgcggggagcgccgcgcaggccgtgcagttcctagcgaggaggcgccgccgccattgccgctctctcggtgagcgcagccccgctctccgggccgggccttcgcgggccaccggcgccatgggccagtgcggcatcacctcctccaagaccgtgctggtctttctcaacctcatcttctgggtgagcggggccgggcagagcgaggggccggcggcggggccgggcgaggccgcggcggaggcgcccgtgggggccgggcttgggcctgggcgggcgcgcgggggccgcgcgcgggccctcaggcggctgaggcgaggggagggccgggtgtgaggccgcttcgcgaggtccctgccggaccaagccgggagcctgggcgcggaggacagcgaggggaggccttcagggactccacggcctccagccggcgcctccgcgctcggcccacgcgggctggctccgtgccaggcgccccagtctcccccccccggagtcgccggctggacggagagcgcttattgcagactgtagcaggacgtcgggctcgaaataggatcttcgccagaggctcaggttccgcgctctttgtcggggcctcgcagacgagtggccgtcccgaggcgggcagatccgcggggacgctgcggagccggggcgggggttccact

SEQ ID NO: 80749 - DNA, 1083 bp, Homo sapiens
cttggaccttggcagcttgtccctttctcatccatgcccagggcccctgctctccagtgggagtaggcgaggagtccaggctgggctgcttttttgcagatcccacagtatagcaagaagggcctggttcaaacccgctgcctccctgtgtgatcctgggcaagtcctttccctctccaggcctcaggaactgaccaggtctgcatcacccctgccagggctgccatggagtatccggaaagccacatgtgtaggacttcgggcacatggtagttgatggctgctgtgattaaggctgcctgggccttgctcctggttctctcgaggacacaggacacagaaaagtgtcttcacaggggcagccactaaccctagaaattggctcccaggctctgccacccaagaagcaagctcactgcttatagagcttctttcttcaataggaaccctttctctgcaaatccctagtttgctaggaaccccagaggcacattctttcccgtccacatgcccccactatctctggcaggactatattcacccttcaaggcctcagtctagcccacctcctccccaaccccatcagacttctccctaccccctgccctttgggtgcttcctatgagtatctggccccactctgcccttctgtgccactgggcacttttctgatgctggagagctcccagggcaggcttatgcctctgactcgcccagagcctgccagagcccaccagagcccacccctgggtagctccagctgaagactgtggatggctagagaagggaagaaattcaccctccccaccgcatgtgcgtgtgtgtgcgcgcacacacacaccccccccacccccccccccgacacatatggtccctctcccattttgtggccacagctggccttctctctagctctgccttgtgtggctctgggacctctgcccactctgtcctatccttcatcaggctgttccagatgcttatccagcccctgggacattctcaccccacccttcccactggaacatgccctgactttggggcaggggctggcactaggcaagctgtcactacacaccacag

SEQ ID NO: 80750 - DNA, 1890 bp, Homo sapiens
aaagtggggattccatggaccaaaaacggtgccataagggaagccagaagagttgcagtgcaagatcctgggagagattataccaaagaaatcaagcctttttatcctgatgcttctaagatgatgagggtgagctgtgacagatgctgtgggaggggagttcacatacattccatgtcaaggcatttagctgataaatccatcctcagaaaagcacctttttaaaaagaagtccattttgtatattagaagatgatgatgatgatgaagatgaagaaagccctggcagatacaaagttcctcagtatttaaggagaaggatctcttccatgtccccttgacatgactgtggctattgcccaaacctcagcttgagaacatcatataatactgagagcggaagatttttttaaagagatatggtagtttaaataggtttgtttaaagaactcttgggaaatttcttaacaaattgtaattgtttttataaaccttcctacagagttgtgtaccattcatcatcaccatcatttaatatctgtaagtgcccagaaggtacaaggtgctatacagccgttaaacaccccctccctgcaactgtttaaaattagaatagatttttgcatcaaccactgctagaagctttccccacctaggtgggctgcaagggcctgcattcccaacatcccattacatgtttcccactccagaaagtctctgggtttattccagctttttatcttgacgtgtcccattcacccccatggtttggtttggtttggttttgttttttaaatcaagaaagtttcagggaatcaaaagaggtcggacattttttaacctagcagaagtacagagtcatatattttgctacgaatattgttgtagtacagaaaacccactttgcccgttagtgtgtggatagtatgtgtgtgtccgcactcatgataacttgaatgttgaaccagacatagggttcatttttgaaaggttaaaccacactgtttcaggaacttgctccaaatactacttggttatcccttcctttaccagttagaactaaagagtgtgatgtatgaacacactgggttgggattttctgttgaggatatgcagggcattttggcatgaggcaaatacagaagcaagatttcattctacttggtgatttgaatcatgacagtcctcattccaatctctctttaattctctctggccctgcccacactctgtatttgaaaatcttgtttttgctctttccggagcttcacccctctacttacatattgtaaagttgtataaatctatcattgaaaggtcctctctgccagcagtggtgccaccctttggtttgctgtggtactttgctgtgtactccgtggcatcatgttactgtgtaaataaattcattttaatacacactaaaaaacagacaaatgcttgtccttttggcgactcttccacactgacatgctggggagggtttggttgcagacatggttatgtcttgtccccccagggtaggtgccctgtccataacacaggaaatgatggctttcagcctgtgtgtcttctgcactctgggtcctcatcccctgctgacatggattatatttctctttattccctgtctaatctgaggaaatcaggccccaaagagaaagcaaaggcattctgcttttcccagacctcagaaggctgcaggtttgctgtgtgagatcgccctctggtgagcagtcacctgcaggcttcctgggtttgtactgcatgttgagaggcttggttagctggctctggctgaccctctccgtggaaatcagagctattcaggtaatatgagcggggacagggcctggtactgcatcatctgcaagattcgcatgcctttga

SEQ ID NO: 80751 - DNA, 1121 bp, Homo sapiens
gtaacaggaagttattgccttcaatattgattggaaattgttttctattgaagtctatactgtagagttttccatttatattgagagtttgaacaattaagctcctattggaacttttccttaagccacatgagcatgaacaatctctgtgacacttgggtgctagagaaacacaacagtggctaaagtagccaagagcaagactgaatgtatagcagagtgccttgttagagtggtaacctagtcttggaagcaattcagtggatgtttcataaagaggactagaacttcaagaagcctcctgtgctggctgaggtgagcccttttggtatatgtacactactgggttgcctagaagccaattcatgaagaataacagcaggatgagaaaaagagtcactgtaacctgtggaacaacaacgtaagaatcaccaacccctaggctgagctagaactggaagccaggaatatggcaatgagtttcaagatttgccctcagaagatgaactgggtgaggtatgggttgaggtgagggcacaagcactcatcctacctaccctgctgctgttgaggagctagaagtaaaacatattggttaggattttaacagttggagtagcctcccattatcagattaagtgggggtcacttttgcttccaaactcagaataagtttgtaaacatgggaaagtctaagccaagagatctaaagctctagaaatattaatgacatttctgggagtaaaactactaaaaattatatcttaaaagtttctagtagtatgaagttcccaggccaggcgcagtggctcacgcctgtaatcccaacactttaggagggcgaggtgggcagatcacctgaggtcaggagtttgagaccagcctggccaacatggtgaaactccatctctactaaaaatacaaaaattagccgggcatgatggcaggcacctgtaatctaagctactcgggaggctgaggcaagagaatctcttgaacccaggaggcaaaggttgcagtgagccaagatcacgccatcgcactccagcctgggagattgagcaacttcgtctcaaaaaaaagtttccaggaaagatctttgggtcctactaagcgtctca

SEQ ID NO: 80752 - DNA, 2718 bp, Homo sapiens
tactacatcttcaccttcttcatgtcacccatgcacttcccctccctagtgctcactccaaattcaaggaaagaagaaaggcaaacctctatccctgtccgtgaacaagtgggtctattcagaaaggttatccactgccccagattgaatgagaagctgagtctgtcttaactttacagaaattcagctgcacaaacttgcagttgccttcccttgaaacaccttctatcctaatagtcccataaatgcaggtaaaaatgaaaatccatattcttgaagggacagcttctttggtatgaactcagccagtgagctgtgtccatttcctccataattctggatatcacctatctttttagcaccaagtatttattctcactagcagtagacagacttaaccagtctctaccacgacccagtagactctgacaacagactcttcctttaaggtgtcaacaactgacttactaggcaggactgccatccttagcatcagcccagttttggttaccagggactatatcttttgttccaggagagagtagaaagaaaaggagagatcccatccttgggtcatagacccattttcattgccattatctgtaagtatgtgcactgcatggaggacagccctaatagtctcccctctgctgccactgcctgattctccactctgtccccacttgccagtgaagtttggatttatcagccacttgtggcccattacagagctgacccaaggtggtgtcaccaatgcctcagcagggtggagtgcagttcagagcttataaatagctggcagggcatgaggagatgattttcttgcatgtgcaattctctaggggccatcaggaaacagagtttaaagtaccctttgattactgtcagaactgtcagcatttgcagttttccccgagcagtaattggccagctcccttctatcagtagccagtgttaactagtttaccaaatgctgtaaacaattgccctgaatgaaatagctgtcagtggagctctaagatctcctttagagggcacagtgaggtgggctgttgggatggccgtaggcaggggagaggaagaaggccactgatgagactgctgacctcctcagaaggttgacctcttctagagagactgcctcccagtgtttaagtggctcattgctccttctgactctgtaaaatggctctggaggacagctcacaggaattctgattgctgaggtgggtgattgagagctgttcaccatgtgtgcagcctgtgctccccttctatggatatgtgtgcaatttttgtatgtatttttttagctgtatattacagtgtttatgttgcaacttcacctgaagcgagtctacagaaaccctcccccttcttcccttggcacatatttgcgctaagagatgagcgttccttccactggggttgtgtgtgtgtgtgtgtgtgtgtgtgtgtgtgtgtgtgtgtgtgtatgtatacacatgttcacctgtgcttgttttattcaaaactgtgagtatgtgtttactttgaccttgaaatcccaagagtcactcgaacaatgtgtgtgtacacttgtgtgcccatgtgtgcgtgcacacgcatgctggaagtagaggccaggcctctagaaaagcaacctgtggcagggttgacagacatgttctctgtgcctagtgagtgagtgagccctgaggcccctcatctaccagtgcagagtttccttaaagccaagactgactgtgcagtattacttacatagcacattagtggccttggaaatttctaaacttttaacatttttaacagcttttcatgtgattcatgtataacaaagaggatcaggaaaggaaaataatgtattttattgtgctcttattacttttttaagtgattgtaatatgtgaggctctatttggagaatgtcccttatcccctggccagcaatataggactcacaggaaagaaggctggttagcccacaaagagtcttgcctcctctagccagagtgcagggctctgctcctaggaatggccatggagtgggcatgctgctgcaggccagcagtctgctcttggtgtcctgtggcatggccgcgccttgccttgaaggttggtgtttggttcatcttagcatagaacatgtgcacataactccttgcctgattatgcactgaagggcagcacacagaccactgaccatgtcagccagcacattcccttaacctcccccacctcccatcttgcaatgtcttgcatattgagatataccttctcaatgtcatgttcgtggtgccttgcccatgtaaatttcaatgttgactatttaatgaggttacatatttaatgctgaatgtttcctggtccctctatttgttatgtctctacttatctttttttttctttctctttttctgttatgatttggatccagtcttcactttaactctatggtataataagcatggacacctccactaccattatcttacagcactggtaaaccaagcacctcttcatatcagatgtttttagtactgtttttatattcagatttgttaagggcaaaagatgaatgcaaactagccagagaaaagcctcaggcttcccagagacaggtggctagattaatttttctctgggtgatggccaaagaatgtgagatagagagggaagggggtgttacaggttagagcagaatagagaaagaaacta

SEQ ID NO: 80753 - DNA, 1036 bp, Homo sapiens
gagctttccagagataatattttctgaaagatatatgtttgaacttgaactcaggctggggatgtctgttcaagaccagaagtttgcttaaaaaagaaatacttagtatatcctcaaactgaattagataggtagtagaagacttgaaggaacttgtgctgaggtatagatagatagatagatagatagatagatagatagatagatagatagatagattgattgatttccatggcactgatcactgatatcaggcttctttaactgtagtaaatatgataaactagagaataagagaaagagagagagagatgcttttctccgctgagactcccttgtctttgatctttttttttttttaatctatttgaatggaaatcagaatgtgctgcttctcagaactgggtcctatctgaatcttcctaagaatgtgtacatttttctttttaaataaaaatgactagaaattgcttttttaagttttgcttttctgtattattgtaataaacatgcagtgtaaacactacagagagtgcatgttcctgggagcctttgatatttgtaatgtggcagtgtgcctctgctgaggagggagagcagagaatgaccctcagttaacagggctgtggagcagactccagaccagactattatgatccatgaactagtattagagactcagtcttccacggtcagcctctctatagcatgagaataacccatttgggggtggttttacttactttttgctttgataaccccttaagagtagaaatagaatcgtcacagtatgtagaactcttggctaactttttttgatcaaaaaattcttccttgatccataaccacttagtaaagttctttatgaaaggttttattgcctcaatagtgggtattaaatgaggcctgttaagagaaagcataaaactcagaaaaccaccattgaaatgttggctttgttctgactaggtcagaccagtgactctctcaaccctaccagtgaaccatgagtgccagtgttgtgaccatcacaatg

SEQ ID NO: 80754 - DNA, 1005 bp, Homo sapiens
tcctgctgcacagtttataagtaaatgactcctggatattgatattgcagctccctctagtgtcactgtggctcaggctctcatagcattttttcttgcctttcagaaaatatagacagcacagaatctgccaaattcacagcattttaagtagattttcccaaacatagccaaggcaaatatgaggtgatttttcccctattagaaaagggaatgtttaatgaagatgtaggaccattccagttctagtttatttttattcctatttttaaattttgggggtcctaggaggagtcctgaagtaatcatttatagattaaagagtagctggcatgaacaagtagaatctttcttgagattcctcctgctactcttgagatgccagctactctttataaagaaggaatgtgaattcttttcaagaaagataatgagagccaagaagaagttactttaatccctggtagagaaaatactgggtaagggcagaaggaaaaaatttgacaggaagaaccctatccatttgttctgaaaaattggtttgttttctgaaataacttttgaactagaaatttgttatctgaagtcaggtcattttgaggttttttttttaactaaaggagttattaatatttgaaaaatggctacaatgtggtacctagaataatataatactcctacctaaattaacatcattgcaggctccataataaagatttatgagatacccatcaagcaaaatcctattatggaaatctccattggtctgtgtttgggttgtaactgttttcagggttatgaaccaagtaaaatcactctttttccctcctcttttacactctagtcttctcccttttgcctttgctcttaaagctagagtgactcattattcttcaacctgtctatgtattataaaatgaagagataaggaagtgctgcccactcaggttatctatctagggagaccattttcctttagagcatccaaaatcgtgaaacaattta

SEQ ID NO: 80755 - DNA, 1027 bp, Homo sapiens
tcttctaggatccaaaatcactttcttgggcatgtgaacatttttgcagcaattcaagctgtaaattatctggcctacccaacagttctcatagcagattcctacaacatggagtcctgagtactttgggcccacacagcgttttatatattaaacacttaatctattttgaatatagttgtaacagcattgagtgtgtgtgggtcttagctctgtagcagcaagtatagcaatactcctcctaggcagatcaaggaattgaggtcaatcactgatcagcctgtattcttagagtgggattataccaaatactggatatcaatttagaagttgcagggtttcattctatgctcactcccatttgcagttgtacttttgtgtgatatgacaaaatggcacagatggtgtaatgtgtatgattgttaatgtttctcatttttgtccctccacaattcattccctatagcatccatctcacttaaggttcactgaggcactatagaatgcatagagtgagatggaaatgagattccctgctgataaactggaagtaggctgaaggcatactgggcccataatggaaaaatcagagctaatgtagaatatttttgaagagtcttatattttgtaattattgctttctttggggcaaaggagagaaaattgaatcgaatgacagagagccatgttgttttgtagttttgtgcagtacaaaatcagcaagcccccagggcagcctggactcaacagacagccctcactgatcagatttcactcatttgtgtagtcaggtcattcatgagtgtttattattcaggtttatctgccgttgcccccaccccatcaccttgccaacttttatctgtttcataaaagctgttcatatattctacctgttccgagtaaataagccctatggcagcactggatcagatgctgccttttctcagaatcttttacagacatatggagcaagtactacgtgccttgctctgtgctaggccctaaagatacaagtatctgcttg

SEQ ID NO: 80756 - DNA, 1131 bp, Homo sapiens
agagaggtcagaaggactggaagcaaggaagccagtcattatgctattgcagtagtccaggtaaaatgagacctgatgtaaggcaaaggaaaagaaggggcagatggctaaagagctgaggaaggcagtagaccatgtctggtgagtatgggattagggcagtgatgctaaaatttcaaggtagaacaacctccaagagaatggtgatgccattagttgaaatatgaatcagaaaagccagaaagatgagatctcaatgggttatgcccatagggcagccaagttgaaagaaccccaggaaccaggtaaaaatatgggtttggtactcagaagagagctcaagcctagaaatgtggtcatagacttgatttagttgaaactgtgggactacatgagattgtaatggaagagtctgcaaagtgggaaaaggcccacacatctaagtgacccaaagcaggagcaattggaaaatctgtagcaaaaggcagggccctacaggccagagagtccaaggttgcagagggcttgtgcagaatgaagactcagaagaaggcaagaatttaatgtcttgtaagcctcaagaaaatgcaatgttggtaataattggggtgaatgccagacacagtgagttaaagagcgaataggaagaggaagctgtggaggcagtgagcacagcctactttttaaataaatgttttggtgaaagaagagccaaattgatttccaaacaatatttaattttcaactcccattttccatctcatccatatcttcttttatcctctcttccccatttgatgagccaccacccagattgcattgtctgtctctgtgggctatatattggctggccttctgccgttaacttaaatattcctgctcgcaaagtaaaacttaacataaacttaagcctgaacttaacttccctgttctctaaataaaaatctaccttgctttttccctttcaaagaatctgggtaagcactgaccaagtacataatcctcatatcctcatagtagactaaatcctcatatctaaatccatagtagactaatccctcatatcctcatagtagactaaagccaattttagaagggccttcaccattctacacagtgggaaactaaggc

SEQ ID NO: 80757 - DNA, 1033 bp, Homo sapiens
cccaagtattttctttatccacaatgctatcatctctactctgtcacaatccaagtatattcgagtgtctgtcatcccttaatattctggtgtggtgaatatatagcactctgaagggtgggactggagaatctggtttcctttttgaaaacaaaactcatcacccaaaccagtgccctgttcctagacaaggccaagacattatgcatatttgtcgttcccaccaaggcttggatacttcaatgtttaggtatttgttctttggttgttctcttttcccattttgaactaaagagttgacttattcttacattcccatggctacctcactcatttctgctcaagtttcagttataaaattagattgaaaactttacttactcttttctttttattgctttaaaaacaatacagggcaatctagagcagccatgatacctcccaagcagccacgacagcccaagggagctgtggacgatgccatcgcctttggagggaaaacagaccaagaagcacccaatgcttcccaacctacaccacccccactgccaaagaagatgatcataagagccaatacagagccaatctccaaggacctccaaaaatccatggaaagtagtctttgtgtcatggctaatcccacctatgatatcgaccccaactgggatgccagcagtgctggttcttccatcagctatgaactcaaaggactggacattgagtcttatgactccttggaaaggcctttgcgcaaggagagacctgtcccctcagcagcaaacagcatttccagcttaaccactctcagtattaaggatagattttccaacagcatggaatccctctccagccggcgtgggccctcttgcagacagggccgaggcatccagaagccgcagagacaagcactttatcgaggacttgagaatcgggaggaagtagtgggtaaaatccgaagccttcatacagatgccttgaagaaactggctgttaaatgcgaagaccttttcatggctgggcagaaagaccagct

SEQ ID NO: 80758 - DNA, 1044 bp, Homo sapiens
ttaatcagagattttcctttttttctttcttcctgaatgatttgtctgtttatgttgtttatatttagtgactgaatcaaccttctctgctacttttctcaattttttttattttttagtcatagtatattgttatatctaaccttaaactctgagaacctctcccttttcccctgtctctcttttatctttttttttttttttttttgagacagagtctcactctgtcacccaggctggagtgcagtggcatgatctctgctcactgcaacctctgccccctgagttcaagcaattgtcctgcctcagcctcccgagtagctgggattataggcacctgccaccacacccggctaatttttgtatttttagtagagacggggtttcaccatcttggccaggctggtgttgaactcctgaccttgtgatccacttggcctcccaaagtgctgggattacaggcatgagccactgcgcctggcctcttttatcattttaatcatacaaagagctattcttcctttaagcattaagacatgacatatcactgatgcattttttaaattcttactccttttagagactgctgtcactgtaaatgcagattaaaccttttagcatccatttgcaaatccatgtgattttacttttatcaactctatttgcgtagttctttagagttgacaattactttaattgatgatttaatataccagtgcacttatttaaaatgtgctcataaaaaccaatctttatctggaatataggctgtgctgccttagtttgcaaagggttaataaaactagctttcactttgcttggttccccaaaggtaatttggcacatttcccagaccaaaccagtaaggtaagggtcaaggtgcagtgagtgatattaaggaacagaatcaagccttttctcatggtttgcctaacttgtagctctccagaactcagtggaatctatggtttatctgagtgtcagagcatgattaacagactcgagaaggccctgtgaaattttcctttaatggggaattgtgtt

SEQ ID NO: 80759 - DNA, 1002 bp, Homo sapiens
tttttgtataaggtgtaaggaagggatccagtttcagctttctacatatggctagccagttttcccagcaccatttattaaatagggaatcctttccccattgcttgtttttctcaggtttgtcaaagatcagatagttgtagatatgtggcgttatttctgagggctctgttctgttccattgatctatatctctgttttggtaccagtaccatgctgttttggttactgtagccttgttgtatagtttgaagtcaggtagcgtgatgcctccagctttgttcttttggcttaggattgacttggcaatgcgggctcttttttggtttcatatgaactttaaagtagttttttccaattctgtgaagaaagtcattggtagcttgatggggatggcattgaatctgtaaattaccttgggagatattaaacttttctttaaggcacattggagttttcacatttcataatgtcccagactaagtagaaaaagaggtattcagtagctttttttaactttttgaaaagtttaaagcatgaatatgcacattgaaaaatatataccatttgctttttcaataattgcctcatttacttggatacaccattggtatttacttgaagcaactttgataaggaaaacattaccatcaaatgtcaacatttgtgtttcaggcttgatggcagtgtgatcattaaattaccaccccacggctgggagctcactgctgaaagaaatgaaaatacagtttttctataaataaatgaatatttcaagtctaaactgtatataaggaatgaagaatgaaaaacgaaaaaatactgtactaaaggccagaccccaggctctgaaagatgaggaactttatagagcccttcattatgggattagattgttactaagttcatttatttaactgtttaggaaatataaattgagtgtcttaactgtgccatgtatttgccatcaggccctggaacaaatagggggaaacattatcc

SEQ ID NO: 80760 - DNA, 1049 bp, Homo sapiens
aatacaaaatgagctgggtgtggtggcaggtgcctgtaatcctagctacttgggaggctcaggcaagagaatcacttgaaccgggaggtggaggttgcactgagccaagatcacaccattgcactccagcctgggcaaaaagagtgaaactccatctcaaaaaaaaacatgtatttcaggtgcctgatttatttagaaaagaggcagcttaaacagcaaatggttggagttacataggagggaatggtagacagttcttacatggtgtcattcctgattaagtaccactgtagtgtatctatccacatcttagaaggcatagtcaagaaatgttcggcttctttctgtggaaagagactctctcctttggctgcatgccacggtatataggcttgagggcagcccaggccctgggcttggcagacctcttactatacagcttttattttcacaattaggttatacataggccagtcaggtcttccaaaatgtatccgttttttgaagttaacatccatgaatccaaatagcacagttcatttgcccattggttcttaaatttaaccatgttccagaatcatctagagagctgttaagacacagattgctgatccccacccctggagttttttattcagtaggtctggggtgggtcctgataatttgcacttctaataagttcctgggtgatactgatgctgctggtccttgggtcacacttagaactgctggtctcaccaccattataaagatacatgctatagtctgagtaaagcagtgattgagatattaaacttttcttttttttttgaaaaatgtaaaactttatttgttagcatttttctttttttttttcttttcttttttttttcttcttattattatactttaagttttagggtacatgtgcacaatgtgcaggttagttacatatgtatacatgtgccatgctggtgtgctgcacccattaactcgtcatttagcattaggtatatctcctaatgctatccctcccctctccccccaccccacaacagtccacagagtgt

SEQ ID NO: 80761 - DNA, 1084 bp, Homo sapiens
tccagccacagctccccagcaaagatccagagagccactcaagagcctgtggccaaaatagaaggcactcaggagtctcagatggtgggcagcagcagcaccagagagaaagcaagcacagtgctttctcagattgtggcttcaatccaacccccacagtctcctccagaaacacctcaatctggccctaaagcttgcagtgtggaagagctttatgccattcctccagatgctgatgttgctaagagcacacctaagagtacgccagtccggcccaaatctctctttacatctcagcctagtggtgaggctgaagcacctcagaccacagacagtcctaccaccaaagtacagaaagacccatccataaagccagtcaccccctctccctccaaattagtgactagcccccaaagtgagccaccagctccctttcccccgccacgctctacttcttctccttaccatgcaggtaaccttttgcagaggcatttcaccaactggaccaagccaaccagccctaccaggtcaacagaagctgaatcagttttgcactctgaaggcagcaggcgggcagctgatgcaaaacctaagcgctggatatcatttaaaagcttcttccgccgtcggaaaacagatgaggaggatgacaaagagaaagagcgagagaaagggaaactggtgggcctggatggcacagtcattcacatgctgcctcctcctccagttcagcgccatcactggttcacagaggcgaaaggagagtccagtgagaaaccagccattgtcttcatgtacaggtgcgaccctgctcaaggccagctcagtgtggatcagagcaaggctaggacagaccaggcagcagtcatggagaagggtagagcagagaatgcattactacaggactcagagaagaagaggagtcattcttctccatcacagattcctaaaaagattctcaggtatgtaaaatagactggaagaatatgggaattttttaacacattttcaggtgctaagttttttatatcttttaagattgcataagaaccatttctgtttgtaagtagcactctgtggccat

SEQ ID NO: 80762 - DNA, 1414 bp, Homo sapiens
gcctcccaacatgctgagattacaggcatgagccactgcacccagccccgaagcttcattttcaatgcattgagtttgaggagtctacgaaatgtctaaaacattcaagggtaggtggaagaagaggaatctataatgggctgggaagtgttagagaaattggtggataacagaaggagtggtatcaaaggcatttctgggagggaaggtcacagaatcattgcaacagagacatcaagctgaagattatgtatggatagataagagtgcataaaattatagttaaaaagctcactttccaaatgctgattggctaaagggaaattacaaagtacacaaattagtttagctctcagtcttttaatttaaggaaaagtttaggaatggagtcagttttttcaagtcactaataatggtaagtctcatagtgcctttttcattcagattttttgtcttcttttcccctccacagattgatcattcttagaagagctgctgtaacacataggggaagtgaaaactaacagatgaaagttttgtcatgcactgaaagaaaagcattgtctgtgaagttctatttttaaaaatgtctgcttgtaacacctttactgaacatgtttggaaacctggtgaatgcaagaattgctttaaacctaaaagtttgcaccagcttcccccagaccctgagaaggcacccatcacccatggcaatgtgaaaactaatgccaatcacagtaacaaccaccgcatcaggaacacgggcaatttccggcctcctgtggctaaaaaacccactatagctgtgaagcccactatgatagtggcagatgggcaaagtatatgtggtgagcttagcatccaagaacactgtgagaacaaacctgtcatcatagggtggaaccgaaacagagctgccttgagtcagaaaccacttaacaataataatgaagatgatgaaggaattagccatgttcctaagccttatggcaataatgatagtgcaaagaagatgtcagataacaataatggactaactgaagtgttaaaggagatagcaggcttggatactgcccctcagataagaggaaatgaaacaaactccagagaaacattcttgggaagaataaatgattgctataaacgatcattggaaagaaagcttccaccaagttgcatgataggtgggataaaggaaactcagggcaagcatgttattctgagtgggagcacagaagtgattagtaatgaagggggccggttctgttacccagagttttccagtggcgaggagagtgaagaggatgtacttttcagtaacatggaggaggagcacgagagttgggatgagagtgatgaagagctgttggccatggagattcgcatgagagggcaacctcgctttgccaacttcaga

SEQ ID NO: 80763 - DNA, 1029 bp, Homo sapiens
agatcatggaatcctggctacctcctaggggcagcttcagccattaaactctcccatagactatttcatctagaagatttgctttgagattataaggaatgtggaggtaaatgagcttttcttatcaaacattccatttgggtgctctgtatcagacctgttctggcaaataaatagaagacaccaggatagactgttttatttccttgtgtaagtgcctcaggagacacatttcttatttctcaagcataactttggagactggagtttcccatttggggagcgttggtgttgagcagggaaagctgctagttattgattgccactgaagtcatttcacaaaggctgtaaaacccaaggattgctctttggacagacctgcatctggtacagattccccctctatgagactgttgtaggttaaaatagttttgacagtgtctttaagtgcacctctttgtctccaaatataattagtgtttaaaatgaagccctcgtggttaaggttttgtggcttagacagcagctccatctggtgcttgctaaaggtgtttgcctggttcatgtctcggtttttttgttttttgttttttattattatactttaagttttagggtacatgtgcacaatgtgcaggtttgttacatatgtataagtgtctcggttttaaaccagatgaatacagatggacacaaacttgtaaacgaatgtcatatgcaacatgggttcctagtgcacacaacactgacataagcaaatggtgttcctggtgagtctcatttggctattctgttgataagtgatagctgttaatcagcttagccatcttttgactgaattaacttacttttactcaaagtggggaattatttttactattatctactagtctttgaaaaagcaaatatattgtactacttacaaagagaaaacttaatcccactcttatcagagtctgtttaacttggttaacaagatattatgccaagatgccttattcttttttgtattcagtgctgcatagtgct

SEQ ID NO: 80764 - DNA, 1789 bp, Homo sapiens
tcagcttactgcaacctctgcctcctgggttcaagcaattctcctgcctcagcctcctgagtagctgggattacaggtgctcaccactactccaagctaatttttttgtatttttagaagagacggggtttcaccatgttgccaggctggtcttaaactcctgaccttgtgattcacctgcctcggcctcccaaagtgctgggattggcttcctttccacttttgcaggagcagatttagctgaccaccaggccaatctccttgggctcttccttcagttgggcatcttggcagtggggagggtatgacctggtgcctgcaggctgcggcgcaatgagagcctttgtgaagctgggctgcctggacactgctgctcctctcaccacccaagctgctcctataaacacttacatgcaggttttgtttggacataagttttcagctcttttgggtaaatgccaagaagtatgattgctggattgtatggtaagagttatgtttagtttttcaagaaactgccatactgtcttccaaagggtctgtaccattttgcattcccgatagcaatggataagtttctgttgctccatatccttgctgtcatttggttttgtcactattgtagattttatacattctaataggtgtgtagtggtaccttactgttttaatttgcaattccctaataacgtgatgtggtgcatctttttatttgctatctgtatattgtctttatctgtttcttcaggtcttttgcacactttttaaattggttgttcattttcttattgttgagaattaagagttatttttgtattttgaataacagtccctttgcagatacgtgttgcaaatatttcgtatcactatgtggcttgtgttctcattttcttcacagtatcttttgcagagtagacgtttttaattttaatgaggttcagcttaccagtgctttctgtcaaggatcatgcctttggtgtcaaatctaaaaagtcatcactaaactcaccatcatctatattttctcctatgttatcatttaggagttttattgttttatgttttacattgaggccattgattcactgggagttaatttctgtgaaggatatagtatctgtattgagattttttttttttttttggatgtccagttgtttcagtaccatttgtgaaaaaggctatgctttctccactgaatttcctttgtcagatcaattgactgtatttgtatggatctgtttctggtctatctgttctgttccattgatctatttgtctgttcttttgccagtatcatactgtcttgattactgtagctttatagtatgtcttgaagttgggtaatgtcagtcctccaattttgctcttcatcaaaattgtgtttattctttgggttgtgctcttgattttaaaacacaagaataaaacttcatcattgtattctgctttgcctacctattcaagcaataatataaatgatttttaaattttcacagctactatttcccagatttttattgtctctatgttttattgactattgaacaataccagtttgaacggcgtgggtccacttacatgcagatttttttcaataaaagttatgctgtgagtgcctgcctctcttacgtccccttccacctcctcttctgcctgtgccactcttcagacaccaaaaccaacccctactcttcttcctcctcctcagcctactcaacattaagacaatgaggatgaagacccttacaatgatccactttcacttaatgcataaatacattttctt

SEQ ID NO: 80765 - DNA, 1600 bp, Homo sapiens
attttgtttttgttttttgagacagagacttgctctgtcgccctgagcacacaaggccagaatgcattggtgcagcctcggttcactgcatcctccacctcccaggttcaagccattctcctgcctcagcctcctgagtagctgggattacaggtacctgtcaccatacctggctgatttttgtatttttactagagatggggtttcaccatgttggccagtctgatctcaaactcctgacctcaggtgatctgcccacctctgcctcccaaagtgttgggattacaggcgtgagccactgcgcccagcctgaatttattttcttaatcaatgatttctcttcctattccttcagattcctatttaaattttatctttggtcatcaaaagttttctggtttaaaagacactttttcctgaaggatatggaggtaatctaaggacaaaatcagtgtagagtcttgactttttactggatttaaaatggactttttactggatttaaaatgctgggtttcaaatgaattacatatatattgcttcttccctttgggaactttgagatctaaaagaacttcaactttatgatctgcaagaacaaactaatgacttgtccatcaatatattaccaataactttagtgatagaagctttaatatacatctctggtatatatggaaactataagttgaatgtaggttgtgtaaaaataattgcattatattgccttagtgtaacataagaagtaaatataaggatagttaccatttttaatcacttatgctatagcacttagttatcctatttgatctctgtaacaactggtagttgctattgttaattcttatttgatagatgaggaaactaaagttcaaagacataagtaactggcccagggatacatagaaagggaaagtgtcagagctgagaccaaactcagtgtgttagtttcttattactgctgtaacaaattgtcataaacgtaattgtttaaaacaatacatttattatcttggaattcaggaggccggaaatatgaaataagtttcactgggctagaatcaaggttttggcaggtctgcattccttcagaaggctctaagggagaatccatataaggtaacaatttcacaagttctggggatttggacatctttgtggggtcattattctgcctaccacacccagtgaagaaaaaattttaaaaatattccattgtatcctctcagcatctcacagaaaggaagaccagttattatcatcccattgtgcaggtaaaggatcctgaggcagaaggaatttgtgactttgccagagttttctaactagttagcccaaagggatcttttaagtccagaaagttctctgctgtatcatacttccataacatttttatcagcattacacatctgatgctaatataggtatattgctttcatgtctctagataatcaaatttgaattcaacccaaattagacttgattcagtgcccttgccatctgttagcttgtttgatagtttctggtataaaagacatcttttcctgaaggataaagaaataagcccaggataaaatggatgcagtgtcttgacttcatt

SEQ ID NO: 80766 - DNA, 1087 bp, Homo sapiens
caacttttaagtaaatcaaacctcaatgcatagtacatttttgttaatcaactctctaaaaccaaataattttaccaagactgcatcattttttaccaagtttctcatgaagaattttaactgacagtcttttcattgaggagcacacttttactcttttatctactagctaattatgaccatcttttcttcctcccgtcttgccccactttgaaaaacaaagtatcttttgcttttgtcatacctaaattgctaacatctgtaaattctttttgtggaagagggaggaaatgttgatgtctgcatgcttctcaatatgtatttaaaaatttgcatatgagtcaaaataaaattatttaacaactattcaactaaagtatggcctattaataaatgaattttagcatataaaattactagggtataaaattatagtagaaccaatgaatttagagtctcaattagttaaaaagtgtgttttgaagataatgagtactttttaattgctacatattgttttcagttgagttttgttctttgcagtaatggtagccagaaagtcatttttgcttgtagtatctcaatcaaaagatattttattctttttccagtcttcacaggcccgaccctttggtgtatgagtactgatgggactgcagtatggacaaccccataattaggcttgcaattatggcagcgttacactctactaggaagtaaatttgagatataaggttgatttttaatttagcacctatataggtatatcctgactaaagagtacctgctatatggtaactgatactaaagtccttatgatcacagtatgtaattgtctgttgtttaccaaattaactatgctcatacatataaagggattattttacattgatttgcttgtataatagccctcactattaaataaacaatgtgtacactccctccaaataactttaaaaatcttatctttttgtgataattcagattattgaaaaatttcggggtcatcaatcattgctgaatcatctcatttccaatccttcctttctattctttctgccgctagcctagttaaaacctcattacc

SEQ ID NO: 80767 - DNA, 1044 bp, Homo sapiens
tcaactttattttgaaaaagaaaaaaaaagaattaattccattccatcctaactcacctgaatttttgaggccaagatatgccccagtagtgacattcttactgtactcttttactgagtatagtatagaggagaatcatcaggaacacagctggcaccttgaggagcacgacttaaaattggcgttgcatgctaaacctgggcaagccaacatttgtttggttagtaatcttttcaggcagagcctttgattcggcccaaaattcctgcagattatcacagaagtatttttatttgcagccaaaatccttcacaaaacttcttagtacattctgaaatacaagcatataggctataatggtttttaaattcctttttctctctcacattaactggttttcttatagtgtgcctaaaatgtttgcccagttaggtgcttcataaaagagattttttccaacagcacatgtgttccaggataacctattagctatattatataaatgggaactctagttgatgggatattcatctgtaagaaaatattctctcagtacccctgggcttagcaatactatcatttgtctcacttcaaagctaattgaaatcagccagcctatgtttcaaaatatctacacgtattaccaaccatctggctgctcacaaatgatgaagacatttaatataaaacctggttaatgcactaccctttcacctctagagaagaaatcttgcctaggacatccatagtcttactttagtgttggtctacaacagggcaatcatttaggtccccaaactcataataattttatataatccctcccaagtgactgaccacgtgatagatgttaaaatgatctttgctgggctcattcacgactgcaatgacagagtggaaagtttatgtataaccatcagacctagaatatctagagtacattgcatgtgggtaaagggcatatgctacagttttttagtaactcgaacttattttttctgattatgaaaacaataaatattaaatgaattctatcctcatag

SEQ ID NO: 80768 - DNA, 1009 bp, Homo sapiens
ccctgggctcaagtgattctcttgagtagcctcccaagtagctgaaactataggtgagcaccaccataccaggctaattttttttttttagttgacctggagccttgctatattgtccaggaaggtcttgaactcctgggatcaagttatcctcttgccttagcctcccatagtgctgggattacaggcatgagcaactgtgcccagcctcattttcttaagagaaaaatatatttactagaaaaattattaaatcataggacttttttcttatttattctctgcagcaaaacagcataaaacattttggagatggttgtatctaaagtgtttaaatctcatttctataaattgtaaacttctgaagattaagcccagaactcttctaaattgttgttttctgtatatttatttggttttattcttcttggtctaatcctaagtatgtgctatattaatatattagagcaatattgctcttacttctacttttcctgtctgtatgttgttcattttcatattatgggtagaaaaccatcagcccctgtttgatcttcctactatagtcaatgtgcctctgtgttacttatactactccaccccccttatttgtttagggatatcatgtattagaaaatgggatgatttaatggatgcctacaaaatatgtaataagaatggtaaatttgctgaaaaacaagtaattacaaaatgataaacttattctagattgccatttttgtttttccagtctagtaataaatacaagttctcttcctttgatatacatcagaagtacctgaactgtttcagatgtttgagccccctctcagacctgctggcttaggatctatgggaatgcaactcatgcatctgtattttaataaagattacagatgattgtgacaggcactaaaggttgaggacaactgccatatagtaaaatagaattgtagactctggagctagatagatctaagtccagagttcagacataccatgatctaag

SEQ ID NO: 80769 - DNA, 1038 bp, Homo sapiens
tcatgtcctttgtagggacatggatgaaattggaaatcatcattctcagtatactatcgcaaggacaaaaaaccaaacaccgcatgttctcactcataggtgggaattgaaaaatgagaacacatggacacaggaaggggaacatcacactctggggactgttgtggggtggggggaggtgggagggatagcattaggagatatagctaatgctaaatgacgagttaatgggtgcagcacaccagcatggcacatgtatacatatgtaagtaacctgcacattgtgcacatgtaccctgaaaattaaagtataataataataaaatttaaaaaaaattagccatagacaatatataaacaaatgaactggctatgttctgataaaattttatttatggaccatgacatttgaatttcatctagtttttatgtctcaaaatattctccttttgatttttttcaactctttaaaaatgtaaaaactatttttacctagcaaaccatatataagcaggtggcaggttgtatttgacctatgggtaaaggcttgacaacccttactttatgattaaaaatctcctcagtaagctatcagattcctagtagaccattgtatttccattctatatgatttttttttttttacctgaaactattcgctactattaagttaaatagcagagtaaataagatcacaccaattttagcctgtagggctttgaaagattatatagtgtcaaaggtttgaaatcatttatagtgtctgagtttcttcagccagttggggagttgaggctagtgtctaatttatcttactaccaagcctgcacattttatatttttcagtcatgcaaggctaattccttcctccctatttttgttttattatgcttatcttattaatgttcccaaattagtacatagttctttatcctgaatttagtcatttttggatgaagttgtctgggtactcatgaacagaaagtcccttcaccttatatttaacttcatgctatccccacctacaagatcttggat

SEQ ID NO: 80770 - DNA, 1027 bp, Homo sapiens
ttcagagttttaaaaaatagaagtataggtaataaaggagaattacagaatctgttggcctgcatttgtaagatcagtccactttgagttgcccagttatttgaatttatcggagaaaaatagtaccaagtaagtataaatattcaagtagttattgaatatttcattagcttatgtatgccacgtttatttttcttaattctcaatgtgagaaatttggatgattttcataaatattcaaaaattattctcctgtacaaaattgagagtattgttgaaagagataataatttgctcttgggtctttttatttcttttatgaaaacccatctccaaaaaaatttaaatgaaaagttgctaattgcaatgagggttttctaggaagttattaaatttgattcttaaattgtatgaacttcctcaatagctttgcttattcttatatataaacagaacattttaatataagatttggtagtataatacattgctagtctgcagctcttctataggagaaatgaagatctttgcaaaagatttggggactccagattttctatgtagggttaaaaaaatttttttgattatattgaatgaattcagtaacaatggcttactttcttttctccagcaatatgaataccatgtcttataaaaattaataacaataggcatcatttggctggcagaaatggcagttcacatacttttttacagcaaatatagacatggtctgatataataaaggaaatagactttttttttgagatagagtcttgctctgttgcccaggctggagtgcaatggcgaatctcggctcattgcagcctttgcttcctgggttcaagcgattctctgacctcagcctcctgggattacaggtgagtagctaggattaccggtgtcaccccacctggctaatttttgtattttcagtagagatggggtttcaccatgttggccaggctggtctcgaaactcctgacctcaagtgatccacctacctcggcctcccaaagtgctggga

SEQ ID NO: 80771 - DNA, 1050 bp, Homo sapiens
gatgtacataatttcagggcatatgtaataattcaatattcatataatcaaatctcctttaccattttaggtaagggtaattcatgagccaaagaagataaggcatccttacctctttattccctagtgactcattttcactgtctacgttgctctcttagtgcctttctttcccctcttctttttagtttttattgaaagaaaataaggggaatattttaaacagcagtgaatctttaaattaatacacttccttttccatctacaaagttaaatatttgaaatagctctttatattaaaataccacttacatcttttaattttagaaacatcagcacattgacgtatcatttcttgcttattccaggtacccaaaattttctttgtagaagaaatattcactgttgaagctttagctgatgaagctatatgagcagataaaacaggaagagaaacattctttctcccctcgtttataaacaaaaatctatgtagttgaaactgggtggatatagctataaaacataagctcattcttactgtttggacatgttttacttcttgttgaaatagatgttccgcaactataagataagaagtctgatccactgtttggaatttttcagttgatggtgcattatgtaatactgtgttggaatttactggcctacagtcttgaggtagtgttttgcattaagatgaatcagttttcagtatcaagtaattccatggtaacctacatggaaaagagtttctgcttaaatgaatcagagtatgatgaggctttattaataaggttgagatagttgaatatttgagaagtgagagttaatttaaaagacttgagaaaagaccatgttcttcaaagcatccgtagtccacaaatctagtaaaagtgaagatcacttctcactgtaatagtctataaggattttttttgttttaaaatgtctttttttctcttccttagtattggcaactgttttatgttgtatataccatgcttattttaatataacactcttataaatgaagacctacacagctta

SEQ ID NO: 80772 - DNA, 1032 bp, Homo sapiens
ggaaaacagacctcttcagctacagcagaagtcagtgcagttattcattctaaacaaattagccctttggctttcgtattactgaccttccttcctgaataattcagtctaaaagttttaagacagggcccaggaaggtgtaggtgctagggtttcttggacaatgactgattctagggctgggacagggaaagcataagacaagatgtgctggacacatctccctgtaccagaaagtaaagtagagctcgaagaatgaggggattatatctaaaggatgcagaagccaccttgaaggggcactcactggccaattcttgaacagtttgagcatcagactaaatagtcatactatcaaatcgtagctctttgaataaaataggaactcatgagaccacagtgatctaataaattagtggggagaagaaaaggaataatggaaagatcaccatttgccaattattgtaatcagtgatctttctaattccatgattcctagctgataggatgcagtgaggaacacagcagcatttctatgacacttctttcaaaaatgcataactgaaatctaatttggaagaaaagagaattccaagttgagagactttctacaacatacccagtgtgtaatgttcaaattcataaagattatgaaagtcaaggaaaaactttagaactattccagatttaaagagactagacacacttgacgattaaatacatctcataataccctattggatgcctttgctacaaaagacattagtggaataattggtgaaacttcacaggctagtaatgtatcattgttaatttgtcaattttgatgatcgtattatggttatttgggagaatatttttagaggaattataaacaagttattagggatgatgggacataatgtcagcaactttcaaattggggaaaaaaccattcttgaacttttctgtttgaaattatttttaaaattaatttttaaagctttcaataaaagccattgtgagttgagtggataagaggagacattcatt

SEQ ID NO: 80773 - DNA, 1019 bp, Homo sapiens
ttattctgttgaatatctgttagtatacctgaaaagctcaattgtgccgtgttaattcttaaatttttaaccttttatttattctgttttcaacatttgttaagcagctagtatattcctaacactaagtattatgaagcctgtaactaaataaaggacaaaagtatcctcagaattcccatagttaagtctaaaggaagatttaaacttgaattgttgaagaggtcttattgattccttcccactgagtcttcctcctcagagtttaccaggtaaataccccagcctatatactcaaaatttgagagcaggatcaaagagagcagggttctcttttccagtacttggactatttgccagatcctttccaaattgtatcccttttgttgagagggggaagtacatgcaaaagctaaaatgcataatccaatttactctatatgatccagcttacaagcacaaataaggaaagagtttatagtcttgttgaaatgccttgatagagaggaaattgtatacagtggaaacctagaggaggtagttagcataagacctcctgaagaggagtggtttttataaataaactgattgttaagagaaggcaaaagctggttagtaaggaagctaagggaaggcttttgtgatgattctaaaattttattaacccaaatgtttgtatctatcgattgattacgcttctctttcctttgttatctacgacagtagatctctgtagatcttttattctggtaatgttttcaaaaggactctatgttctttgtgaaaatgtcagcattagaagtttagaagtttcagttgtttatgcttacttaagacggtttaaccaaacattgtgtccagtcccctcattttacacatagagaagctaaggtccaaataagctgtgatacacttaatgtcagatacagtaagcatcagacctgggacttggcttggctattggtcatggtttctgtcctgaatctctagttgaaaaatgcatgaaggttacttatggt

SEQ ID NO: 80774 - DNA, 1018 bp, Homo sapiens
gtccagtggtattattagttactttggaaagcaggtaagtatcagaaatgtttggattttctttacatattctaaagccttgctttaagtgatagtcaaacatcataggctgctaagtatttttggatgtggtttgttgttgaatatgtttacttgaggcaaataatagtgggcccttttgggattattttaccttgctaaacttaatttctgaagattttaaatatggtacatgagataggttttcttctgtctgcctgcctatagcacgagctctttgtcaccagtatttttttatatatgtatatcccacatgtcaagctgtttcctaaatagaatagtatcaagaatatagaccctgattaattctgtgtttggtggaaaatgagagacaatcagtttcagaaacatcttaacatcttagggagttgttttttcaacattgctaggatattggatctaagagctaagaattatttttgtttctcttagattacaagtcaggcagtttctgtgatgagagaaatattccttgtatccagaaaatgctgtcatcagatggaaagtgcagaccgaaataaggagagggagtctcagaagagagctttttagctttgttagatttatgacagtagaaaatgtgtattctcattcttacgaatgttttaaaatgattttggcatttctgtttctttggagatattttatgtcctttcttttatttctcctaatttaaaatttctggctttacttacctatttgagagattatcaagaccaagtattatggtttgtcatcacaagatagtagttgaaagtgtttattgatgtttttgagcatctcctttatcaaagttaatagaccctaatgtgaaagttcattatgtcattctttaaaatccaaagatgaatctgtgtgttgggggaagggagtagcaggagggggaagttaattgttcaagatagatggctaaaatggcttagcaaatggggagacttaactgcttatagtctatgga

SEQ ID NO: 80775 - DNA, 1219 bp, Homo sapiens
aacacctactataatctagttaatttatgtctttggatatttctatatctttggaaaatattatatagtgtttagtacatatatatataggttattaattttcacaaatggccttggtctgtacatcccattttattctttttttttttcatttagccctatatttaaacaatctatttttgttgctatatgcaattctggttcattacttctgactgctatacagtattatatcatgtacacactcttatccatgtatactgtgtatttgtcttatttatacatttttctgatggcacttgggtgtattcaactccatgtgccattaataatgttgcagtgataatcttcattttattttatagaggtatataatcaagaatgtgattgatctgttgttggatgtccattattaagttcaccaggtattgccagattgctctgtaggatgactagatagtttttactgctttgagcagtgcatgaggattcacagactctatatttcatgtgggcaacaagcaacaagcaactgaagagctgcttttatagacatgattagcaaacggccaaattatttatgtgtgaataatataaaaccaaagtaggttaccattaacccctcactcagaagggactcctgagtggaaaagctgccttggttcctagtaaacgtctctataatgagagctttttggtgagagaatatgagggtgagccctcgttgcaagtaactctgcctaccagccatgtggacagtttagttctgcaagatgtaaatgattagattctttgtgcccattgtggttcttggaatgcaaacatgaatgaggctgattctctgcccctgaagctctgtggttgtagaacaagtaggtgcaggtcttgtgctcatctgtcttttggagagacccctttgcttcatctcagagaagttggcactcactgtttagtctttcatagcagtcttttaatggcactgttattcttgttatcttaccttcaaaaattaagacacagagatacctgggtctattaactctgaccatttggagtcctactagtccatcattatacctaacctggtaaaagatttcccagaaagagataggtgttcttattgtggcatttgtttcctgaagtgcaatgattggggtgggaaggatggcatgttgtcaagtctctttgaattggtaaaatggagattggaaaccattac

SEQ ID NO: 80776 - DNA, 1050 bp, Homo sapiens
gaagatttcataaaaacaggttcgaattaaaacaattcagcgaagtttctggatacaaatcaacacacaaatatcagttgtatttctaatcattaacaatgactaatccaaaaatggtttcgaaatgaagaaaacaattctatcaaaaagaataaaacacttatgaataaattaaccaaggaggtggaagacctgaacactgaaaagtacaaaacattactgaaagaaattaagacataagtaaatggaaacagcccatgttcatgggttggaagacactgttgttaagatgtcagtactacccaaagcaatttatagattcaattagatccctatcaaaatcccaatgacttctttgtaaaaatagaaaatgtatcctaaaatttgtgtagaatctcaaggaactgcaaatagccaaaacaatcttgaaaagaagaacagagttggaggtctctcacttcctgatgtcaaaacttactgcaaaaactatggttatcaaagtagtgtgatactggcataaagacagatatataaaccagtggaataaaacagacagccggccaggcgtggtggctcacgcctgtaatcccagtactttgggaggccagggcaggtggatcacgagatcaggagatcgagaccatcctggctaacatggtgaaaccccgtctctactaaaaatacaaaaaattagccgggcgtggtggctggcacctgtagtcccaactactcagaaggctgaggcaggagaatggcgtgaacccgggaggcggagcttgcagtgagcggagatggcgccactgcactttagcctgggcgacagagtgaaactcttatctcaaaaaaacaaaaaaacagacagccaagaactaaatccttgcttatatagtcaaatgattttcaacaagggtggcgagaccattcaatgaggaaaggacagtcttttcaacgaatcgtgctggtaaaactatatttccatatgaaaaaagaatgaagttggagtcctaccttattccacatacagaaaactaacccaacattgatcaaaga

SEQ ID NO: 80777 - DNA, 2118 bp, Homo sapiens
tgtgtattgatttattgttcttttgtgttctcacctacccaacaacagtgttgccagttagtagttgcaaaactcagagattacttttgtgcatgcattttcacatctttcgaagtggctttgaacagagacctatttgggggtatgctcttattatgtttgcacaaatgatctgaaaactatcatggtggctgagccctgacttcctacattgctgttctatgtcttcttcttaaacctagaaatcttcctataatgcttgatcctttttaaaggaagaatttggaatatggagcagatgtatattttcttcgtgacactcagaaacatgtattgtaaatgtgtctgttttttagataccatattgttcagttggctcctctccacttgaatccttttcttttaattagttttccagcctggctgtcccctcagctgcaaaacaatgcagtatttgtaacctaattatttgtgaaagtgaatcatctcaacttaagtctaagaatgattgacctacttatagaagggttagcttgaaaatcctacgtgaagaaaggacaatgtaaaggattgattaagtaattttgaagtacgtgaatattagagtcattaatgatagaaacatggattcagtatcatactcaagcatatattcagtgactccgtaacccacctatctggtttaaataatctatgaacaaacagaataaaagtaagtcttgctacattatattaagccaatatcaattgagctttgggaaataggcctaaaaatgtgtctttggcaatttaatttgctcctattatgaacatttttatgttaaactgattgactctcttaaatacaacatggaaacatttatgtctttgtagtgtgactttaaaaaataattattgactgaggccgggcgcggtggctcacgcctgtaatcccagcactttgggaggccgaggcgggcagatcgtaaggtcagaagatcgagaccatcctgggtaacatggtgaaaccccgtctctactaaaaatacaaaaaattagccaggcatggtgacaggtgcctgtagtcccagctactcgggaggctgaggcaggagaatggcgtgaacccaggaggtggaggttgcagtgagccgagatcacaccactgcactctagcctgggcgacagagtgagactccgcctcaaaaaaaaaaaaaaaattattgactgaataaaattgtgattgcttgctaaggcatttttttgtattagttaaattataagtaagaaaggctttaaatctctattttaagagacatagtccatacatggtaagtcatgcctataatcccagcactttgcgaggccaaggcaagaggattgcttgggcccaggagttcaagaccagcctgagcaacacagttagacccccactctacccccacctgcccgccccctcccccacaaaaacaaaaaagaaaaaaagatattcatcatcgggttttagtcacagttctataactaagaagctggctgactttggtgccttgggttttcccgtgagtcagattaactattttatcatggacatcaattggatcttatacatgaaagtgctctataaaatgtataccacatttaggaattaagcaagattttagccctttttctgcctgctttttcaactctgggctggtcacttaagcttgccaagcttttatttcttcataggtaaaataaaggagtttggcctgtatattcaacttgagtattgtttacattgtgtttagcttttacaacctattatttattattttttctttttaaaaaatcagctgttttttaaagacatttcccttgcttatagtgtaattaccaaataataagatgggattcctttaaatttaacctgttttatttaatattcctatcaatcttgtaagagtaggtggcatgagactcattttactgatgaggaaaattgagactcagggatgttgtacgctaattagtgtgagaggtgggattccagtacaggtgggtctctgatcccagtcttctttttttttttttttttcttagcatgtggcttaagtgaagacacattgccatatacctcatgtagagcaagtttttgat

SEQ ID NO: 80778 - DNA, 1069 bp, Homo sapiens
tagtccacacattgatccttcactaaatgtctttttttgttttttttaacaaagctgttatgaacacctgtttggcacatctatcttcaaattgctttgactttctgagaagttgatcctgacttttgtatgtctgtcttatagggaaaatattttttgtctgttaaataattatttcaaatcttcttgaaacattaaatttttaaaaatttcaggttaatactctatatcataaacaaccttaggtttctaggcagaaatattcagttattcatgagtatggtatgaagttgctaattctcaatttgtagttttatatatattaaaaaatgacatatttctaaagtatatatattttaaatttaaaatgtatgtatttttaaattttggcaaaatgtccaggctctctccatagcccccatttcctctcaacagctgtccctcatctccccttcaggcctagtggtgcgtgtatctgaatgaggacctgtcttggaagtggactcagggccatttgagcagagttctggggtttcaggtagatagaaagtgatttctggagatagatcgagtaaggcacttcgatttggccctctgcactgctcacttcctgggggagaggtatggctaggaggaccaaatcctactgccttgatctaaggatagtagtgattttaataattttttgagacagggtttgctctgtcacccaggctggaggctgcagtgcagtggtgatcataattcactgcaggctaaagcaatccttacacctcaatctcctgagtagctggaaccacaggcatgtatcaccatgcctggccaatttttaaatttttggagagatggggtctccttatgtcacccaggctggtcttgaactcctgggctcaagctatactcccgccttggcctcccaaattgctggtattataggcatgagccaccacacctggctgattttaataatcttataataggtctaccagacttcattacctttagactttattctttctggtctgtccttttcttgtatgcccggaaataattgtctaaaactcaaact

SEQ ID NO: 80779 - DNA, 1018 bp, Homo sapiens
aagtccaggagaatttcttaattcttgacattctatagatatctaaagaacagcttggacgtaaaaatttaggaggtaaatgatcaagttagggttctattgaaataattaaatttccatactcagattcaaccatattgaccatgtctttttctgtttgttttttacaattcaggtatctgcccaaactggaacttatgctgtagacatttctttgtggtttatctaaaaaccaaaggtgagataatttatgaattcatttgccttttaatatatattttataatgagaaagaattgtttttgaaaaaatttaaggcaatatcaaatatcttttcctctgagtgttttaataggaaagttataaaactacatatagagtatgcttacttttaagcatgtttataagacatttgaaataaatgaaacttgttctagtgataaaatacttttgagtgaattttttctatatctttaatactcaaagacgaaattcatactactgttctctgatatacttgagaatatattggcattataatctaatatttttgaagacaagtcttccattagttaaatcatagattaaaacaactgctattttaatgggccattattaagagctttctaccactctactctcttggacttgatgactttctgtagttccctgtttgggagcctctgtaataaggatataggttaatagttgccttctatagaaagcttcccttttacagaaagcttctatagatagcattccactctaaaggtaggatcatagccttttcccgtttcttacctgtcttggctcaagtcctcttcttgttaaaatttttccaaatacatcgttgtaagtctctccaccttgagtctgactgctctgtcagccatttttatcattgtcaacagattatttttttctttaaaaaaatgtcagcctgtccgtctactactctgagtccttcagtatctacattccttaaggattattttacaaactcatttacagagcaatag

SEQ ID NO: 80780 - DNA, 1049 bp, Homo sapiens
ttaaactttatttaaaaacattaaaaatacttgaattatattctctataaagtatcacattgaagatttttttgcacattatcaagataagcatttattttatcaaatgctgaaggcaaacacagagaatagacagacttgaccattttcttttctagtactttagtatctggatttttcttgacagtctgatcactgatcattgtctgcatagttttgacagcatgcccattgaccctgggccattgatagacctggtatgtcttcatttattattttgccaaagaattagaagcctgataagctaggcagtgtcctgtgctttggctatgaagaggcaggagtgatatttaaagtatttaccagtaagtacaaaatagggaccaaccagttaagatggctgtagcactggatcacgatcttgaagaaccccttcatcctttatgctgtgtcaggctttcttgttttacctgctgggttgtagtggtggtggggagactgggccatcagtaggcaccttaggactggtggagtttgaggcagtgacacgttaccagactatgttacggaagtatttccgtacttaagtatgacccttcaggctctgttggtgtgtaccagttcaatattagttctgccaagaggtgttcagtcattgcctgtagagagcttactgttctctaaccataagagacagttatgatatagtttgagaggtacttatgtaagtatataaacgtgcataggggaagattgcatgcatcttttttgggaaaaccagggaagacttccataatgagtagaaacttgccagacaggtttaaggaggagattctaaacaagcaaaggggaaaataacaatttcaaaggcataggggcataagagagcatagtggattcagagatcaacagttaggagcaggagaggatgaagtttttctctgacacttgctttttaaattggataaatacatattaagatcacatttatagttttgaaattgctccatttttgatagatgtattagttcattcttgcactgctataa

SEQ ID NO: 80781 - DNA, 1021 bp, Homo sapiens
tgctggaaaattttagaatggctttagagtgaaacagcatcattgaaaataaaacaattgtcttctatttgcaaaactttaaagaacatttgttttaaccacctctaaacatttttgttttgttttttatttttacttgaaaattctatagcagaaataatgacagacaaataggcttctgtcattactcaacttccttatgatggtgttatacttattgctgagtaatagtaattagtgtggttttgggtgtaggcattttacattttgaatctgagaagattttaggttcacctgagttgctgaatcaactcagtatttcaggaaagtatcttatacatgggttccaagtagtataaatattaaaaagttaattgcatatgctctgagaaattctgtaagcactctttcacctttatttcatagatgaacagtgaagacagtggtgaggggattttatcaagtttatttgtaaaaaggcctgggctggcagactttttccttagagccagatgatctgtcacaactactcaactgttgacatacagcaaaagcagccataagcaacttgtaaccaaatgggtgtgactattaaaataaaactttatttaggcaggcttagtctgagaatcctaaatggatctggtggagggccaagggaaggcagttggcacacatgttgatgaaaacagttgtttaaacttctggcaaatttgaatactaacttaaaaaggtgtcaataaggtttatataaaaatgaaagcagtggtttgaaataccacaacagtaaggaccactctcacaaggagttctgtttccaaaatggcataattttgctcttaatgtatgcttaatagagtaatgcataatgtattattaatttggaaactattacttgtccagctacatgtgcagattttcagttttctttgtacatttaaaaatgataaatggaaagtgcaataccattcaggggaggaactactcaatacttaagtagttatttgccaaatcacatttt

SEQ ID NO: 80782 - DNA, 1052 bp, Homo sapiens
atatagtgaaaccttgtgtctacaaaaaatttaaaaattagccaaagttggtgcatgtctgtagtcctagctgaggctgaggtgggaggatcgtttaagcccaggaagcataggttgcagtgagccaagatagcaccattgcactccagcctgggcgacagagcaagaccctatctccaaaaaaaaaaaaaaaaaaataagcaaaagaaggtagacaggcagaaagaaggtatgaagaaagttaagttaataaatgtggaacataaaagataggatggaaacaaatttattcaagtatctctggtaaacaattcatataaggcctgtttgatggagtatttttttttttttgtagtgtgaagttttaacttggagacccagaattcaaacttgaaactgtagaagagaggatgaagagaatattagcagttgaaaggaaaatgtagaaatagaaacattatgtatatttaacagaaaacaatgatcaacatgaaatgttgaagatatatgttctaagtgatagctatatgtagatatggttcagagaaggcaaattgcatgtattgtttgatacacggagagaagattcaggtaagcattctggagttaatatttcctgagttagttgacatagtattaaattatatttttctgtaaacgagatgccaatatgagtcgtcttttatttggagtgtttaagcaggggaaaaggaggcagacactgaatagcaactgcaactatctgagcaagtgttgtaatacactaaaagttctgatacagatttcattagctgcacgttagcatgtcatatctatcactctgaggctttaccttttacctatgaagcccacattggtaattaaacattttcatgtttaaacttctacaagaggctcaagttttgtaccttcagtttacgcgtgatccagttgcatatacttttcaagttgtttttatttttttgagacaggatcttgctctgttgcccaggctggagtgtagtgatgctatcatgacttactgcagcttttacctcttgggctcaagcgat

SEQ ID NO: 80783 - DNA, 1027 bp, Homo sapiens
cctttatttctttctcttatctggttgctctggctaggctaggctgtttttcatttatttgccttttggaatctggctacatccatactgctaaacctcaaaactaaagacttcaggtaaactgctgggtcttaattcagctattgttcctgaagttaaaagagctcgttcgtttccagattcagtgaggaatgtattataatctaagagtgatgagaaagacaaaaaacctataaaaatctattttcttctatgcagcataacagcaaatttaaatggtgtcttatatatctcttcccatacaaacgcagcttgtgaaatattatcagtgagtatgtaaatcacaccataagcagcatagaaataatttgtagatacaatggtttctaatttagggagttagacctctgaattccttaattattgacttagatttttagggagttagacctctgaattccttaattattgacttagatcttattcacatattttaaaattaaatatatataaataaaatttgaatctcataaatgcaacttgtagttgtcagttgtgtagcaaaaaatcttgtccctaggaatggatatgttttgtattcttttgtaaaaggcagtggcagggctttattaagatgcgaatgctgatcttctcttatcttctatgggccttcagcgtctggatttttatgggcttgctgtcttactaggagactgactcctgctatatgcaacgatttccctctaattttttctgtcctttttggctaaagatctcaagtggagtttgatattacatattataccacacatcttttaaaaattaatagcttttatgataggaatatagttcatttttgttgtagaaaagttggaaaatgtagaataagtaaaaaggagaaaatctgtcatgctaccatccagagataactagtgctaataatgtaacgcccttctcctcagcctttttgtgtatatatacatcttataatatctagttgacctcagccgggcgtggtggctcacgc

SEQ ID NO: 80784 - DNA, 1040 bp, Homo sapiens
tttatctcagttcaaattcatagatatttattttattcttagtgttagaattaaatgctatcattattttgttgctcaaattattccagttttggcccttgggatctcttttaggtctacttctgtgtctttttggcatatttctatcctttttttatgcgtatgtacatgcacacttctttattctctgacactaccacatgcttcaggttcatcttgtttttttttcctacctcagccctagaatcaattatttctctaaggaaccttggttcctttcattggaggatgatattttgaagccaagatctggatgctaagtgtgctcattgctgtggagtatcattgctcctagactttctcagtggaaagaactaggaaatgcatgtatgtatactaatccacgtatccatgtacaattatgtaaaaatctgtatttctgtatataaaaatataaatatactgattgtctgtgactctaactggatatgttttgatacagatagatttactgatggattggttgtagaatgtgaaaagaaaagagtaatggatcactccaaggtttttgacttgagcaactggaaggatagagttgtcattaatagaaatgaggaagacttgaggacggtgcagagcaggtttttggggagagtttaggagttctgttctagactggttaagtttttgagatgtctaatagacatgctaagtaatagagatattaagtcagcagttgaacatgggaatctagagttcagagaagaatggtccaggttacatttgggacttgtcagtatagattagatcacctgaggagtgagggtagctagagaagagaagaaatttaaggactggcccatggggcattccagtcagagagataaggaggagcagttccacataatgataagggctgaggtgtggttatagggtggatttcatatcattaataaacacttaatacctattatttgcaagataccaagttatgtttggggttaacatcactccctccataaatttataagacaaattac

SEQ ID NO: 80785 - DNA, 1242 bp, Homo sapiens
ttttataacttcagctagagcacttagctacattgtaatgcatgggggtgggtgttgaaaagtgaatgacaactgtaagtgtagctaattgagaggggtacaatgttttcaacaaaggactctgaaggagtctttaagcagggggagatacttgggatttagagaatcttggacattcttaatgtgagcctggaaagagccactggagaggagaaactgaagaagagtgtatatgtgtgtgtttggtgggcgtgggagactggctggtggatggagacaaggatttgaaggtaataaggaatgggatccagggcgtaggcagagaagttggtcttaagtagaaggtagtctcacttttccagtgagcagaaaggaaggagatggatggcaatgtaaataagtttgtaactgacagggcaggaaggaagagttgatgacatgtcttgtgtaatttttgatcatctgctaagagtgaagggaacgtggtagaataggagtttttaaacaatgtatgtgaggccaagtgctgtggcatgtgcctgtagtcccatctactcagtaggctggggcaggaggatcgcttgaacccagaagttgaaggccagcctgggcaacataatgagaccctatctcttaaaaaacacacacacaaacaaaaaagccaggtaaaattaatccacccctgtgaaaggaatggaaaaaaagatagtctgtagtttatacatactctttgtaaacggcttccaagggaatggctaacagtggatggggtggaggtaagggagagagaggtaaacagacacatgactaggaaactgaagaaggattgttagttacatgactaggaaactgaagaaggattgttagttagcattgaggacctgtttatttcagattgtagacctcacatttgtagcagtaccaattttcgtggttgatttttctccagcagtgagtgatcagactatctgaagaaactatttaatactctcaagaaccttatgagttatgtattgttactgttactctccttgtttgtaagatgaacagcttgggtttaaattctgcccaggctgttatctgctgctttgtagatatctgtttggtagagatatctgaaggacagttggttgagggaattaatgatattgagtattgtagctctactgaagaactatggagtcctcctggattatgagctggaagcctgtaaggaggtgatccagttgggagaaaatgagg

SEQ ID NO: 80786 - DNA, 1091 bp, Homo sapiens
ggctgcggagggcggggctaagacaaggggcggggctgccgagaccttgggcccgcgtgagggaaaatttgggttcgattaagccgcagaggaaaagaccaggggagtctgggcccatttgggcgtcggggcccgctaggtcagccgtcatcgaatacagaatatgttttcgaggacgctaatatgtagtcatgaccaatttcagttcttctactttctgcgggccttcgcaataaaaaaaaaaaaactacatctcccagaaacctccacgaaaataaggctcaccttgcgtaaccacgtagtccttcgccgcattggggcaaaataatcccttcatttttgtgaaggtaccgtggaaaatatttcatttttcttctcaccggagcaattgtaaatgctatgcggtaagaggagttacctgtggaaaggtggttaagagattaggtaaagaaaaggaaaggacaccaaaataaagtgctgcggaagaatttttgtccagctgtgagacgacgagtgcgtgaagtgaaggcgattgagaggggctgagggaattgtcctctgtggaagggactttcttttggccctaggccccttcctgcccctgtcgtcagcaggtcagtaagcaaggcgagcttgggggtggccccagtcgagatgcccttcaccccttgaagatcacccctcttttggtggtggtggtactggtttgtctcagttggaggccggctgaatgggggcgcctcaacttccggttgggggaggggaggaaggccgtcctggggaggggggacaccctcacttcctgtgggggggtggtgatggtttgggggtgtccgacccacttccagtgctgatgagggcttgaaaaggtggtgcttggtgccattcgcggagacattatcttgcagcttggggattgtgttttatgtgaaaagttagattattccaagttgtgctgaacaccaacctgcagtcagaatttatgagtttgcttccacgtggaatatggagcatttcctccccagcaaaattgtctgtgttttcttcaaagaattcgaaagcccttgttaaaaatctctatgcacctttgc

SEQ ID NO: 80787 - DNA, 2423 bp, Homo sapiens
aatcacagcactttgggaggcctaggcgggcagatcacgaggtcaggagttcgagaccagcctggccagcatggtgaaaccccgtctctactaaaaatacaaaaattagctgggcgtggtggcgtgcgcctgtagtcccagctactcaggaggctgaggcaggagaattgcttgaacccgggaggcggaggttgcagtgagccaagatcgctccactgcactccagcctgggcgacagtgagactccgtctcaaaaatagataaataaataaatagctgtttgggttagggttcattagaaaatatgttttaaaccaaatattacagtaaaaaaaaatacatgttttaatcttctgtggtcacttttaaaaaagaatctaagaccctaaaatcaagtatgatttatattttgaaagaccacacgattgctgcagtagttgactgaaaaagcaagacaaaacattgtctttgtggttattaataggttaggaacatgtagactgcccgaagtaagaattaattgattaaagaagaagtgttcactatcttctatattaatgtaatatagaagaaaatataatatggtcaccctgacaaatgaaactgtagtgttaggaattattgaagtatggaaagattgtagaactaaatgaaaaaaatagagaatatcatgttaaaatactgattgagatagagtaatattgccttttggaaactgtctttattaaattggtctttatggtactccatggaagaaatacagtataatagaaataagaaaaattgttgcagctgaaagacttgagcagcttgaagaactatctgtttagaagaaagcaatatataaaatacctatctgaaagaaggtattttgtgataagtggcagttattcattggttccatcaaagaagaaatattagaaaagcttgtgaaaaatagagagagaaggtccatagaacctgtttttattctttttaaaaatgtttctttagagaggcttgctgtcctccaaaggtttttttttcttaatgccctttgtgcagttttctttgcatgtttaatagaaatatagtatcaaaatttaaagaattaatatttttgtacatgtactgttacttcaagttaatgaatttgagatttcattccattacttgccatatatgtaacaaagaaagtgtcaaatctttttttcaaatacttggattagataaccattttcttttccaaagacagtcattggatacactgctcacagcagtttgaaatattaaaaccgtaggtcacaattctggattccatctgactgaaattagattatccacagagatgttatacataatacagaagtgtcttttcattctttcatctactttactttgtaaaatcaggctaatgttttgcaactgttgctttccttgtttgtcgttttggtggtggtttgtttttgttgttgtttttgccgtagggttgaggattaaagaaagtatcttaagaacctgaatggtttttcaccttactgctttgctgtctctatttcatagccttcacaggtattcaaatgagaataccctttacgtgacttttcattatttaagcaaaagtttagagtgtctactatatgccagtcactgttctcaggactttgaatacagtaaatacggccaaatattcatattctactgtagtttactctctaatttacaaattaaaactagaattttgctcccttggtattcctaaataagatctatgttatgatcgttgttcagactgggtaaagaagcagccctaaacttgatctctcctggtcttaatctctaagccattctaaacccagatttgaatgtttcagcctaatttttctccagaccatagaagcccctgtgttaaatatgcagtccctttcattgatacatgtatcattttcctaccattctagcttcttttgtattgtgaaaacaaatgagagtgaacagtggggaaaatatgggatcagataggcccaaattcagcactggtctctgcattttactggctgagcttactagcttggtaaccatgagcaatttatttgacctccctaagcctcagttttcctaaatccaaatggggttgtttggtggaatcagaatgttgtatgtaaatctcctggtccaatgcctggtgccagaagcttcattaatgcaattatcttacccccaatcttgcttctgctactctggctattgtgatttgcccacatgtctgttttaagctttacattttccccacagtatgggatgcagtggtagactgactgagcttcagccttgtccccctatcagcatgctcacacagttgtcaagatttaattttttttccttgtgggaaggagaaatcactaatttccatgattagaagatatacaaaatagaaaagtttc

SEQ ID NO: 80788 - DNA, 1076 bp, Homo sapiens
tgtgtctttaccaaacaagaacattaactttttgtgctttgtgtacttaaaacaagcttggttttgttttttgtttttttcctccaaatagaaaattgactgtcactgaaaacaccttttcatatatcacaggccttctagagggagtaaggctttaccagcattccccatcccagcttatatggacccacctttttaccgtttcatagtacacccatgtcccaggaaataggggaagtactctacactaaggaaataattccaggttttattggattactttaactcttagttcaggcactggtccagaagttgtcttacttgggcaatcacctccttgtttactaataataaaagcagtgcttagattgcctctgtaggaagggcaacttgggaccaacaggcaccatgaaaaagccaacgaggtggactgtgacctcaaaaggcaacactctgcttgtaaaatgacaaattttgctttggaagaggaagtgttttttattttccctgcgttatcaccgtgctttacaaaaactgatacaaaatactattcttagatgttttggttttgtggagtttttttcttcacaacacattttccgtcctaatattgacagttctccatcaaggttccattgagggggcaaaaggcatatacagtgatccaattgtctagcaagaaatctgaactgtgccagtctcttttgatgatctagtacttctgtggtttttaagaagatatctgatttaagtttctaaatttttacttcaaaaaaacatgtaccatcacataaggaatttggagaaaaaaatcataaagatagaagtttaatttttgtttctaactctggcctctttttctccctttttatttttcgaaaacagagtctctacaaggaagataacggactgtaaaattctataaagcaaagctacacatcacttgacaccatacaccatcttggttacataatgaaggtgatcaacaaatgtttgttgaaatataaactctctaggcatttgcattagatggagcctggattatttcttttgtggccaaaaaaccccgctatatt

SEQ ID NO: 80789 - DNA, 1395 bp, Homo sapiens
tttaacatctgcaactttttacttgattagccactacccttctcaaaagtcttcctgccttggcctctgcaatcgtcttctctccagttatcttaatgcccttctcagtctcctttcctagtttttctaccttgctcatacaatgatattgcttcagctgagttctatcctgacttttccttcttctcactgtctttctggagaatatctagcactgcccattatttccatgggctaatgcttctcgagtctatctttatgcccttttgttccacttctgttctcctggggcatgtttccagttgtctgtggtacatttctacttaattatgctacaggtgtttcaaatttatcattttcttgtgtgtctgtccacacacacacacacacacacaccctgtttttactttgattaatattaagtacataatcatcaattggaaacctcagaattatctttgactcttcctttctttcactattaaagtcaatcagtcattaagttctctccattctacctcttttttctttttctttttctttttcttttttttttttttttttgagactgagtcttactctgtcacccaggttggagtgcagtggcatgatcttagttcactgcaacctccccttcccaggttcaagcggttctcctgcctcagccttctgagtagctaggattacaggcactgccatcatggccagctaatttttttatttttagtagagacggggtttcaccatgttggccaggctggctttgaactcctgacctcaagtgatccacctgccttggcctcccaaagtgctgggattacaggcgtgaggcaccacacctagccattctgcctcttaagtatctcttaactgtccttctgctcagaatcctgcctgcctttgtgtctcacttaatctattacagtaacctcttgatagtctccctttctccttttataccaagttctttctatctggaatcgtgttgtttaccttgatgaatacgtactcatcttttaggacctcctctataaattctttcttaacatccctccatacatataaaattcatcataccctctaccatacctctatggtacttttaacaagccattattttagtacttacgttgcattgtaattattccctataatactatgggttgtgcattctttcagaataatgactgaatattactctattatccatctttctaccgctcttgacttcccaactcctccctcgatcaaaaacaaaaacaaaaatactcactagcacatggtgttacctttccttctattccttcgtccacatgtaataagataagtccatctaagaccctaccattatctgtaccttcttgtgttcactcttcagaagggtgaaatctggtt

SEQ ID NO: 80790 - DNA, 1024 bp, Homo sapiens
tgcctctacaactcccattgctattcacttttttcattaatagtgttttccctttacattggagatacatgaaaggtagcatgtaaaagtcagattctactgcatattcagagctaaaacatgaagtctgtgttgagaggagatcatctttttggaagaagattatagttgtttttggtaggagatgtcttcatggaactgacctggtttaatcaagcactgaaaccagtttttttaaaacgccctgtaacgtctgtgaatacgttgtttacatttatacagattattgggggaattaattcaaggactggcatgtgcttttgctggcagggaaatttatctagaaccttagtaaataggtggagtttttgtgttgttgatacttctgcctattattcaggttaaatcacccagaggttccatacagtagtggcgccacatcatccaccaacaatccagaatttgtggaggatctctctcaaggtcagttgcttcagagtgagtcttcaaatgcagcagaaggcaatgaacagaggcatgaagatgaggtaagctgaagtatctccttctgttcctatcctctgaaacttctgaagaagcagtcacaaggaaggtgtgttgatcaaggtgttcatatgaccttcttatattcttaggctgatacctgcaaaattttgttttctatttcttgttttatacggaaccatattaataattttaatgacatagacaggtagactcttttttccctgttccctaagaaatgtatacttacctcatattagatgttgaacaaatacttgttgaatgagtgaatgatttaatcattaataagtaactaatgagaagtgtacatgcccttgctcaaggctctgctcagcaagccctgctgcatggagccctatgtgcccaaaggattcatactacttaccaaatctttcaccctcccatagggggtaactttccttaactcacacaaaggcgtatgagcctgggcagtcatgcccttgttggactttcagtg

SEQ ID NO: 80791 - DNA, 2551 bp, Homo sapiens
ttcttttgcctggtgcacgtgacaccatcttactctaatctgacaatgtctgcctccctgccacaatgctgcatgtgctgctgtatttcccatttggatactctcctgtcaggaatcaggacctgacagttgtctgtgggacagtcatatgcatatgaaggtcaaagctgagtgatcatggcacctcttattctcatacattgagattagcacaaaaatagccctttagtgtaacattttgtagtgtgatacataaaagaggttgcaagtgaagcatctggagttcctcaaaaattgcattgctgtcatttgtatattacctacaacagatgtggagagctttgaatatccagggccaaattgcaactcttaatcctgttttgtttgttgttgtttgtttttgttgttgttgggttattttgggagatggttgttgtttggtttttggttttttattttgttttgttttgtagcaacgaagtaaacgaggaggttggtccaaaggaagaaagaggaagaaacctcttcgagacagcaatgcacccaaatccccccttacaggatatgttcggttcatgaatgagcgtcgagaacaacttcgagcaaagagaccagaagtcccatttccagaaatcacaaggatgttaggcaatgaatggagtaaactgcctcctgaggaaaaacaggtaattgttcctattcctgactctttgtttggttttgattatatctcagaaataacttatataagaaaagcaaagaggatggacagttgattctgcagttttgtcacagtgcctaggagaccagaatagcagggtccatcatagcaattttctctagcctagtgatttttaaactatttgctagaggggtgtgagcagggaaggagtctaggactcccctcaaccaaagcaacaccactttttatacgctgagttcacataagattgttttaagtggttcagtattaagaaatctgtcaataaaatgtattccactgagttaaatgaaaagtcgtgaattaaatgagaaaaagtcacttgacacaattctgcagttcacataagatttttaagaaaaaatgttactgctttaatactttttttaactagagttctggcaaattaacctactattgaaaataaagcaagaacaacttgaattctttctcctctaagacagaaactaacctgatgggcaaactgaaatgaatccgttcattagagagatttgaaaggaattaaggacaagatagccatgagctggttgaagtaccactaaagctgagcagtggtcatggttgtgggagctgctttgggttaaaagttcccagcattcccagcatctgaaagatatctgtatttcttttacgtcttaaactcttttatgacttacactttttaaaaaggattccagacacactaaaaccaaatggagaaatactctcctgggaattaattgaattcagaaattttcaaagagatcagattcagttgcaacttttgaagctctgtgtttgtggtagcaagctagtagaaagcagtgaatatcatccattgttttggcgctactgtataaaaggatagtgggctgtacatactatgctattcttttcttttttttctttattttaaaattaatatgtgctcattattctcttttcagagaatacagaaatgtataaacaaaaatgtaaaaataacagtgcttatttcttgggataaccactattacgtaggacaaaggttttgtgtttgtttttgtttttttaactttttttggaaataatttcaaatacacaaaaagttacaaacataaaaataatacaaagaacatcccaacactctttacccagattcacctattgttaacacattttattccatttctccatttgcatatgcacttatatgctcagtctttcttatacttttgcatgctcagtctttctctctctctctctctctctctgtcacacacacacacacacacacacacacacttgcatgtgtacacccagacacacacaaaattttgttttaatcatgtgaggataaattatatacattgtagccctttacccccaggatatttcagtgtgtatgtcaaagaatattttcttatataaccatagtgtagtcatcaatttcataatttttcattaacagtgctttaatctgtcatctatatgttgactgaatgtcatttctttataacatttttcccttccaaaacaggttccagtctagggtcaggttttgtgtttagtagtcaagtttctttagcttaaactgggatatttccataatctttctttttcttttataacattgatatttttttaaaatacagttcccttctgcttcccccgctgcttttacctttaacagaacattgctcattgtgtatttttcagatgtttccttgtgattagattgaggttgcgcattcttggtgggattacttgcataggtggtggtgtgttctcaatatgtcacatatgcaggcacacaatgtccttttgtttctcactagtaatgttaatttt

SEQ ID NO: 80792 - DNA, 1061 bp, Homo sapiens
tgacatcatcccctcaaaatgggctggagacagcaaaacaaagtaatattctgttccttcccttgggaagactaagtgtgcctatgtggtgtgcacatctcatgaggatgactctagtggccatatagagttctatctatagagttagaagaataactctaatcatcttcatgaattttttataagaatgatctcaatagaacttgtcttcattaggttagaaaaggcaataaatattctaaaaactcataatgacctatttacttttataattgagaggttatattttattctattcatacaactcttgtttttctgattcttttttaaggcatattccctatattcttttcttcccatgttctaattgtcctgttttcttcaaataggtaatttaattttatttaaataggatctcattttcttgaaaataattctgtatttctttcctagcgctaccttgatgaagcagacagagataaggagcgttacatgaaggaactggaacagtatcagaaaacagaggcctacaaggtcttcagtaggaaaacccaggaccgtcagaaaggcaaatctcataggcaaggtatcaaaaccagaaccaaatgtatttgtagtttgttgtgggtgatggagtgtcataaagccaactgttaagagtggtaactataaaagatgtgtttctgttttttctccactatccagtattcacttacaagcattatcttgaaattttattaaaatcacattgctctcatttagaaatttcaactgggtttccgtgtctattatcaatgattttgacttgtcctccgagacccctgttagttgcctgcccttcttttcctgattcccagtttaggcatttctctgcctgtaagcaagcctatctacaaaattatatcagtaacttccctttaacacttctaagcctttcatgtgtcatttttgaagcaccatccacaactagcctatttttccttagccattgcatcttctctatacttgggcatctagcctgctaaaattatagatgttgtataagtagtctttggtttgtg

SEQ ID NO: 80793 - DNA, 1077 bp, Homo sapiens
gaatgaacactggtatttcttatatactctttcattttgaagatagtcatagcagaaagctgagcgagtctaaccttctgttacatgcagctgctcatatatactatacagcaattatatagcccatctgtttatttagagtatgtggactaatttcatttctttgagatctaaaagtctctcctctaaaattaaaagcatgtctgtggagcagaccacattagaatcactgtttctttgaaattgtgttttatggtacaactgaatagggaggattttcttactttcttcttatctcacttcaggaagtggagagacacctacagtggacaccattgactcatatatgaacagactgcacagtattattttagctaatccccaagacaatgaaaacttcatagctacagttcgagaagttgtgaacagactcgatcgttagggaatggtgagtgctcactgataaatatttatatgccagcacatcatcaaaaataagatgtcatcagactttatcaatactactaaaaccctgggattacattggatgaacaagttggagacttggttaagattcctgttgcatggttgttaaatgtagtaaataatattagaaaagagaatcactgtagtcccagctacttgggaggctgaggtgggaggattgcttgagcccagcagttcaagtccagagagatcctgtctctaaaaataaaagaaaacagactcaagacagttttttcttatgcttgcttcagaatggtttaatgggaaaagcatggtttttgtggcttgacctcatttctagctttgtcacttattagctgtattcttgggcattagtttcccaaaaggttttgaaaagtgagtgggaaacttagaagaaatcatccccaaaacagcactcagaacaaaataaatataacttaatttttaatcttccttttctctggaaaatactaatgataatttagaagtagtcagtgagacattgtatgtatgtgagcctacataagtaggaagcttttatattcaccactcaataacacagtgactgttgtctgttaaatgttgatg

SEQ ID NO: 80794 - DNA, 1535 bp, Homo sapiens
atataaagataaatgcctagtaaagacaaaggcagaagtctttatacttcttggtgatgcccttggatggtaactgtacaaggcaatgcattatattttagcctcagccatgctctgatggggaaaggattactatccttctagggagtagccagatggaatggactgtacttcttagagatggctggactccctgcagaataaagaagtggcattactgctgctgcttatgaagggaacagcttgtaaatctaggcctgggatattcaggagctcatcatccttcccattttcgtacagtgttttcaattagcactcttgtaggcttgaaaagtgagagctgggagaaacagtgtggaagattgtgaaagaaaacattaattgataacatcgtgtctcttcacatagatacagggcagctaattaagtattgacccaaaagtggttttccattttgagcattttgccagtaagactctcctaaagcttttttcatctcaagagtataaactatattatttgttttctgatgagtctttgaaaacttagaatattactattatccttgattttaacctacaaatattttgcccctgaaaaaatagctaaaagtgtgaactgttatattactacagattcttacagtctagccatgcaaacataactaacaatagatggttccccacacccccaaaactgtcaaaggaaacaattacaaagactgtgattaatactggtttggcctcattatacaaatatgtacagacagcgaggctgatgtccccagcactcatgatgcaattaattactctgacaagagtttggcaaagttttcatccactgtcaggagccagtgagtgaagggaagctaatggtctacaagtttcagaggagcatattagggacctttagaaatctaacattttatatatgaagaaactgaatcccagagaggagaaacatcttgcttgaaaatatctgcgtagatgagtacagaatccaagactagaaccacagatatctaaactctctcattcactgggtttctaaaacattgctctaaggaagaggtggatgggggaaggggaaagcactaaaaaatcctgaaatagagcattaagatacataggaagtaaacagataaaaattgtaatccaggaattataatgttatagaattttagctcattttaaaattattttgataaatatacagtggaagaattaccctacctgtctgtcacctttcttgtagctgagtagtacctagagacaagtggagctaggaggaggccatgagggtgattttaagttgaaaggtgactaccttatataaactattaaaatgcatatgttgcctgatttcaatgataatatttggctgtttgagtttagggaaaaaaaatcttatgtgactgtatttttattaatatgagaaatgttcttgattatatgcacataatacatctctatacatgcagatatccttagttaacacttgaagaaaattggttttgattgaccatacattcttca

SEQ ID NO: 80795 - DNA, 1044 bp, Homo sapiens
ctcttctgttcccatctgttgacaatgtcttgtggagcatttttgctgaggaaaaggtcacttgtaaacagaggagaaagggaaagagtacaaagccctaagtttattgtaagtgaaaactgagggaattcctgtcttctttaggagtaatgattcatagatctagataggtggaaatatcattcaaaatagtcacttgagctcacaaaaaaagcaaggaagaattctcatgtcctttgtcttccttctgtagccattaactgctgaatccatgtgaggaagacaggcttcccttccttccccctccttagtgattttttctttaacagcataagtaaagaggactttctggttcatttttgtttgttttgttttgttttgttttgtttacagatgaggtcttcctgtgttgcccaggctggagtgcggtggctattcacagatgctatcatagcacactacagcctacaactcttgggctcaagcatcacgcctagcagtttctggttcctttaacagcaaaaggaaagagaggttctgattcttacctcagggttttttggttgttcattgtttttgtttttgtttttgttttgacactgcagagcacaaggctaaaggttacagctgagatctttggaaccaaaggcagagcaagcagagcccgttgtctgggccccacaccactgcaggcaggtggatagaagtgcggcccctctcatagtatgcccataagtcagggcatagggcagaactacctgtcatgttgctacaccatcctgtcttctcagcatctccttgcctgttttctttattagtccaaaggaaaacaacagcaacaaaatctgtttttaaaatgtcttatatgaacatatatcaaatatccatgcgctgaaacccacataccatcacttggcaattttttagaataagaccccattattatctattgctataaacctagccagttctcttgctcttctgtattttcctatttccctgccatcatctgctatttctgccacttctcttagactccttgtc

SEQ ID NO: 80796 - DNA, 1038 bp, Homo sapiens
tgcagtcctctggaatttgccttttttctttatcacatttaagcttcatctatattgttgtgaataatagtagttgtagctcattttcactgatgtataatgttctgtcatgtgatcctaaaagtgtaattaacattctcctaccaatggacatttaggttatttccattttttgctcttacaaacaatgctgccaggaaccttctcatcccatctctgaggcaacatgcagtgtctctggggcacacagctaggagcagaattgctggcctgtagggcatgttcgcattcactcttactaggatatttgccaaagtgttttccaaattggttagaccagtttgcatcaccccagcaggagatgagtgtccccattgcaccccatcctgatcaacactcggtattgtcaggggccttgatttttactgattgaatgaatgtaagatggtatttcatgatggccttgatttgcatttctggaattcaaggtttctggtatatgaaatgtgggttgagatgggcagcagccagtgtgtactaggtgctcactaagcagtcatcccatcggcacccgttcccccagttgtggggatgctgtctttaccatccctgaagtctgggatggatatgagcaatcagggaggactccccaagcaagtaggatgaaggaggagcaagaagggcttaagtccctgcatgtttagtgcaaacaaaggacagcaaattccaggaaccccagaggctttgtgtttaccccaggatgggaaggagtggtcctagcttaagaggtggagggagcctgtgtttcattattttagcatcccctcctcctgcacagcccccctgtgcacctggcatgaagcctggcattgctgagcacttaataagagtttggtgacccagggaatgaaccccggatggaacaaatgtgtgcttgctcctcctccattctcacttgcttggggagtcctctctgactgctcttgctcatggatcgaatgaggggtggctgagcaaggtgactccggggcattgcag

SEQ ID NO: 80797 - DNA, 1024 bp, Homo sapiens
gtaatatgttctctatatgttacctattatctatgtatgtatctatctatctattcatccgtctatccatctatctctcggtatttaaagcatgcggttcaagccccttctgtagtcttttcctcccaagagctaacacggataactcgtttgatatgtccccttccacacttttttctatgtacttatcaacgtattttaaaaggaaaaacatgggctcatattagttatattgctccagcacttgatttttttacctaacaatgtcatatggatcatcccgggtccttccatagagttcttccccacccttttacatcccttgtatgatggtctacaaatcattcatcaattattaatcctgttggcagccatttaggttgtttctggcatttggctatttataaacttcactcagggaacctctgggtttgcacatctgtgtgtgcttgtgctgtagttcttttgggaatgtttctggaaatggacttcctgagtcagagggcacccacatttccacatttgatttgttctggacagccagatcaacctgcagaaggctgagctgatttatgctcctacaaactgtatgcaaaatgcccctttccctcacccttgccaatcataggaattattaatcacttaatccctgccaatttgacagataaaaatgattttactctatgtttcttagactgctaatgaggttgagcatatttgcatatgcttgttggccatttctgtttcttcacttgtaaattgcttgttgatgtcaagtcctctgctgctgtatccactcattcaggaagtatttactgagcacctactatgtgtcagacattgttttggttagggaccgaacagtgaacaaaactcacgaaatatacctgctccaaggaatgtaagctgtgatggaggagagacagacaaggaaaaatacagcatgcgtatgggagtgttaagtgctaaggcgaaaaaaaatcaagcagaggagggggatgggaagtgttgggcaacttggaca

SEQ ID NO: 80798 - DNA, 1040 bp, Homo sapiens
atgctttctttacagcagttctgattaataaaaacagttccactgctctctttaaacactctaaccttctgttgcatggggaaggaggccctttctcaacaatttatggttcttcatgcagattccaaaaggcgacctgctgccgggtggcctggtggcaggcactgcgctcacacacgtgggggcggatgcaggcagaggggcaggtgcgtggacctggcgggcggcgggactggccattggggcgggacaggccggggcactgcttggcagagtcggctgcagaataaaaacgccgtttactcctctaattgctgtttatttcctctggacagcatggagataattaacgagctcccaattaagaaaaattacatgtgggggactgaggtgtcagggccaggatcggtattggagtggaggggtggggtggggctggtggtaggagcaggggtccttggtgaagccaagggggtggtggtgtgtgtgctagaagaggtggatgcaagtcagcaggaggggtggtgaggcaggggcttcactgccagggagactgagtggaagggaacaagagctttgagcatagcttcactgtccccagcctcagttcctctctttgcctaagttagaggtcacaagtggtggctcagaggcagaatctgtctcatagttgtgtgtgtgtgtgtatgtgtgtgtatgcatgcacatgtgtataagtgccagtctgtgtgtgtgtgagtacatatgtgtgtatgaaagcgtgtgagtgtgcgtgtgtgtgtgaatgtgagtttgtgtatgtgtgagtgtgtgaatgtgagtgtgtgaatgagattgtatatatgtgcgtgaatgtgagtacacatatgtatgagagcatgtgtgtgtgtatgtgttctagccacagagtgtggcaaaaacctcagcccacagattgttggaagattgagaggtttcttatcaaaatctggcttctggagtctcttgaaaagtcagaggcccagcaagcatatgccggcaggagccgagtgctgcgtggt

SEQ ID NO: 80799 - DNA, 1185 bp, Homo sapiens
gtacctggaacaagaagatgctttctggtgtctcgttaccatagtggaagttttcatgcctcgagactattatacaaagactcttttaggatcccaggtagttctgaaaattctgtgttttagtcaccacttttagaattgcagctgaaatgtgacctgaattaaacctgcggtcagggtgaggggttgctttgtgtatgtgacttcagagactgattcctgaagacagcaggccacatctcagaggctgtccccagtcatggcctgctgtttgtgactgaggccgagttgggctcattcagccccctgcgaaccagcagagacagacccgtcctgcaggcctaacattgtgttcactgctctgcactgtcttccccggacacaggcctaccagtgggctgagtcataatccaggtgtgcttgggtgactggtgtgttagctcaggctctcaagaagcaatgtcaggctggaatgagacaaaccagagacttcggcggggggaagcccctgtggaggacaagggacagagaagttccagccccaggaagggaggaggatggggaggagagtcccagaccctgtgcagtgaccaccatgcagtcctgaggaagtctgggcagggccagtggggagccctcaagccaagggcagtgaccaaggcacctgcctccacagatgggctgcattcctgccgctgccgcacccatgccctgctgctgggaatgaacgtggtgatgcaccagaggggcagcagtggggcctgcagtcacctcctgcagtgggagtctgagtggcgcatttcatgccatccacacctggagtctgacgccaggggccagggcagagtgataagggctgggagagcccagtgtttctgcctttgcttgggacagtcctggccctggaccagatccttggcccttgaatcatccctaggctgggctggggctgctgccagcactggcttccccgtaagccggcccttcgcatgtggcccagactcaggcagcttctctcttagccacagctgtccccgtgtgtgcctgccctgtctcgtgtctcttctccaggtctgtgcccccgcctggcctgcctgctcacagcctctccttgcccttctcctgcaccacttggtgttgcaaggcctggccctgcaggccagcgggaggtgctggcaggagact

SEQ ID NO: 80800 - DNA, 1002 bp, Homo sapiens
aggatggtgttgggaaagctgttttaaaccattctgtattctttgttacttacattcacatctggaatttttgtgcataaaagggttatttggaacttcttgatgaactcaaagaatcagctgcatttgcaaaaatctttttttttttttttttttgagacggagtctggctctctcgcccaggccggagtgcagtggagctatctcggctcactgcaagctctgcctcccgggttcacgccattctcctgcctcagcctcccaggtagcttggactacaggcgcccgccaccgcgcctggctaatttttttgtatctttagtagagacagggtttcaccgtgtcagccaggatggtctcaatctcctgacctcgtgatctgcccgcctcggcctcccaaagtgctgggattacaggcgtgagccattgcgcccagccgcaaaaatcttataatgaaaacttttttttaatgaggctggctgatcattgggaaacaatttcatctttgaacaaaaaccaaatgaaagtggggaaaagtagctttgcttctcaaattttaggaaatgcaccccctccttttttttttttaatgagacaaggtcttgttctgttgcacaggctggagtgcagtagtgcgattatcattcactgtagcctccacctcctgggctcaagtgatcctcctgcctcagcctactgggtagctaggactacaggtgtgcgtcgctactcctggctgatttttggttttttgtttttttagagatggagtcttgctatgttgcccaggctggtcttaaactcctagcctcaagtgatcttcctgtcttggcctcccagagtgctagtataataggcgtgagccattaagccaggtccttattattctttattggagaactagaaataattttggccatgagagaaaaagtggcttaaagcagatggtctctgtggagactgtagtagcagctgtctgtgcctgggctctcatcttgtcct

SEQ ID NO: 80801 - DNA, 1029 bp, Homo sapiens
ctcgacctcctggtgggctcaagcagttctcctacatcagcctcccaaatagctggtactacaaatgcacacgactgagcatgtttaccttctttgtagaacatcattgtatgaatctaccatggtgtctttattccttcccctcatggaggacatttaggttctttccatttttccttgttacagtgatgcaaggaccatcatggtccatattcccatgtgcccacgtgagagagtttctctagggtgcagactggaagtggaattcctagtgtatagaaaatacatacctttaactctgcttgctagatctgatttccaaagtgcttgagtaagtttacgctcagcagcagtgtgtgaaaggcctttgtagtagttttcttttactggtacaacaaattatcataaacatagtggcttaaaacaacacaaatttgtcacttaatagttctgtaggtcagtagcccaacatgggtctcattggattaaaatccaagtttaattaagggctgcatttttttctgaaggttctgggataatttaagttgttggtggaatatagttccttgcagtcattcgtaggactaggtcgctatttccttgctggctgtcagctgtggttggcgtcttctagagccccctgcattctttggcctgtggccccttttcccatcttcggggcagcagcagcaggtccagcccctctcacacctcccgtctctcctgcctgacatttctctgactgactcttccactttgaagggctcatgaggatatttgggcccacccagatatcccaaataatctccttgttttaagttctgtagtcttaactgcattaacgttccattaacaacattcctattgccatgtaatgtaaaacagccacaggttccaataactgggacgtgaacatccttatccctaatagcttataaatacattctttgtttttttttaatcttttaaaatgatatttttaagcataaagttatacatatgtagtgtatatatatgataaagaaacat

SEQ ID NO: 80802 - DNA, 1109 bp, Homo sapiens
tagagggattgtacagtatccactatgtcagtgcatagctacttcagggacttagaatgctcactcttcgctcagacatggcttatctgtatttaccatgtcatgaggcccacttgcaccaaagctgtgctctcaccagcagatgggtcaggaggggtcagcagtggtggagagtgtagggccacctgccatgcccctttgagctgacacattatataggcacttatctggaatgtccaaacttgttagcccttactagagctcttgttctaacagaattcggttataggaatgtgccctaagttatttaagcagtttcctagccatggacatctgcttgtttctacttttctgtcatttcaaatagcattgttctgatattcttgtacatacgtctctgtgcccttgtgagaatatatttgaggaattaatttgtagaggaggaaatactgagtcagctttattgagatggctgttgccagtcagaggaaacccccccacacaacctcctccctgccccgccacctttgtttcccttaacagggcctgtagtctggagggagggaaggagctggaagcagtggtagcctgcttccctcctgtgcacaaagtcctggcaagtgcaaacctctgccttggcagtgtcgtccacctgctgaagaggttgtggttttgcctgaaacctggctgtgcaggcggtttgtggaggggttaacttggaagaaatttgatggaacatttcccaacaattctgtcaacttgtaaattctagcttgttatcagaatccaaacgaatgtcgaacgagttattactgttttagttagacattttaaactgtgcagacctccaccggaaagaggttttcttaacgatgatacagattgctggtgtttgttttaaaaagctcaggctgaccactgcccctgacaaggtgctgttttgctgcttcgtggtgcctcactttctatttcagatcagagcagctgagtgtttataggtgggcacctggcacgctgcctgggagaacacagtaggcctctcaaagatctgtcaaatgagactgcggtctttaaacagcaaatactgtcatagaacagcctctaacacc

SEQ ID NO: 80803 - DNA, 1036 bp, Homo sapiens
attccattttccaaggagccaggagatccagtatttgccttcttagtctctgttgctgggctgaaacagaagatttcaaaaccttcctggggaaaaaaatacattttttttttccattggtgctgggccagatcccttgagattgtttccaggctcatgattttgaaacactcaggaaaaaatttggaacctagagttatttatcagattcggggttagagtctgttttccatttgaattttgttttgtattaccaggctgcttacaatattcttgtgctttttattgcttatggaagaaattactttagacatttcttagagatccaaatatcttccttgagtttaagaaacaaaaattccttcattatgagcagccatcgcattcttttcagaaatggatacccaaaattatccatgtaatttaaattgctttctagaaggtatgcagacttgacctattctgtatatatattttccttcctgtggctccttcgtgattgttggttatgttgttcttttggctaataaacatggtaggacctgaccctttgggaaggaacccagagttcataaccctaagtgggtgattgagatggtgtgcgtcacatagagcgtgttggaggaatgatcgtttggttgtataagggatgttggctggccttacagatgagatgtttgaactgggtcttgagtgagtgggaatttgttagggaggtgttagtgcagtaggagcagagattgtgaaggcttttgtgggccttttgtgtgggagaaaggttatagttctgtggagtgtggggcagtgtgggccagatttcttgacacttggaagccatgagagagttttaagcatgcgacatatatgacttcattggcttggtgtcagaagagagtttggagaggagagactgagacagcaagtccagttaggaagctgttgcagaggcccaggggtagatgaatctggagacccagaggcccaggggtagatgaatctggagacccagaggcccaggggtagatgactctgagac

SEQ ID NO: 80804 - DNA, 1056 bp, Homo sapiens
agtgtgaaatgcagttttaagcggacactccgctgggttttgagagatgcacactcccatgtacctacactgccataaagaaatagaccattgcttcatccggcagggcgaggacttggagcccaggtggcacgaaggcaactgacccgcggggtgctggtcgcaggaccctgcctccgggggctgagggggcaacggccggcgggcgggcgggggcgagactacaagtcccagggtgctttgcgcgcccgcgggccgtgcggagcgaaggggcggtgcggagggggtagggggcgcagcggccgcggcgcggaggcgcagggcgcgggcgcctacggttggcgcgcggtagcgatgccgggggccggagcccgggcggaggagggcggcggcggcggcgagggcgcggcgcagggggcggccgcggagcccggggcgggtccggcgcgggagccagcgcggctgtgtggctatctgcagaagctgtcgggcaagggccccctgcgtggctaccgcagccgctggttcgtgttcgacgcgcgccgctgctacctttactatttcaagagtccgcaggacgcgctgcccctcggccacttggacatcgcggacgcctgcttcagctaccagggccccgacgaggcggcggagccgggcacggagccgcccgcgcacttccaggtgcacagcgcgggagccgtcacggtgctcaaggtgggaccgctcgccccaaagccgcccgcgcgcttccgccggcgtcccctgcctccgccactggcttgcgccatccaccctccttcctccaaggcctcctcgcccctgcccacgtcggcctgcctttccctgcttctccacatcccgccctcgttcctatctcctccccactatctgggcttaggccagtctcgctggggctaccaagccccgtctcctttctcagacaccttgacccattatctccctctgcgcctaacctcgggccagtctctggtgtctcccgacccccaccatcccgtggatgtcctgtgcagccttcccaggcatccgtgagcgtag

SEQ ID NO: 80805 - DNA, 1025 bp, Homo sapiens
catgcccaggtaatttttgtatttttgtagagacaggttttccccaagttggccaggctggtctcgaactcctgacctcaggtgatccacccgtctcagcctcccaaagtgctgggattacaggtgtgagccaccacacccggcctaggactcgtactttaccttggcattcaaggccttgggtcaccagcactcccacccaactttcccttcccgtgctcctcccacctccattgtggtccactggtccctcagtggccccaaacccactcactgctgcatttcccttcagaatggcccatctccaagtccatcactcatttgacaaatatttagtgagcaccaactatgtgccagacagtgtcctaggtgccaaggactctggtgagcaagactaactcttgggagtttatattctaatctgggagatgggcagcctactgctgcgctgtgtagcacaatatggtttgatgtgctatatgatgggtgaatatatcacaagacaatggagtgtgggggcatgatcagtgctacaaagaacgaagcagggtcatgggatagagagaacggcaggtggggaaggcaacattttctgtcatgtaggtgggcctttctgaggaggtgatatttaagaagagaatggaatgcagttagagtgtaaaccatgcagatatcttgtaggaagagcattgcaggcagatggtagagccagtgcagaggccctgaggtgggagcaaggttggtatgttcaaggatgatctagaaggccaaagaagccaatgaaaaggcctcactgaagcctccagtgaagaagcagagggtagcagggcatctggtgaggctcttgtgggccccagtgaagtgtttaggttttattctaaatatgaggagaagctgttggcatgctgtgatctgatataaagaaaaatccttcggccaagcgctgtggctcacgcttgtaatcctagcactttgggaggccgaggtaggcggatcacctgaagtcaagagttcaagtccagcct

SEQ ID NO: 80806 - DNA, 1066 bp, Homo sapiens
ggcctcaagtctcctgttgctatgaaagggtggtcccctagaaatctataaacaatttaacgtttttctgtaagtttgatactacttttctcccattttttcggtttaaagagaggtccagagatgcactgttatttaaggaaaagatctctgtactggaatttaggagtctcagatttaaatcctagcaatgccactgattggctgtgtgaccctaagcaaattactaaacatctctaagccttaatatgcccatctgtgaatatctatacttacatcacagaattgtttgagtattaaataaaataatgtatgtgaaagcacttggtatgtacagaaggaaaacaaaaatctgaagctttcttatcaatatgtttatctgtctccaacagacagtggttttcatgggcatcattaactggtttttttgttcaataactagattctactttgtcaccctcttcagacccagatttgcttgtgatgataactcttatgtcacatttgctcctaaaagtaaagcaacttctgtgtcactgtgaaaactgaactcagtcctttaatctctgaacttacatttaacacccaattcatctttggtaggtacatttgccttcacagtgaggcactaaagcaacacttgataatgattgtgctggtaaatctgttttgcctttagtgtgatctgcatgaaaaaaccctcatagtaggtattcagaaagtgttgggttgtggagtcagaagatgaggttctctgacatgcactccctgtgtgacctttggcagagtcatttgacttctgggccagcttctcactttagggattggagcagaaggtggctcagaggctgaccccaggatggtggaggtgctgagctggatgccggtttcaatcaggacagttcctctgttgagtttccatttcaggttgtggccaggcatggtggctcatgcctgtaattctagcactttgggaggccaaagtgggcggatcacttgaggtcgggagttcaagaccagcctggccaacatggcgaaaccccatctctactaaaaatacaaaaat

SEQ ID NO: 80807 - DNA, 1041 bp, Homo sapiens
ttaggcaaatgcttttctttgggaccagcatctccgcttatgaaataagcaagttgccaggtgtcgtggtgcacacctgtaatcccacctactcaggaggctgaggcaagagggtcacttgagcccaggagttggagactgcagtgagttatgattgtgcctttgaatagtcactgcactccatcctgggcaacctagggagaccccatctcaaaaagcctaaaacaacaacaagaaataagtgagttgtgctctggatttcatgaggaacatcctggctctaaaattaatggtaattttcttagaatatatgttacccctaaattgaccgaatggtcaagaatgttggcacaaaatgatccactcatctgagaagaatctgtatgttgagctgaaaaagtagttttattctaccttcaacatcttttatttgacaacttatattcgttaaattgactttgaaaatatacagtactcaatctaaagtaaaaatctgagtatttaggctttcaaatctgagatagcttgccacattgagctaatacatgagatttgtattcctgggaagctactgaatatatctgtgccaagttgcagcattaccatccatcaggacttcctcgctcttgtttactgtatgtggtttaattctgtgtgtgatatttctctgttgatattaatataggtctctcggctgctgggggcattccacaacccaaaacaggtgaccagaggttttactggtggtgtgagtataattatgtcttttattttttccttttagaagtttctcaagaaagatgctctaacatatttattatatagcattttatctccattcatttagaatttgggaaaattggccatatttataatgtatgttgaaattactggctgacatgcacaaatctgttaggttacttgcgcatttgaaagaattatcttacagctggctatgtaagtttgtcacattaatatcttgagggagccttgttaaaaatagaaagtacccttgagcctgttattttatttcacaatctc

SEQ ID NO: 80808 - DNA, 1047 bp, Homo sapiens
ctttgcaggtatgatgacatatactattctttttggttgcagatcaactttgccaagcttatgtagattactcttagatttaagcagacagttttatagaggaactaagaaaaaaatggaagctctcttgataaaaagtctgattttccctgagtaccaaaacagacctcagtaatattttggaaatgtgtctgaaaatgttttgcaagactgaagaagttgcatgagaagctttccaggatcacaatggaaaggaaaggaaaacacttgccttcatgagaaaccgtctaaattttagtgagagaacattgttaattttttgttgttgttgtctttggtttaaaagatttgaattaattggtctctttgcagcttgtctgaaaagaaatatcaattaggaaatctacttggtagtttaatttattttcgttttatgtaaagagtatcatttggttctttttaaaacctctgaactcaggtaaagagtaggattgcagagtctctcctctgttgattcctgcctcccctttgatgacccccggggaggtatgtttgttttcttaacagcatttgaatcttcctgagacatctcataaagtggatttctctgtcaaaatattcttttttaagccttcaaaaacaaaaattcttactgtcttctttgatgatttcttatgttcaggttcagacagtaactttaattccaggagatggtattggcccagaaatttcagctgcagttatgaagatttttgatgctgccaaagtaagtgggcttaaaaaatacatttaatgatgactcactgaaaagttttcttagccagttggattctgtgaacttttaggatgcattgtacccatttctatgaaatttagtcaggtctgttgttaatctccaccgattgtcactttaacagtgtgtgtctcagtgtttgctactgccattatttctttctttcttttttttttttttttaaatttagagatgaggtctcgctctattcccaggctggtcttgaactctggggctcaagcgatcctcccacc

SEQ ID NO: 80809 - DNA, 1075 bp, Homo sapiens
tacaggtgcacaccaccacacctggctaatttttgtatttttagtagggacggggtttcgccatgttggccaggctggtctggaactcctgacctcaagtgatctgcccaccttggcctcccaaagtgctgggattacaggcatgagccactgagcccagctgtggacatggttttctgttttattcagtgatatatccatcatcataatcatgaatattgatgcataggttgtcctaacttggctgatgggggtcccttcaccatgtcttctgtgtcctttagacacggccctttgttctttgagccttgccttgctttctgacacagtaagatgctcgaggctcatctgtattttcctaacctttgccctggaatcagccatttatccaaggaatgctacttccttttagtggagaatgataattaaaaactaaaatctgggtgctaggtgagatgttttatttttaaaaacattctttgaaatgcttttcttccgctagtgacttgtgtgcaggattgatcggaggtctcggtgtgacaccaagtggcaacattggagccaatggggttgcaatttttgagtcggtaaggaccctgacacctgaaacagaactcaggtcagaacagcgtgtgaactcaggaggagttatctgtataagtatgctttaactccagtttttcaaattgtcaaaacaaaatgatgctttttttttttctcgagacggagtctcgctctgtcacccacgctggagtacagtggtgcgatcttggctcactgcaacctctgcctcccaggttcaagtgattctcctgcctcagcctctcaagtagctgggattacaggtgtgagccaccacacctggctaatttttgtattttagtagagatggggtttcaccatgttggccaggctgttcttgaactcctgatctcagatgatccatccgccttggcctcccaaagttgctgggattacaggtgtgagccattgcacccagcctatgtttgtttttatatacacccatatataaacatatatatatgtttggtttatctcttcatttccctccagg

SEQ ID NO: 80810 - DNA, 1058 bp, Homo sapiens
ctggtgtgatcatagctcactgcaggcttgaactgctaggcttaagcaatcctcctgcctcagcctcccaagtagctggcactgtagtcaggcaccaccatgcctggctaattgctaatttttttgtagaaatggggtctcactatgttgcccaggctggtcttgaactcctggcctcaagtgatcttcttgccttggcctatcaacgtgttgcgattacaggtgtgagctatcacgcccaacccagactttatttcttcagtccatatcagatgaattgcacgcagtagctttcagtgcatattttgtattgctgaggaaagatggttaagactccagcttccccagaagaggactgttagtttttgtctctcccttgatgatgctacttttcccgatgtgtaggttcatgggacggctccagacattgcaggcaaggacatggcgaatcccacagccctcctgctcagtgccgtgatgatgctgcgccacatgggactttttgaccatgctgcaagaattgaggctgcgtgttttgctacaattaaggacggaaaggtaacaggaatcttgatttacttgtgctgggtaaaatgcattgcttccatgtgttttatctgagtgaaagggacagtgacagataatagttctcaggcgggcccaagcatttgatgttgaacaaggattcttaacgtgggtcccagattgaacagggtatgtgtgcacatgtgtgcattttctgaggtgaggatctagatatttcatccaaaaaaagttaagcagcactgatgtatagacatcagtgtacagtggaaaggtcagtggtttgggaggcagcatcaggtgcacgcccaattatcctattgttagctgtgtgaccttggccaagttcattgattttttttgagacagagtcttgctctgtcacccaggctggggtgcagtgtcataatcttggctcactgcaacctgcacctcccgggttcaagcagttctcctgcctcagcctccctagtagctgggattacaggcgtgtgccaccacacccagctaatttt

SEQ ID NO: 80811 - DNA, 1615 bp, Homo sapiens
gtagttgcagctataggctgaggcaggaggatcaccttagcctctgagttcaagaccagcctgggccacatagtgagaccccgtctcttaaaaaaaaaaaaaagagttaatgatttaaatatttctttcgtatttgtgtcccagcctccaaaaatagatcagatacaaaaattagttgggtatggtggcatgcacttgtaattccagctattcaggacgctgaggcaggagaatcgcttgaacccaggaggcagaggttgtggtgagctgggatcgtgccactgcactccagcctgggcaacagagtgagactccatctaaaaaaaaaataataataaaaacaaaaatagatcaaaatatgtctcaggtctattcctgagacatatttcccaaggatttttatgaaacttcttatttagattcgcttttatttaaatatccatgaccaactaatctgggttagggtctattgtgtgaacaaagggaaaattttggtaaagctccctgcctccctttgcatcaagagcaccttattctttgcagagtgctgttgtatacactatgagattggatcccgatcctcctgggctgggtagatggtggtggagtggttcctcactttgaaatgaggaactaaatgaaagagcagccgagtaacttgcccaggtggcatctcactgagggctttaaaatctccttggtttagtttagtttgcggatacatcttttatttttgctttttccttttctcagagcttgacaaaagatttgggaggcaatgcaaaatgctcagacttcacagaggaaatctgtcgccgagtaaaagatttagattaacacttctacaactggcatttacatcagtcactctaaatggacaccacatgaacctctgtttagaatacctacgtatgtatgcattggtttgcttgtttcttgacagtacatttttagatctggccttttcttaacaaaatctgtgcaaaagatgcaggtggatgtccctaggtctgttttcaaagaactttttccaagtgcttgttttatttattaagtgtctacctggtaaatgttttttttgtaaactctgagtggactgtatcatttgctattctaaaccattttacacttaagttaaaatagtttctcttcagctgtaaataacaggatacagaattaacaagagaaaatgtctaactttttaagaaaaaccttattttcttcggtttttgaaaaacataatggaaataaaacaggatattgacataatagcacaaaatgacactcttctaaaactaaatgggcacaagagaattttcctgggaaagttcacatcaaaaagagtgaatgtggtatatttctaaatgatatggaaaatagagacagatttgtcctttacagaaattactgagtgtgaataaaaacttcagatccaagaaatatataatgagagatataatttttgttaataagacaaaggtaatatattggatacaaagacacaaatgtattgtgtgttcaattattttgttgtcttgagatttaatattctttccaagagcttttaatgaagcagagagctagtacttcattttcactggatacattttcagca

SEQ ID NO: 80812 - DNA, 1019 bp, Homo sapiens
caggagttaccgtccctgctttacagacaatgacgtcactgaccgagctcttctaattctcagatcactgctccttccacaataacacgaggctcaacacagtagcagctactcattctagaaccgtctctttgaaacagagctcacatgattcacacccttgccgacagcagtaagacctcctccaggaccagggcttacgtcttgttgggtaaggcttggtcctcatctgatctctggcttttcagtgcactctggacccagacacctctgaccagactgataatctgactgaacaagctatggagttctgccagagggtgggcagcagagccaccacagtgtccgagatcatagagaagaaggatgaggccgtgtaccaggccatcgaagaggggatccggagggtcaacatgaacgcggcggcccggccctaccacatccagaagtgggccattctcgagagagacttctccatttcgggtggagagttgggtaggtttttccttttcaccattgcaagggctgtgtgggaaggcagaggccatggcagtgcctaggaggtgcctgttaggaagcagccacggcaaagagaaggtcatggcaggaatctgggtgacacccatctacttcctgttagaggacattgatggctccatgcatgggcttgtggttatgtggagtctgttgaatgtataagatatgtgctagaacttcctttttttttttttttttttttttttgagatggagtctcgctgtgtcacccaggctagagagcaatggcacgaccttggctcactgcaacctgcacctcgcgggttcaagtgattctcctgcctcagcctcccgagtagctgggattacaggcatgggccaccatgcccggctaattttgtatttttagtagagacatggtttctccatgttggtcaggctggtctcgaactcccgacctcaggtgatccgcccgcctcggcctcccaaagtgctgggattacaggcgtgagccactgcgcc

SEQ ID NO: 80813 - DNA, 1684 bp, Homo sapiens
taaggatagcagatttggtccagcttattggcagagttaataatatactttccacttcagtgattatactgtagaaattaacatctcaattttgtttgaaactttcccatttcagacaacatgccaatttggctggcacgctgagcggccatgcctcctgggtgctgaacgttgcattctgtcctgatgacactcactttgtttccaggtacttaatgattcttagcagtttctaaaatgctggggagatgagagcagtcttcttgtatagattgccttaacatttaaagatgtttgacccttttttattcagttagcctttcttttctgcagttcttaaaatttttatttagtgatgttagttgaccttagctggaacaaaagtcaacaagtaatccttttaaacagtaaaactcttagttttttcattataaattgaggcttctaccaaagtgactctaaggtagacttgtgttccaatggtaacttaaaatatgtaaatgtttgtaaaatgttgtttatagatcccagtgttggtcaggcctgggatggccaagacagttggaaagcaggagatggacaacttgaaggcattgcacagtgctttagaggcctcctgcgagccttggttttgaagctttaacaggcctccctcccatctggaaataggtagctgtgtctgagactcctggagaacaattaatatgagggccaggcagatcacaatttcaggaaaatggctaccctgtgaggagagaaagccacccaatgatgctgatacctggccatttcctgtaccgaggcatggggttggggggtctgaagttagaagaatgtaagtcatcaaaggatttttggtcgaagtccttccaacttcaaaccgatactaatgttcactttttaaaatagttcgtctgacaaaagtgtaaaagtttgggatgttggaacgaggacttgtgttcacaccttctttgatcaccaggatcaggtatggcattattatttcatctttagatagtcggggttgtttgaccattgtaccaaagagattttcttttcctgaccttgttgcttgagctgtggataccagtagatgcctgggcctgagctgctctatctgctcagtcatccatgtagccagagttcctgtgcagagtctggggtgcagaggctgggatgtgctgtcagcctagcaactcacgaggcatatccccacataggctggaaaacatggtgttagccccacagcctttaaatgccgtctttggaaattgctgcagctggtgtctggggccctctcctgggggctgctgcgccatggcaggctcaccaaggaccttcctcttcaggagattccattgcttaaacacaatcatcgcttgtcatttttgggactgtccaaagaagagatgtgatttttttttttttaatatagtagaagctggaaattcatacaagttttttggctttagtgttattgataacttttcagtctttaaaaggaaactgttctcacaagcaactttatctttgccaaggtgaatatgtgaaatagcaaaggtgttctagtgcaatactgctgagtctttcatgtgtgctcgtatcccctgggaacctggtgaaaatgcagatgctgcttcactaggtctggcagagggcctgggattctgcatttctaacaggc

SEQ ID NO: 80814 - DNA, 1050 bp, Homo sapiens
aatctgaaccaccacacaggaagagaaaaagagaagagagacaatccccagtcgtggagaagtaaggaagtaggaggaagcgaagaccatgagtgtaccagtctttgtgtggacatatgttttcattaggagtagaattgctgagtatcatggtaagtgtttgttttcacttaagaaactgtcaaactggttttcaaagtggctgtgccgttttacattcccaccagtgtatgaaggctctggtttctccacatccttgctaacacttgatattgtcctattttaattaaaaatttaagaaacccttaaactaaatttaaacttgataaagaattagcatctttacaacataattttctgaatcaggacactgctactccgatttaaaaagatgtatcctttggtaaaactttagtttttaaaattaaggccaagtcttttcacactgtatttttgtccttcttttttctgttcagtggatgcctggactttggccttttctcctgattcccagtatctggccacaggaactcatgtcgggaaagtgaacatttttggtgtggaaagtgggaaaaaggaatattctttggacacgagaggaaaattcattcttagtattgcatatgtaaggaaacattgctctctgttctccttctgattctttcagtttacccttccagcctgttgcagtccttgccacagattctgtcttggtctggtcaggcagctgctgtctcactggtgtggtttgccaagtagccagttagacctgtagatagcaggaggtttgcttgtgtttggtagggacagcttaacaacacggagtctgaaagtgctaatttctccatatgttctctgaacagagtcctgatgggaaatacctagccagtggagccatagatggaatcatcaatatttttgatattgcaactggaaaacttctgcataccctggaaggtatatatcatcatcttattttgacaaactgggttatcaaatcacaaaggaagaattattctttcattgaaatgccattaaatggcaaatggg

SEQ ID NO: 80815 - DNA, 1032 bp, Homo sapiens
tcataggctgactaatgtggagcagcagaggacatttcaggattcttttgaacttcacatttacttataaatggctgcacaacattccccagcagaacctgctctgccagaatgggtggtaactgctagagggtgcagatagcctggcatttctctggcacacccctttttgggttgatgatagaagagctgcttaggtgttccatgaacacagttcccttgattggtgccctggatggattcgcctcccgccagttatgctcagtagccactctaggctgttcctgtattggaaagaatgatggtcccagagtttttaaagaggctgggttgtctggaaactgagtgcattttccctcagaagcaatatttcttgtctgtaattcttaccactggagctcttttaagaatatgcctgcccagtccatattttggatccactgaatcatagtgttcagagtacgtggggtgggatatgtatttggaaaaagctacccagacgcaccctgactcccctgatggttgtctttacatgtacccttaccctgcttacattacttacagaggacttgggtccccaaactatcctgcaaagtctattaagactccaatatataagcatggtcttaagaaaagaggaagagacagaactgtttctaccttttcatcttgggcgcctaagctttccctgggctcataatgctggtgttattccatgctggttgtagccctgggcacaaggcagctgaagaaatcagtgctggattggttccaagtaaaaggatggcgtatgtatctagctcactttctctgataaacagtaccttttactggatattctccaagtgtggcaaagttttaaaggttactgttatgaaagaaaaagaagaggccaggtgtggtggctcacacctgtaatcccaacactttgtggggctgaggcgggtggattacttgaggtcaggaattcaagatcagcctgaccaatatggtgaaaccctgtctctactaaaaaatacaaaaaattagctg

SEQ ID NO: 80816 - DNA, 1098 bp, Homo sapiens
tgcacagctgttttaagtttaatgcctttatattcatattttgggaaggtatcgctggagaattgttgccaggcaggggtaaagcctccatgtgcacttgtcacgtttttacatccacactgggtctgcacatacaacagcatggcctaccaaatatgcagcttacagacttagacttaaggtagactttaattaatagagattggatttgaatcctagcacctctcattccttgtctataaaatgaggatattaatagtacccacttcataggattgttgtaatgtaataattggcccattaaccataataaagatacttgtggggaaaggcaacttaatatatggaggctatagtaggtattttcttttagatctatactgtttagaattgaactgcctgcttgtttcgaaagatcttttcggagtatctgttaccgggtttaggccttttcttggtaggagggggtcttccccactggttttacttgtttttagccaagtgatagccattgtagactcctatataccagatagcatgctaaaagaaaggacactggatttagagtccgaagtactaccttgtcgcctggtaaacatgagatttagggcaagtagcttcttcagaacctccaattttcatatgtggccccaaaatttcaataaaagctgtataggaaagcactttgtaaaatagtaaagcaaatacaaataaatgttacctcacaattgttgaacagtatctcggcttcattaagtcgtatgcaagaagactttataaatgaagcactttccattctagcccatgatgatgccatttggtcagttgcttgggggacaaacaagaaggaaaactctgagacagtggtcacaggctccctagatgacctggtgaaggtctggaaatggtgagtgcctctcccctaacatacagccttggaaaattgggggctgaggttttgcttctgaactctccagttgcagtccgggaaatacttttttctaggcaagaaagcaatagcaatatggtggtataaaacagcagcttatttttcccacttgttttcctgttactctgtattaaagccctaaagttaaa

SEQ ID NO: 80817 - DNA, 1031 bp, Homo sapiens
tttattagagacgtggtttcaccatgtcagccaggatgttctcaatctcttgacacgtgtctccctccagcttctgcccttatttacctgcctgttggctcttaaaggcatttttggttgagacttttgcatgtaaaataagaactttgccatctttggattcccccatgtttgtttgtttgtttttaataaataatatttaatattaaaaggagctgtggtttttttctctctaaagagcaggaaaggacagagactggtcgctctctgcagtcacacttgaggtgaagaaaccatgggatagaattagctgttagttgagtccctaggttcagaggaagaaagaagaccataccacctggtagggagtgcgaaggaggttccagggactgatccatagaagggtgtcagaacaacttcataataaagagttgccttattttcttggtcaaggggaacttcctgtgtgccttctatcctgatgacaccccctcactgaaatcctggtgttgtttccacagagctgtctggccttttgtccttgatccttggttaaggaaatgaccaaccaggtaagacctgtgttgaagggaaaaacatcaattggtctctttgccaagttcaagtccagtaggttttctggatgtgtagtcaagaaactagcatctcattcttgcctggctcctaaagagctgggtgaccctgggtacctagtcaccacagtgttaggtgggactagtgaaatgcaaatactgagaggaggattggttcatccaagtctttaccacaatttagtgagtaatagaagaagcttaaaagatgttgtacaaaaaaaaaaaaaaaaagatcagaataggagatagaacaggagaaacatatctttgtaataagattagggacaaagttaatagacggttaggcaggctgtgtgttcttattgcagctgcaaaatttaagctacaaactggactttgagcttccttggtgatcagaacagaaaaagaaaacataatttattggtctcttgttga

SEQ ID NO: 80818 - DNA, 1012 bp, Homo sapiens
ttgtgtattacttaaaataggaccggattcattgtacatcctcaaatgtgcactcattgatagaatcacacccttgtcttttggagcccgggtttttggaagctggcttaccgcaagccttcctcctttttttgtttctatccattgccaaatgtgaggcccagaatgacagggaagaggacaagcctgtgcttcagcaggcagaaggctgtgctgaagcagaggttgaataccattcccattagccaaactggcttgagcactttcctgtctttcctaccctgggcagaaagaaccctgttcatgggtcacaaatgaataaaacactaccaacctgtctgtaatcccagcactttggaaggccaagacaagaggatcgtttgaggccaggagtttgataccagcctgggcaacataatgagaacttgtctttacaaaaccaaaacaaaacactaccaatttgagatcttcataggcaaggattagttataaattgtttgtttgtttgatttcctgttattggaaaaccttcggcagctttttaggctggcagatttaaagaaagtaacctgaacctggatgccttaactgtgtggtcccttaaactgccaatgggtagaattgcgagggccgtgaacttggctgagaggaaaaattgcatctttatgtttcctaacctccaactgaaatttagcattttcttccactgtgaatgtaggcaacaaatcacattattagcagtgtgactttgttatgaatataaattatagatattttcatatcatgatattgtgtaagctcattgcaacttcgaaattatggtagttattaaatttgcttctagatcacatatataatgtgtcagtaaagaagcacatatgtttttgtattttgataaaattttagcatacagtctatcctcattatttgtggattctgtatttatgaattcacctacttactaaaatttgtctgtagccctcaaattaatacttacaatgcttttgtggtc

SEQ ID NO: 80819 - DNA, 1053 bp, Homo sapiens
aaaaaaagtcagttgacaacctattaaactgatatctgtcacgttaatgggtcatgactagcagtttgaaagacaaagctcgatttcactgaatttatttcagcaacagaagttattagctttagtccaatctcaaaagtacaaaatgaaattgcaacacaaacctctaaacctgcagttgccggaagctaaacgtctgcgcttccggaagcaaatttccaactaccactcctctggaagcaggacctggcttcctccctcctctctccgcccaccctcgtcggcgtctgccccgcgcccgccatagcgacggcaacgggcgctgcggagtgctccgagccgtgagggcggggccggcgcgatgccccgccccttcgatagctcatctttgcgcgtcgcagtcgcgcggagcccggcttccgacgtgcagcctggcagtgcagtggtgagttggagcgcagggccgttggggattggggtcattagggccgttgacagtccaggccagagggcgagtgagcgaggttgggcccgaggctgcctgtaagcaggtccgttcagggatgctccaggccctggggcctgagggtggcttccatggctccatttgccctggctgttcctcggtgtacggggcctgaggggagtgggggaggcccgtgggtggcctccttttgcgtcctgagaatgttctgggcagtatcgagattagggctggtttctctgcggaggagatcatttatccgtagctgggagggctgtattaaccgaagttttccagtagtgggccacgctgtcttaggtagcgtgctggacagatacagacatcactggacgggtacagacagaggctgggttcgctttacgccaagtaccgtgcaatactgtgggctgttgacttgcctgagtagtttcatagaggcatctgtagtgttccttggaaacactgagtcagtgatgaattctgcctaggaaatttagggaaaagtttcccaaagagagaagatggcaagagagggctaaggtctaaagtctcttagctctgaccttcat

SEQ ID NO: 80820 - DNA, 1044 bp, Homo sapiens
ggcgcccaggccctcggggctcgggttgtgctcccctcggggcctgcctgctgggccgccctttgagcctaggccgcggaagctggggctcccgatccccaccctcctgcgcgacacccgcagggcgggccaccccaccgctggccttgacccgcacccctctctctccggtggccgctgcctgctgccagcggcttcctggcccccgtcagcaacaccaggggcagggagaggcccaccgtcttctcctgcccgccccccattggcgagcgatgaaggcgggggcctgcgtctccgtgttcgggtctcacgcagctagatgttgattccacggtccagcctaaggcccctcagtctctctgtgcctctggaagccgaatgaggggcagtcaaggttgaacattggtcagtcagttctccgaccatttattgcaccgctgtctcctcccccgtccacctccctctacaaaaaaaaaaaaagagaaaaaaatactattcattctgaaaatgggctgtgcttatgttttctccttttggatgaaagccttaacaatgttgagggtcctggccacccaccgctatgagtctgcacaaaagatctgaaggttcttttcaacctcagggctgcctccccgccactgccccctagaatgttgggagctgaggcacgtttaaatgagacctctggatctttgacttagtagttcagcttcagttcgtgcaaaaccagaagacttgtctctttcgggtagaatatgctaatttcctagagattctgttacttttattttcagtactaagccctggtaaggacttaactgagaagtttttttgttttggtttattgaatgctctgtaaaaatccgtcttttagtttttttttttaatcagtccctctaatgttaattgtggaattcacaaattcctgtctctgcagttttcaagacatgtctttccaaaacgtccccgtggattatttaaatcattcttattgtccctttccaggtattcttatcacatttcaggagtgaattatcttactag

SEQ ID NO: 80821 - DNA, 1089 bp, Homo sapiens
aaataatcctcccacctctgcctccccaagttttgggattacacatgtaagctactgcgcctggcctaatgtgatttttagaagaacctgactgactgatgataattctacaccaattaaatgtatattttattttctcttttcttttctttttttttttgagacagagtcttgctctgttgcccaggctagagcacagtgttgtgatcatagctcatacagccttgaactcctgggctaaagcagtcctgcctctgcctcccaagtaacaaggcctacaggtgtatgccaacacatttatataaaaacatatttttatattttttgtagagttggggtcttgctgtgttgcccagactagtctcagactcctgaccttaagtgatgcatctgcctcagcctcacaaagtattgggattgcaggcctgagccactatgcctggcctgttttactttgtcaaatgaacagtgcccacatctattctttttgccatctgttgaataggaatcaccaacaggacccattgatttgaatttttctgaagtattgggcatggtttgccccaacctacacacctgcagttttggcagacattctcattgaccttatcagggtcaaacctttctctgtggtctcagaagagtgaatgtgggcgacctatagggcattgaatggaagttttgactttactaacagttgagtaactttctcaattgggccaatagagagacctctttagaagactcattattctttgtgaacttttccatgacaatgacatgaaaagataaattgaatgccacatctgttgcagtcagttttggaaggagctttaatcttgttttttcttgcattatttaattaagacgattgttcttgtgatttttctgtagattttgaggaatttaaatattcttgactgctatgtgcaatattttttgtgtattgtgaaatacagctattttggagtatcttaaagaatccccattttagaattaggctgtcatttaaaaataaacagtttgccaaaatgagagcaatatcctttaccttgcatgtttagctgcagtgatttgtgttgatacgtt

SEQ ID NO: 80822 - DNA, 3062 bp, Homo sapiens
tggctgtctggcactcccaatgtgctgactagaaacatgtcaaaatctaggtagtctcaaaatgtagattttgagtaactctttaaaaaaaaaaattataaagatggagttttactgtcaacctggctggagtgctctgacatgatgatagctcactggagccttgaactcctgagctcaggagatcctcccacctcaccctctcaagtagctgatttgggtgactctcttaagtagatctctgaatttgaaactattgctatttttaaggagtggagaaatcagtggtgtctccatgtatgatggaggacagttaacatcagagaattagaatgaacagcataatggaaacatgaatgactatgttgaatgaaggggaagatggtggagagactggcctggctggagtgaaaggtagttttgagagagtacctgttactgggcaacagggcctctggtggtgtaaagcccccaggcaccctttatctcaggtcatcttattcaccctttcttttgtccttcctgtctgcttgcctttttaaccacagtactgcttagtcctccagtagagccgggacttagtgtccaaatcctaccttgcagcctttggaagaaaatcctgtatttaattttttaggagagtttttatcatttagaagaatcacaaaaagacaagaacattgcagatggtacagaaagtctcatttttatgtgtatacaaaaatatatgtaaatatgctacttttaataaaaataaagtatatgttgttttgtaaccctttttttcacttaatatatcatgaacatctttccatgtcattgaatacaggtatcccttgctatctgaatctacttggtttctgagtcagggagcttgagttcaggtagaaagggatacctgtacttctctgtggcttctaatagctgcacaatattgcctgtatgaatgcattgtggtttagttaacagacctttgaatattgaggctgatagtaacttttctctatttataaataaactttgtatgtgctaatacttacatttttgtgcaaacttatcattatatagaattgttggattgaaagtatgttatttcctccaccccatcacacgcttttatttttatactttcactatttactgttggttccagtctttatttttttttttttttttttgagacagagtcttgctgtgttgcccaggctggagtgcagtggcacagtctcagttcattgcgtcctccaactcctgggttcaagtgattcttctgcctcagcctctggagtagctgggattacaggcccatgccttcacaccctgctgatttttgtatttttagtagagacagggtttcgccatgctggccaggctggtctcggaactcctggcctcaggtgatccacctgccttggcctcccaaagtgttgagattacaggcatgaaccactgcacccggtctggttccagtctttaccttggactaaaaagaacaaaaactcactcaagtaaaaaataggttgcagtttccagacatccaaagacaaaggaagaaagcatagtcaagtttcagggaaccagaatttctaagccagaggcagtgttctgtttgtcacttaaaggctgcctggtttccttattttctgtttctttttgaatatccagtcttccatctctacagcctacttcacttactcatttttgtataatgcccaatatggccactgctgaccattcttgtatgttatgactggattactaaccggttaagagtgtacctctaggtgactcttttacttgttttgttttgtttgttttgttttttccctcagggtcttgctctgttgcccaggctggagtgtagtggttcgatcatggctcactgcagcctggacctcccgggctcaagtgatcctctttcctcagtctcccaagtagttgggactacaagcacatgccatcatgcctggctaaattttaaatgttttgtagagacagggtctccctacattgcctaggctggtcttgaatcctggcttcaagtgatccttctgcctcagcctcccaaagtgctggggttacaggtgtgatccattgtatccagctcacctgttgttttaacctattttgactgcacttgtcaggagtctattgccggtctggtgatcttgctggtagagacacaaatctgttcatcttgtcttttatgtggactcttgaaaagactgggttgggtaagcaatgtaacagtttgcttgtaatttgtacacatagtacataactttccaaggattacctttacctaacatcatcctactagtccatgtatagccatgtgctcaccaaccctccacatttcaactttgtttttattgccaatttctattctagattaggcccttttggttccaaggaacagacactagctcgagtgaagaaggatttattgtaatgatacagcgctccccaggccaatgaaatgtggctgtctctcaagaaaatggtggtggcccagaattaaggaagttgtttattattttctcttaggagcttcagatttctgccctgttccactcttctgcttcctccacttcactatagacaagcctcctctgcctgctcactttgtacatggcctcaaatggcaacctcagtccctagcttagctcttaacacctttccagttcagtctctctgtgtcctgattacacatttctgagaggtgaatctaattgccccagtgtctcctttctcacaagacttttggtcatcagcctaccaggggattggcttttgcgtcgctgctgtagccaaggaggccacaggccaccgagaactgtagcagtttggacaggcaccatgaaggacatctgttgtatagtgttagcaaagaatgccagtttacatgcttaccagtgaatgagaagaatatgtgtttctgcaccttcatcaatagtagatattatttttcttgttggctcaatttctgtcagtgaatgaagagaagaaaaaaaactttcttctacattaaattggggggtttattgtgaagatttgaagga

SEQ ID NO: 80823 - DNA, 1775 bp, Homo sapiens
caggaaggcacatgtcctatatagagaggtaggtgcttactaagttccagcagaagtacaaggttggtattgtaaagttttctgattgaaagacctgtagttttttaaatgttggcagttaaatttaaaatgttaaaactctgcagaacaagcaaaacatgtctgcaagccagcagacatgaaacagagtttgtgacctctgtactgagagatacactgtgttttctaatctttgcagcagctatttagccttgaatagtagaatctgcagtcttgggagccttggtttgcctttcatcggatgcttcccgtatacaaatagcagacctcagcatttttttttcagagccgaaccacctattggatcttccactaagtaactgatcaaaaggatatttattgttatcagcttattttagaagtgtgatgacacgaattactatactaaaccagtttaaattaccatcatcccagttcctccatggcgtttttaattacctgtccttaaagggttagctttatggattcatagaattctagaaattcctgattagaagaggcagacgtaatccagtgcattttttttacttgttgcatgagtctctaaacaatatgatttaatttattgagctaatatttattgagtacttgtatatttctagcaaatgaaagatggctaagatagcatctgtgctaaagaaaagacacggtttagtaatggggacatacatggaaagtatatgtgaagtacagtactatgttgtagcaatttgggtccagtcaggagatagaaaccacataataggttaaacagaggaagcttaatatacataattattaactatggtaagagtaattgtaatacaggataattgtatataatactgtagggctaagggagaatacccaaggaaggacaaacttggaagaggttcagaactcactggaataggtgtgggttggcccacagataacagagaagtatattggttttggccaggttggagctggtctggagttgctgggtaggcagtaggccaccctctggagtgcaggcagggatctgatgatcaggaactagtggtgtgggcatgcgttgggaaaacagatgctggtagggggcaagagcccttcagagctcatgggccatgtcggggcttgtagaaggagtgacagctcaatatatgaccctcgaggcagcttacagatgtagtccacgtgctgtcagagcagcaggccttctttacgggggtgcctcagtccaggtactggcacaggcaggatgccttcagagtgtacagctatgtaggaactccagctcctaagttgagagggctgtggtgatattaacaaatttgtgtgtgtgtgtgtgtgtgtgtgtgtgtgtgtgtgtgtgtgtgtgtgtattttaatatacaatgtaatggtgtccacctttggaagttctgcataacttgatgaactcttatttctcaaagaccaataatgtaatgagcagactgtagaagcttatttcattcaaatcttgctctgttgcccaggctggagtgcagtggctcaatctcggctcactgcaacctccatctcttaggttcaagcgattctcctgcctcaacctcccgagtagctgggattacaggcgcccaccaccacacctggctaattttttgtatttttagtagtgatgggatttcaccatgttggccaggctggtctcgaactcctgacctcagatgatccacccacctcggcctcccaaagtgctgggattacag

SEQ ID NO: 80824 - DNA, 1006 bp, Homo sapiens
caacagggtttcaccatgttggtcaggctggtctcaaactcctgaccttaggtgatccactcgcctcaacctcccaaagtgctaggattacaggagtgagccaccacacctggtggattttggatttttggattagggatactcaacctgtagtacaatttggtgccactgctttgagtcctgctaaggcatcagcagtttaggaccacatttcgaaaatcacagtatagggttgggggaccacctagggaacctaagtgagagatgatgtactggtggttgggactagatttaatggtgatattgatagaagacaaaaagatgtaggagagaggcattgaggaaaatgcctcgatgttttggcataaacatctggaaggatggtggtgctatttactgtgctagggaatggaagatgaggtgatgataaggggaaggggcagaggggaaatcactgagttcaagtttaggtactagtgaagttgggaacataccagtattaaagtaaacatgttcacctcctgaatcgggcatgtggttttggagcttagaagacagacttggactacagaaaatattttggaattattagtgtagatgtagtgataattgaagccataggagcagttgtactccctggaggaagcagtatagagtaagaaaaaaagtgagtctcaatatgaactctgaggaactcctacatttagatatcagataaaggagtagaggttaacaaggaagataggcctacctagaagtgttaagaactataaaggaggcttggcatggtgacccacacctgtaatctcagcactttgggaggctgaggcgggaggatctcttgagcccaggagttcgagaccagcctgggcaacatagtgagacccccatttcaattttaaaaaaatgaaaaagaactataaaggatctaaaattttaccttccttggaagttaacaaattagcctgacgtagtttcatgtatgttggcaggaggcacccaactc

SEQ ID NO: 80825 - DNA, 1061 bp, Homo sapiens
aaaattttaaatttattacagacatttatacagtttaatcattttctttttgccataccaggggatgtctgcattattgaattgaattctgatattctgtgcttttttttagtttttctgtgaattccttgaatatgaagtatttgtcatagttgcagtatgatattcctaaattaatgcagctcttgtatgaaggtttttatctctgcttttttcaaggctttgaggttatgtacaggaaagtcagttacaaaacacctgatgttaacacgaatggtgttacactctagtttgtcagactaaaaatgaattgtttaaattgagaaaacagtgcatttttgtctttgtctaactttttgctatggcattttaaaaataatatataggtatgactgtttgcttattaatagtaatattttcttgaatcagatgttctgccttactcaatacgggtcttgttggaagctgctgtacgaaattgtgatggctttttaatgaagaaggaagatgttatgaacattttagactggaaaaccaaacaaagcaatgttgaagtgccctttttccctgcccgtgttcttcttcaagattttacgtgagtaatgggtttattttttgtgaatgaactcttagagtgtgtttcctttttaaaatacagactcttgggtaggtgtggttgttcatacctctaatcccagtactttgggaggccaaggcaggaagatcacttgagcctgggagtttgcagtcagtctgggcaacatagtgagacgctgtctgtacaaaaaaatttttttaattagccgaatgtaatggtgcatgcctgtagtcccagctactctggaggctgaggtgggaggattacttaagcccaggaggttgaggctgcagtgagctgtgatcacaccactgcactccagcctgggtgacaatgcaagaccctgtctctaaaaataaaaaataaaataaaaaatcagacttcctaatggatggctctgtgtttttttgttttgttttgtttttgtttgtttttttaaggttagtttataaacttaaaaatt

SEQ ID NO: 80826 - DNA, 2548 bp, Homo sapiens
catcctcttcacccacccactcaaatctggtttgtgtgccacagctctttgtaccctatgtatgctgctattatggtacttacgatacatagccgcataagaaataaatgatatttcttacaccatttattcagaaactgcttttcttaactacctgcttatgatttccacataaccaataggtttctcaaacttaacatgttgaaaacttgatcttattttgagatacagtcacactctgtcacctaggctggagtgtagtgatgtgatcatagttcactgcagcatcgacctcctgggctcaagctgttattgtatgcagctattatagtacttacgatactattctttaatcattatcttccctaaaatttttttgagagccagaactatgtcttatttggccttgtaccattggtgtctagcacactgaaggcatttgataaatgcttgttgtatagttggctggatagatgggtggatgaatgtaaaatggcaaaagctactgtggatagctttggggcaacacgaaggcactagggggaaggggctggaactagggaaaggggaaggtgcatcaaaaaaatacatggcaagagtttcacaggcattttccctgaagttcgcttatgcctcaaaaattatctcttattatttttggcatatttgcccaagtacttcagttctcagataatgtttaatgttaattcttattaaacaggatactcctaacttataaagtacattatgaaaaatgaatgtaaactagacagggatactttttaaaatatgaaaatgaaaaagtttatcatttattaagcatgtataaaaaacaatttggactataatttgaccattctttattttttagtggaataccagcaatggtggattttgctgctatgagggaggcagtgaaaactcttggaggtgatcctgagaaagtccatcctgcttgtccgacagatcttacagttgaccattctttacaaattgacttcagtaaatggtacttcaatgcagatatttatagacagccatgcaagttaattggctggaaatgtgtcatgtagaggaaaaggaatagagataatttatggcagagaaaagtatgctaaatttagtattggctagtatataaaagctaaaactggtgaaaagtttatggagtggtggggtttttttcatgttcttgtatttctgctgccgtttttgatagaaatgaataagcctaggacctgctttttggagtgaacctctgtattcagtctttgtttccttttttgttttttaacctacttgtctttcagaaagaatcgaaagatgtgagtcatgaatgtttttaattatttggtgattaaaaacattgaactcactaaagctctattttccttcctctgaaataagtttcttgtatttataaggcccctttgaccaagaccaaactagagaagacatatttctgttgccataaagtaactttttaaaaacgttccctggagtagtagaataagactgcaatttattatagcccatgagagaggttttgccctcgagataaactgtagctctaaatttcttttaagttgttagggggaaaaaatctatttcagtacttgctaaaagttatttaaattagtagagtatttgaaagtgattttactggacgcttagaattctgttttcatttctgtaaatttaaatgacctgtttctttttttatatatatataatctgagatttgcctttgaaacctgagttaaatgatacattagcctttaaacatcattcagttacttccagatagcgttgctaatgtgcgtttttttttaagagctaaatttgtgtcccttttaaatggctttattttgttttctttttggaatgacagtgcaatacagaatgcaccaaatcctggaggtggtgacctgcagaaagcaggaaagctctctccagttaaagtgcagcctaagaagcttccctgcagaggccagactacctgccgaggatcttgtgattctggagaactaggccgaaactcaggaacattttcttcgcagattgagaatacacccatcctgtgtccttttcatttgcaaccagtgcctgagtatgagattgtttttcttaaagtttattaataccaggttattttccagttaagaaaatcaaatttattctcttcccacccaattactattatgttaccttcacacttaagtactgaattgaatttttatatgtatttcctgttatactaaaagaagtaaatttagtgaaaatggtgatctctaagtaccattctctcttaccattactaagaaagcaaacttttcttaagatttatctgtaaatagaattcatctttttgacgactgtaagcagaaaaatgggatctcattttaaactaaaatttttattttagtatatttgtaccattcatatactcgttagtcattcatatttcttatgttaattccctgtatatatttttaacatttttttcctactagggggtttcttatcttttcctattgcattaagagct

SEQ ID NO: 80827 - DNA, 1055 bp, Homo sapiens
tgccatcaaattttgaaagttttatgaagtcactttcttgttcctgttgcctagttgtcctggttgttaggagcatgttgacttttgagattaacacctcttatacagaaattaatttcctgaaaaggaagatttattgattcaaaatcattgatttctttagtttttgtttctttttataactggcacatcgtaagtgcttagtgctatatttttatttctaaaaatccaatctgctgtaacatttccccataattttgactccgaattacaaagtattaagatagattatattgtagttcctggctatgtgataatagttactcatttgtatcttttaatgtgtcagtgaagtattaattattgacttaagaagttgagtagaaagatgagagcataacctttggcacttcaaattaccccctagtttgaagtcaggttatgagccaataaatgtttgtatggcactttgtagccataagtgctattgaaaggtaaaataattggagtggctcagaaagctgttttccctgaggccctgagaaaaatctcactaagatatgcttggcttcaaaagatgactcaactatgaattattaaagtaatctttgtttaaaaaaaaaaaaagttgtccgagtgtggtggctcacacctgtaatcccagcactttgggaggctgaggcgggtggatcagtcacctgagatcgggagtttgagaccagcctgactaacatggagaaaccccatctctactaaaaatacaaaattagccgggtgtggtggtgcatacctgtaatcccagctactcagggggctgaggtaggagaatcgcttgaacccggtagggcggaggttgtagtgagccgagatcatgtcattgcactccagcctgggcaacaagagcgaaactccgtctcaaaaaaaaaaggttgacaattaaacaactgtaattatctggactaattatctggtccctggaggacacgtataatttaagttatattgatattctagtcaacacccagtcaccagctggcaggtaaaagaagcagctt

SEQ ID NO: 80828 - DNA, 1116 bp, Homo sapiens
cttttggtatgagatgaatgaaagatttttgccaaaagctctttttaaactgtaaaatgatgttgagatgttgttcgtcaatgctgcatagaaataatcagcacccatctcctagtttaattggcacaagagccaggtggggaggaaagtacatgcttgtcgttgaagctactactttcctcttttcttgcagcggataacccaacaaagtgtgtttttattatcacttgagtacagttttggacattggtgtaatgtggctttcttacactcagtaaaatacaactcacttttgtagctttccggtgtgttattttaaagcagaactttgttgaaaaagaaaataattctgagaaacctagtaaatagttcttccaaggattttaagaatatatttgtgtatatatatgcctaagaacgatgacttagaaagaaacaaggcaagtcttttttgtaatacatacgtttaatgccagctcttcttccttttagacctgaaacagtgttaaaaaatcaagaagtagaattcggcagaaatcgagagaggcttcagttttttaaggtataaatgattcagggaaatttttgtattgtaatatataaactaatgataggtacaatttttatatctttgtttctttttcttttcctttttttttttttttttttttttaagacagaatctcgccctgttacccaggctggagtccagtggcgtgatctcagcttactgcagcctccacctcctgggttcaagcagttctcctgcctcagcctcccgagtagctgggattacaggcgcacaccagcacgcctggctaatttttgtatttttagtagagataggttttcaccatgttggccaggctggtcttgaacccctggcctcaggcaatctgcctgcctcggccccccccaaagtgctgggactacaggcatgagccaccgtgcctgccgtatttattattttatttatttatttatttatttttgaggaagagtcttgctattgcccagacaggagtacagtggtgtgatcttggctcactgcaacctctgcctcttgggttcaagcgattcttgtgcctcagcctcctgagtagctgggattacaga

SEQ ID NO: 80829 - DNA, 1333 bp, Homo sapiens
gcctcaagccatctgcctgccttggcctcccaaagtgctgcgatcacagacatgagccactctgcccagccactttagtagtttctaaaggttttatagtagtagaacgcttttgttcctcaaatgaaatcttaattggaaaccctattgtgtagagaaagatgaaaacagtggctctagtttaggagagagagcttggagggagggccttgtacattgagcctttcttccttctcattcctgagaatctttggaacgcagttgaatactgccatttgtctggactttttgaacatttttatttgacctaaattaattttgtcttaataaaaaatacatttaggttcagtatctgtatatttgtttttaactatgtgatatgaactttgtatttaccatattgaacattagttaaaatatttttaatgttaatattacaccttgattgtgagcacaaatttatatactaacatttgtatttcttaaatttaaacaaaatatagtggagttcaagagtttttaagaatgtggcagtgatccctcctggaactggaatggctcatcaaataaacttagaatatttgtcaagagtggtttttgaagaaaaagacctcctcttcccagacagtgtagtcggcacagattcacacataacgatggtgaatggtttagggattctggggtggggtaagtaaatgactaaatatatttcatttcttttggggtaaggatgtcaagaacattgtaaaagaacataaattattgagtttgtatagcctctttgaggctctgtgtttttcatctgtaataacagcagcaacaacaaaatcctaattgagagtttgtgatcagtgttgtaaaagaggatttatgagaagaaatttacacagtgtctagcacagcactactatttgtgaagtaattgaataattgaatgatgatgatgatacgtctacaaagtttgcttctttgtgtaaggtacttttgtggcttctcctggtcttctttataagtccagatttcttgccattttatacaaggcatgtccctttagccactcacccacacccatcttagagagactagtcatttctttacttacgtgggctgtctcttttcttttttttttctttttcttttttttttggagacagcatcttgctctgtcacccaggttggagtgcagtggcacaatcttggctcactgcagcctccacctcctgggttcaagcaattcttgtgcctcaacctcccaagtagctgggactacaggcacgtgccaccacgcccagctaatttttgtatttttagtagagatacggttttgctatgc

SEQ ID NO: 80830 - DNA, 1977 bp, Homo sapiens
cagctagctatgctcttttatatgccatgactttgcataggctatttcttctggaagaatgctttctgccgaccgtgactttgttgaaatgtggctactattaactcatccaagactggcctcagttatcttctgaaagtcttaactcccttgctgagttcagtgtacctcactttgtaagcttactctttcacagggtgttataaatgttgatttttttgtgctttttcattagactgaacttgttgaggttggcagggactggattctgtttatatctgtatcttgaatacagtgcagtgcctaacataatgaatacttaaactaatgttttaacttgaatatacttaaaactaatattttaccttgaatataaaggtaaaataatagtttttcgaccgtgcgagtggaatcatttcttttgggaagccttgggttcagtgtccacattaatagcaatatagcaactctgcaaagtactgtgtaagataagctcatgaaacacctagagattcagatgttacagagataaatgatctttaaatatactgtgctaatatacctgtctttattacgttaggggttggaggcattgaaacagaagcagttatgcttggtctgccagtttctcttactttaccagaggtggttggatgtgagttaactgggtcatcaaacccttttgttacatccatagatgttgttcttggtattacaaaggtaagttaaagttgtggtagctctatgacttactgaacattatttttataaaaattgaagagctctatgagagcagggatttgggttcattactgcatcctcaggtctcttgacgttagccacatcatcatagttatcatagtaataacaacaaacagagcatttagtttgtactaataaatacaaagaaatttgttgtgttcacttatgttagctcatttagtccttataacaagcctgtgagatggatactattactattctcattgtaactctgagaaaactaaggtacagtagggtttagtgacttaccaaagggtcgaaggcctgagtagtaaggggtagagcaaagattccaggcagtcagattcttgagtccattgtcttaaccattatgccttattagtgccttgttgccttaataaacacttgctgactacattattttttttctcttttttacttgaatttaaaaaaaatgtttagcaaaagttgattgtgtcgtctttaattaaattatttgcccattagaaactgttgctctactaagtaatgctttcaaaaacatggactgtagaaatgtgatatatcatttttctgttgccgttttaacatttctctggattattatgtaaaaatcttctctctgaatttttaaaatactggcttcagaacttcaatacatacactgagcttgttaagcatattaatacacaggctcacggatttcctagtgaacaataatttgtaactcttcttcctaaatgtctggcctttgctaactttattttaatgattaaatcctattttgttaaatgaatgtacctggaaaatgttccacatataattccaatttgagtcccaatctcagcatttttggttagattattggtacgaaggctttccggatactccagtgtaaggaaatgataatgcctccctctcagcatttggtattgatccttcttccctaattagaaaagaatttggcatcttagagaaattattgattcaacgtatgataccaaaagatcaagtagtaaattgggaattgcaggattattcctagaggaaaaggagtatcccattatgtttttacagaaatcaattctttactttagacatcctgaaaactaacgctgctttttagccttctctagctgttttttcctgacaatattactgtgtgttttttgacattttagtttaatgttaaaaaattaatctattatatatgtttacatttattgaatatat

SEQ ID NO: 80831 - DNA, 1039 bp, Homo sapiens
cagcctgggcaacagagtgagaccctgtttctaaaagaaagaaagaaaaagggctgccacctaaacagacacactattgagttgaggtaccctgatttcaaagacatgaaaatgttaattatagccaccttgagctttcaggcccctttctaccctgattaacagtgacattggaccagtcttctctttacttcttatcttaaaatacccccaaaaccagaatgagttgattcataaggacaatgaaggatctcattccttcaccatcactagtattggttaaaaattttattttatagttttcagacaatcgttgctaatcttatctttgcaattttgtatgtgtttctgtgtattccttatatagcacctcaggcaagtaggagtggctggaaagtttgttgagttttttggaagtggagtttcacaattatctatagttgatcgaactacaatagcaaacatgtgtccggaatatggtgctatcctcagctttttccctgttgacaatgtgacattaaaacatttagaacatacaggtaagaagataaaagatcactagaataaacatgttacatttccaatgtgtttgataatattttataaattactaccttatccatgttatttactattcacaaaattacattatgttgaaacaacaactttcaagcaaacatcagatgtctttaaagagtgttgtgtcctcaaaccctagttccctgtgacacattgaaagcaatttaaaggaattattcaaaccattgatcctgacttgactgtttccccataatgatggatacctccacctctacttaggggtcataggttgcaatttaatggaagtcagccttaaacatattcacagcagtccccttctacaaccaagagtagaggagctatcagacaaaggggtttggggaccagtcttctatctagagaagaagaagaagcgcaaaattttgcaaaaaacaacataggaccacagtttctaaatctttttgtaacctgattaactagaaattttggccactcttcc

SEQ ID NO: 80832 - DNA, 2291 bp, Homo sapiens
aaattgatgaatggttatatagaatcctggagggaatgatccccccaagtgcaaaacttctgcatttgagttagtagaacattcaaagtagaaatggttagaagtgcctcgttccttgcatattaatcttgagttaaggttttagtgatcctgtgtaacaaattatcctaaaatttagtggcttgcacaagcagtaattactagctcatggtttcagtggggtcggtaattcagacagggcacagtggggacagctcatctctgtttcatgtcttgagcctcaactgcaagatttgaaaggaagggcctgcaatcctgaaggcttgttgtgcttgcatgtctaacagcaaattatgagctgtcagctgaggacttaggtaagtctatcaggcaaaacaccctcatgtggtttctccgtgtagtctgggcttgctcacgtggtagattctcaagggttaggagaaagagaaatgtaaatgaatatgtaaatagtatttgtttcttgttcatcactggaattcagtatccttacccccaaagatttcaaaattccttactgaggccaggctcagtggcttacagctatgatcctagcacttcgggaggctgaggcgggaggatcacatgagtccaggagtttaagactagcttgggcaacatagcaagacccccatctgtacaagaaaattaaaaattagccaggtgtggcagtacagacttatagtcctagcaacttgagaggctaaggcgggagaatcacttgaacccaggagttcaaaactgcagtgggctatgatggcaccactgtactccagcctaggtgacacagtgagaccctgtttctaaaaataataaatttattggcggggtgtggtggctcatacccataattccagccctttgggaggccaaggcaggaggatctcttgaggctgagagttcgaaaccaacctattcaaaaaaaacaagaccctcccgccaccccatctgtacaaaacatttgtaaaaaaaaaaaaaaaaaattaaccaggcacggtggggtgctacttgggaggctgacatgggaggattgcttgagctcgggaggtcaaggttgcagtgagctgtgattgcagcactgcgctccagcctgggcaacaaagtgaaaccctgtctgaaaaaaataataactaaataaatttctcactgcattttgttgttttgttcatcttcgttttaggttttagcaaagccaaactcgaatcaatggaaacataccttaaagctgtgaaattgtttcgaaatgaccagaattcttcaggagaacctgaatactcccaggtatatgcagaataacccacctcgtagcaaagagtgtaaattgtggtgtaatcccagcgctttgaaaggttggggtgggttgattgtttgagttcaagagtttgagaccagcctgggcaatatggtaaaaccctgtcactgcaaaaaaactacaaacattagctgggcatggcttgcgcctgtggtcccaagtacctgggaggctgaggtgggaggatcacttgagcctgtggggcgaaagaaagttgcagtgagctgagattgtgccactgcactctagactaggtaacagagtgagacttgtgtcaaaaaggaaaaaaataataataataaattctagagtacctgaccacctgggtttgaatcccagctctaagacgtgttagctgtataaccttgggcaatttatttagcctttctgcctcagttttctcatctgttagatatgacaatatctacctctaaggattcttagatattaaaaacaaattcatagaatagttccaggcacatagtaaatgctcaataaggggtagctaatctttttgttttgctttttgagacccagtccggctctttcaccagactagagtgcagtggcacaatcatggttcactgtagcctcaacctctgtgctcaagctcccaccttgctgggattacagacatgagccaccaccatgcttaacccctgttttgttttaatattactatttttttaatattattattttttggaccctgggcagggtctcattttattttactgcccaggctggtctcatacttctggtttcaggggattctctagtcttggcctcccagagtgctgggattacaggcatgagccactggacctggctgagggggtagctatcattattattattatttaagtaatgttattgtagcccagtgcttttgttttattcattaattttacatagagttttattatagtgaattttgtaa

SEQ ID NO: 80833 - DNA, 1336 bp, Homo sapiens
aaaaacaaaaaacaaacctgaccatgtaaagaaataaaactaaaatcattaggatgttgatttcaagagaaacttcttaaatggatatttatgggcaaagactaggatcgcctgaatccattaaatgaaagtataagtaagccaggtgtggttattcttgcgtgtaatcccagcactttgggaggctgaggcgggaggattgcttgagctcaggaccagcctgggcaacatagtgagacctcacctctgctaaaattcacttagccaggcgtggtggcgcatgcctgtagtcccagctacttgtggggctaaggcgggaggatcacttgagcccaggaggttgaggctgcatttagtcctgactgtgccactgcgctccagcctgggcaacagagtgagaccctttcacaataaaaataataataataataaataaatacagtgtaagtagttggatcagtcagaataaacagggatataaaataatgttgaaagccatgatgaaaagtttcaagatggttatattcacataaaatgcatgaaggaaacgatagaaatgccagaagaaataaataggaatctagttggaagtgggatttttaacaaaaaatacgtttcttaaccaaggaatagaaccctgagttgcagcaggctggccagtgaaaccctctggaacaggaaaaagaacgctttctctgctgtgtcccttcagcaccctctagtgaccagtcttcacattcttcacatcatgtgtgctgacaaaggagaaatgtttactaaccgtttacctctgtgatcacagagcgggcaggagggtagatttggagctcagaggcaataagttgatagctggcataggcatctattttatcattggacatctgttaagacagtgtttatctttgtgggaaaaaacacttgggaaaccaggttttttttttttttgagacggagtctcgctgtgttacccaggctggagtgcagtggcgcgatcttggctcactgcaagctccgcctcctgggttcacgccattcccctgcctcagcctcccgagtagctgggactacaggcgcccaccaccacgcccggctaattttttagtagagacgaggtttcactgtgttagccatgatggtcttgatctcctgacctcgtgacctgcccacctcggcctcccagagtgctgggattacaggtgtgagccaccgcgcccggccccagattttgtatatgcagtacaattggtgttgtggtagtttaattgcatactgatctactagtcttgattttagcaaattttcatgtttcgtacatttaaatgtgcttgttttaaaa

SEQ ID NO: 80834 - DNA, 1378 bp, Homo sapiens
attcctgggtaatttttgtatttttagtagagacagggtttcaccatgttggccagactggtcttcaactcctgacctcaagtgatctgcccacctcagcctcccaacagtgctgggattatagccatgagccaccgcacctggcctacagtcataaaatttggtaaatgtgaccgagtagcaagtggtctctggcttttgagggtttgtattttctgtctgagaatcacagttttagtcttgtcactttctctattctgagatctctagtacttggctttcctttcagagcctttctttttatgatttcttgactttttgttcagaaagtgttaaacttgtacaaaaacaaaatagtccactgaattgccatgtacctgtcaattagcttcaataattagcaactcatagccaatcttgtttcagctatgctacactcacacacataggatccctttggaggaaatcttcggggtcattttaacagaaaaaaatttctgccatctcttgagaattactataaacagggatgattaagaacaacaaagccaaatgagatctggattctgggtggtaggctggactcgcttagtagataaaagttttgcttgtgaacatcaccagactcctgtcgtgcccatgcagatttatgcttcagctgaattacaactactgaatgttatgggcctttagcatcactcacaaaaaggatttttaatgttaaatcatcaaatgtccggtatctgctatgttttctgccagtcttttattctgtacatacccagaatatttagtttatatttttgtggaaatttgtataggttggatttaaaggcttccaaattgcagctgaaaaacaaaaggatattgtctccattcattatgaaggaagtgaatataagctgtctcatggatcagtggtcattgctgcagttatcagttgtaccaataattgcaatccatctgtcatgcttgctgcaggtgggttgtggtttatggccatactttttctttttccttaattattgttggcttttctgttattgtaactttgtttcttagatgatgcatgagtgtctacatttgatattgagagactttctagtattttagttaggtcttaaggagcctgagtttgatttatgttgtttttattacaccgaaggtaaatttactgtttactataacttacctgtcaattaattttaggttgtatctgcttctcttgttaatttagaactatagttaattagcaggtatttcttgattatctagaagttaaccataacagtgtggtagatttcattaaaagttataaaagtagtaaaagatcattgtcttggcaaggattgtaaatgaaattaatttgtatgcccat

SEQ ID NO: 80835 - DNA, 1131 bp, Homo sapiens
agaataaagtggacaaaataatgacagtaagtttatgaattcatactttaatctgttaaataaattacttctcactttttactttaatatgggtgagagagggaaagaaacattgccataataaatcattgtttgttggctgtgcaggtcttttggctaaaaaggctgttgaagctggtctgcgtgttaaaccttatataagaacaagtttatctccaggcagtgggatggttacacattacctcagttcaagtggagtattaccatatctaagtaagcttgggtaagtaacagctatcgcacttcatattgatattggtgttcagtaggtactgaagctgcttgtttgtgcctttcatatacaaagagaagatagaaaaaatatgctttagttttacttgctaccttgccattaccatacaatttttgatgccttatcactcaggaaacacttattgggcatatcaaatgagcaaagcaccaggttggatacacagaagtaggagatgtggtcttagcttcaagatacttagttgggaagacaagacaaacaagtacaaccaaataacagttacagtgtaagaaacgataccaagtatgcacaatttctgtgagttgtgtaggtcagttcaaaaaagaaagaaatcttatagtttgcatttattaactgaaaattgtcttaattttagttttatgaggttattgggtctataatacataagtttaaattgtccctgaactttggagaaagtaacttatgttttttgggctgggcgcggtggctcacgcctgtaatcccagcacttggggaggccgaggcaggcaaatcatgaggccaggagtttgagaccagcctggccaatatggtgaaaccccgtctccacaaaaaataccaaaattagccaggcgtggtgacgcacacccatagtcccagctactcaggaggctgaggcagaagaattgctttaacctgggaagcggaggttgcagtgaacccagatcgtgccgctgcactccagcctgggcgacagagcgagactccatctcaaaaagaaaaaaaaaaaagtaacctatgttttttatgtaatccaaaacaattgatgctagttgtgtggggattttttggttttg

SEQ ID NO: 80836 - DNA, 1036 bp, Homo sapiens
tgtgttcgtgccaattatcttgcctctccacccttagtggtagcttatgccatagcaggcacagtgaatatagatttccagacagaacctttaggtatcttttcctttatgtatatgtatacctacacatacttttcccaatggaagtcgttatatttttgaaatgtttcttagaccatctattctttgaattatttcaggaagacgtatgataatgtatagttattaatttctgtgtttatgtgaagaaaataaaatgtacaggtaattagttcttccagccgcttaagcctgaagcaccctgttgaatcatttacttgatttccatgatatgtctttgaaaaggtatgaacattttcagagttatttttttactgagtatcatgttcaaaaattttaaccaggtactgaccccaccggcaagaacatttacctgcatgatatttggcctagtcgagaagaagttcatcgagtagaggaagaacatgttatactatccatgtttaaagcattaaaagataaaatagaagtaagagtcttatgtgtttcttaaatagtttaatcaatttgcagtgttcttttatttcatatatcttctgaatagaataaaaattaaaattacattattttgaatacagtttttaatgtgtaatagtaagtttgtatctggaatctgtagttaaaaagaaaatggcggctgggcacagtggctcacgcctgtaatcccgacactttgggaggctgaagcaggttgatcacgtgaggtccggagctcaagaccagcctgaccaacatggagaaaccgcatctctactaaaaatacaaaacaattagccaggcttggtggcgcatgcctgtaatcccagctactcaggaggctgaggcaggagaatcacttgaacctgggaggcggaggttgcggtgatccgagatcgcgccactgcactccagcctgggcaacaagagtgcaactctgtctcaaaaaaaaaaaaaaaagaaagaaaatgtcttagaggatcagaattcattagtgttg

SEQ ID NO: 80837 - DNA, 4689 bp, Homo sapiens
agaaagggatccgaataatttagagagctccataaaaattcagaaaaataatctgtaagaaggttctgtaaatactttgataaaatattgattcagtatgagatattagactaaaagtatttagagaaaggccaaagtagatttttgccccctttaaatgctcaataaataactttcagaagtgattagagggaataaaatgcacatttattacagggtgtgaaagctgttttggccgaaagttatgaaaaaatacacaaagatcatttgattggaattggcatagctccacttcagttccttccaggagaaaatgcagattccttgggcctctccggtagagaaacattttctttaacatttcctgaagaactgtctcctggaattacattgaatatacaggtatctctaaatttttcaaatatatgattatgcactcaaatgtttatgaattattgaataagaatcaattgctgtaaattatatactaatgtcacttaatgaatgttaagttgccatttaagatgactctctcttccatacttagatctagctatgttaatagttcatgttctctgaggaaaagtggaaagaactgggtgcttataccagaaaaaaagaacacatgaaggggaatcttgacttccacttaacaagtgtcagctttcttttcatggtggtcatttttttgctgtcctgatctaattttaaccgaggcatacataccactccaaagagagcaaagttgagcgttcaaagttagagcaaaacagactttacaactaagaaaaaaggggaaagagtaggagttactgattacatgcaatcaatatttggtgtaaaatgaatgtgagtagtgagtataacttccccaattaataagtcaaaatctaaatgcagctatttttctacttaactatgaagcccatggtcaggtatctcaggtgtttttcaagcagcagcaaagtttcaggcaatcagaatataagaaattagaaccaagataaatcagacagaatctgtggcaagtatagtcattaaatatgaagacaaatggtcttaaccatcaagtagcacctggaagatttacttgctcacatgagatgtttttgctcctttcaagacaagcactggaaaagtattcagcgtgattgcttcgtttgaagatgatgtggaaataacattatacaaacatggaggattattaaactttgtggcacgaaaattctcatagtatctacttaccatagatacctttcataactggtaactgcaaagccttttgtgctggacccaggaatccttaccatggagcagcagatagtcccagtatactcacttatctcatccatggatgtaaatgatgatgaatcaacatagtaactgaaatgaaatcttcttgattttaaataatatacgaatggtgctattaatattgctaaaatcaacgtgtgaagtgtgttgtggaagagacctgtaagtatggggggggggcgatattttatcagaccattttgtaaataaaggcagaatttgtgttgaagattcttatatgaataaccttcctggatttgtttagttttgcaccaataaaactgtgtactactgtttgttggtttaagagtagcagattgaaatataagaagccagattagactctaaaattgtggccattggaatctcatttataaatggaccttttaagtatattaattcctcttcagaattgagctggacacatttggcattcttagtttgtcatataaccaggtttatccttagtctaactgcaagggatggaacctgccccaggtcacaatcattctgtccaatccagccaaggttccctccacatatgaagatggaccatggcaggatacaactgattgtgtggcaccatgtattagcagtgggaatatgtatcacatatgatgcagcctttcatatttcagcagtttgccactgtgactgtctggcaagcccccagatggcgttatattaattggattagattattttgctcaccttatgtaatactgtaacttcctataacctaatattttcggtatcattaaccaaaatttcacactcatagttgctaaagagaatgttattcaatcattaaactctgaactgatttcttctatacatttaaattatccaccctcaataatacgggtgctcaaccctatgcattttttaagtgttgctatttcttaattaaattgatttcctgtcattttgaatcatttatcacctgcgatgcatgattctattaattttgttatgttactgttttaaccaaagctgaccgtaaggataaaacacttaagttgttgctgagtactatatatcctcaatatgcatgtctgcccatcacatcaaatgttctgtcaacaagatgtttggtaattttttttaaaaaggttggaaaattaattatagaaggttctatactgtttttttaattaagaaactaagtctagcaggctaaaggttaattgtagtgattttttttcacatagatatctttctatgacctagttagttactgcaattcagaattagttcacattgcataaagaattacttgttgtaagcaaaatgctgaaactaccaaaccagtggatgaagaccactaagaactttgcacataatcatacaatcttttgaaaatattttgcaaatatgtgtttagacaataagatggactagagttcgacaaaatgatttctttatttaaattttgtataagtattttcttcgacactttcaaattatattgtgttcttgatatatgctgtatatttatttgttagtgcatgtgtttttaatttacatgaaaacatgagttaggagaaattacaggttgaaagatgaaatgcctgtatgtgctctgaagaaatggtaattccagattgtgcagggggaaacaaatctattttgttttgttttgttttttgagacggagtcttgccctgtggctgggctggagtgcaatggcgcgatcttggctcactgcaacctccgcctcccgggttcaggggattctcctgcctcagcctcctgagtagctgggactacaagcatgcaccaccacgcccagctaatttttgtagttttagtagagatggggtttcaccatgttggccagatgatctgaatctcttgacctcgtgatccgcccgccttggcctccacaagtgctgggattacaggtgtgagccaccacacccggcctatattgttttgaaagcatactctatatatagttatgggcagaggcacaggcatcctcagcagctgattcaggagatgatggtaaagctagctaactatgaattaaacattcacatatccagtctacctggtccagtaataatacaagcaaatcttgtatttcaggaacaaatcaaggttctcttaattttttggcttatatacaatgaagtaaaaacttgataaacatggtttcaaattgaggaggagagtcttggatgtatgttttaatatgtataccttataattctgcctctagccaaatgctatgtttgcaaaatgtggcatctgttagtttttattgtctgtgtcttctttgtttactataccttgggtaattttgtgttaccaaaaaaaaaaaaaaaaaaaggaagtgtaatgtcagacacacaagaaaagcaaatcagtgttgtaagcttaaagtacaatttcaaaggtcactaccaacagcagggttttttttatactttgaaaacattatgctacatatcattgccattttcatattttggggttttgctactcttatacaatggaatcaatggaaatgtcatccagccactgaattgccattattatatctaaaaagtttctaagatgacagttatcactattttgttttatctccatgctgacatttgaaagaaggtactagtatccctctagccagattgcttagtttttcgttggtaatcaaacaacagttgtactaaaggaaagtaaagctaggacctaaatcagaatcatagttgcctgcatatatggtaacaaggtcgtgtgcatttgctttcacagtgatgagtgagaggatgagaagaaattatttgacatttttctgtggttgaatagaagacacctttcttttgtctttaggtttaggaggagatactaagatactggatgtttatcctatcttagtttggttggagtaataagagagaagaagagggtggactttggcttttcagtgttttttcccctaaagagtgatattgctgacgtttctatcaattttacacataatatgtggctatgaaaccatatatctcacttaagtaacaaagtaatcactttgtctatcactaagtaatagacaaaaatcattgtctattatttaaagccaacaaaacagtgtaacagttttaagttcaataatgttaagtattgtatagaaatatattggaggcaaagttcagttgatgacaattgtgtatatgttactgatgctgtaaattatttttaataaagaaaattgtattatcacatttgattcttgttctgttttgtagtagttgaaaataaaacaacatgatgtaaaaaatatgctgccatccggctgggcacggtggctcacgcctgtaatcccagcactttgggaggccgaggcaggcggatcacgaggtcaggaga

SEQ ID NO: 80838 - DNA, 1033 bp, Homo sapiens
ggactaaaatatgtcctatttctcccagcacagccttttattacatcagtctatttggatggccagagctaacaaccttgctttacatggctatggaaaacagcgctctcctaagaggagcttaacaagtcaaagattgtatgggaacatctggaatagaaaggagattggccttcaccagttgcctctaaggttccttacaactttaagaacttatcattcatttcaaattcagaattgttctgacatcgttaacgctttgggagttgaaaatgactccaggatttcatcttggagttaatgcttcagtccatattgcattttgaatacttaccttataccagtttacatatctccagaaagaatgttaaaattccttgtaaagttttaagcctaaatacagtgtgacaggatatgttggttcccagaagtttcaagtgcaaagattgttttgaaactccatttaggctttgtcacagtaccttcagtgaacaaaatctgaacggcttaacttgcttctgaaagcaaatgcctggttagaaagtaaacaggaaacatgattgtcaagaaggcattaacttgcagtaacaggtgatggaaaccgatcagtggcacaagctatgcaagttaagaggctggagcaatcactttgggtaggaggatcagggaaggccatggcaggggctagggggtggttagcgtttgagggttacctctcccttattttctcttctctttttttttctttctttcttttctttctttctctctctctctttcttctttcttttctttctttctttctttcttctttctcttgctctctcttctctcttttctttcttttctttacttttctttctttttgatggaattttggtctttcgcccaggttggagtgaagtgacgcagtctcatctcactgcaacctccacccctctgggttccagtgattctcctgccgcagcctcctgagtagctggaattataggcgccggccaccatgcccggctaattttttttttatttttat

SEQ ID NO: 80839 - DNA, 1029 bp, Homo sapiens
ctgtgccatccttactttgcaccattcctattgcaattacctcaaccagttcgctgccctcggtctctcaccagccagagtgatcatttaaaatgccaatcagttcctgtgggccttgggaatcattcagaggagccccattggctgagagataaaattctgtttttacctgggcacgcgggctctccaggatttgattccagcttacctttccagtcttgattccctatattccagtatttggaaatgtgggccttggactgaggctttaccaaataacgctgaacacctagtattgccttttgcacgaatggtactgatggtgcccaagataactgcctccacccccaagttcaggacccagatcactctctggagaaggcctcagcctcttgccttggctttcaaggctctgcgtgatttggatactcgcttagctcttatttatatatattttaaaagcatcagcagtttatctcatgcccactaaactatcctgcctccgtaccctttgttcatactttctgctctgtgtggaatgcccttctttcttcccctgttctttctcttagacccaagggttctcagccttatttctgcctctcccatctctgatttactttcattttctgtatcgatttctcaaaaaatactttcttgattctttcatcatcccttttcccaccctacccccggttcctctttccacattataatctatgactgcctctctcacctaactgccagtattagcttttcaggacaggaactggttttacacattttggtattccagcatctagcataatgcctgacacttagctgaataaagggagtaaataaaacagatttgtaaagtcagcaaatgctttttaatttgtgaatcttattttaatgatgatctgattttctttttacaggaactatataaagttcagaaaacatggtgagttaatacacatgccaataaacggttgcctgataaacagtattgcttgtactcagtttacagacttgagtgggaaaatt

SEQ ID NO: 80840 - DNA, 2630 bp, Homo sapiens
ggtaggaatcactcatgtgtttttcctttgcagtctcgaagatatgactccaggaccactatattttctccagaaggtaaaatagaaattgtttaatctgcctcaagtttaaaaataaatgtgttagacttttagaaaaaaaaattacaaactttttttggtagttgcaaagttcatcctttttgtactttgaagcaattatcatcaccaggttgattataccatagaagagtgaaagtggaaatttgtttctagcttgcttcattgctgatttcttttgggccagtggtgcaggagcacagaggagagtcttggcttctcactgcttttgttttgtaggtcgcttataccaagttgaatatgccatggaagctattggacatgcaggcacctgtttgggaattttagcaaatgatggtgttttgcttgcagcagagagacgcaacatccacaagcttcttgatgaagtctttttttctgaaaaaatttataaactcaatgagtaagtgagattttaggaaagagtttaaaaaaaatctcactttctcacataagtgggatctatgtaatttgggagggctcttccgtgcgatgtggtagaattgaaattgtgcctttattttgcttgaaacctctttgaggcctggtaccatgtgttactccttttaagtgcagggcaaacacttagtggagaaactagcattgtgtaatgataagagtacagacttagtagtcacacagatttgggttcaactccaggcttcacccatgcaggctatgtgaccttgcaccgattatttaatttctttgggcctcagagcctcctaaagtggttgtggcagtttaatgaaataaaatgaatgaaataaaatagtatagtatctggcatttagtaggccctcaaagtattgtttagaatagctacgcaggattttgttgaattacactgaatcttactaaagaacaagcctcttagaggtctcgaagaatttagccaagccttgtacactgtgtgaaatgtttgttatatttgagtgtgcagaactttgcagctcatggagagctgaccgtgctaagtagagactttcctttcagtggtggtgggcttggtaaatgctgattatcagggccttttgataaacttgtccaaagtggtgtcacccctccacagagcctctgttgggaccactcaacagctggcaggcttggctaggcgtagtcacagggcgagtctcagctataagagagccagggcagccctcaggaagtgggcccaaaaaaatgaaatgcacctctagtaggagcctagccctgtacttcctaagcaggcttgtaaaccctcctgccattgtcccctgtcacctctgtcaagccaggccttaggaaatgaatattactcaagagcagtctgtctagcaaaatcttttttttttttttttttttgagacagattcttgctctgtcacccaggctggagtacggtgacgccatcttggctcactgcagcttctgcctcctgggctcaagtgatcctcccacctcagccgcccaagtagctgggactataggtgcgcaccaccacacccagttagtttttgtatattttgttgagatgggattttgccgtattgcccaggctgttcttgatctcctgggctcaagccctccatctacctcggcctcccaaagtgctgggattacaggcgtgagccattgtggcaagcctgtctttttattctttgttgctgaatcttcttgagattacattagcttcttggcgttaattttgttatcctattcataggtggtaatgataaatacatctattaaataacttaaagggtgcatttgtttatctttcatgttgagtgacatcgagtaaacatctcctacaaagataaaacttgtaggttttttctgaaggaagtagctgttgtgaagcaaacatagtgaatttctaatagaaattagaattttttaaatacttataaacactccttgcaagcatcttccctgcttacagatcaatgtctttttttcttcaagggacatggcttgcagtgtggcaggcataacttctgatgctaatgttctgactaatgaactaaggctcattgctcaaaggtatggtcataaatagcataactgatgatacagaaattagttttgatgtttcttttttttttttttgagacagagtctcactctgtcacccaggctggagtgcagtggcacgatcttggctcactgcaacctccgcctcccgggttcaagcgattctcctgcctcagcctcccaagtagctgaccaccacaccgggttaatttttgtatttttagtagagacggggtttcactgtgttagccaggatggtctcgatttcctgacctcgtgatccgcctgccttggcctcccaaagtgctgggattacaggcattagccactgcacctggcctagttttgatgtttctaaggagagctcacttttgcaaagattaaagtcattaaaaatctttgaattgaaaattacagatttttttcaaccaaacttacaaaatattatttactatgagaatattcagatgttgacttgttccctccccttcaaattacaaatgactgttaggttg

SEQ ID NO: 80841 - DNA, 1932 bp, Homo sapiens
ctaatatgttatggttaactatattaatcctacagtagtatagaacactagaatttcatacattcttgcttcatgaatgaacgtgttcctccaccatgtagattaccctcgttttattaataggatattgaaagtccaaaacaacattttcaaatctggaaactaactgctgtttacataataatgaaattcagcactggtcctttgtctgttccctcttctggctgtgtccaaatcgtagaaacaaaagtcgaatttgtaatggagcttatctatggtagccagaatacaaaacagtttatgaatgcttaagttcacagagtagggtttagctaccttcactgagctcaagtaactgtagtgatactaaatttagattattgatatgtttggctttttttctttgttaaaggaaaacgtccctttggtgtttcattgctgtacattggctgggataagcactatggctttcagctctatcagagtgaccctagtggaaattacgggggatggaaggccacatgcattggaaataatagcgctgtgagtatttttgttgtgctataaaatctagcagaatgtctaataactgccataattttgccatggtgatgaatgtaaacagtattttaagatagctgcaacaaccttaatgtgatatggaaatatctgtgatttctgttggtgacagcattgctgatatagctaatatactggggttcgttaactacattaataaatgctaattttcagttaggagttgtgaaattagaagctgtgattttgtttcacatctagtttacagaccccctgtattctatgacagaccccttgggagactgaggaccccaggttaaagacactctttatagagcattagtaccccctcttctcaccccgtgccgtgtgtgccctccctgtcatcaaaattatgtatatgggccaggcatggtggctcatgcctgtaatcccaacactttgggaggccgaggcaggcaaattgctcgagctcaggagttcgagaccagcctgggcaacatagcagaaccccatctctacaaaaaatacaaaaatttgctgggcgccatggcatgtgcctgtaatcctagctacccaggaggccaaggtgggaggaggagcacctgagcctggggagacttgaagatacagtgagctgagatcatgccactacactccagcctgggcaacagagtgagcccctgtgtcaaaaaaaaaaaaaaaattgtttatacttgtaatgccaataataattcaggcatttttcttctagaccaattcatgtttctaaaaaatgtaaaaacttaaaattctatgttgattcatgttttataggcagctgtgtcaatgttgaaacaagactataaagaaggagaaatgaccttgaagtcagcacttgctttagctatcaaagtactaaataagaccatggatgttagtaaactctctgctgaaaaaggtaattcatatcctctcctttaattctttcgactgagtgagggaaattagcagctgttaagatttttttcttttttttttttttttgagatggagtctcgctctgttgccaggctggagtgcagtggcgcaatctcagctcactgcaacctccgcctccttggttcaagtgattctcctgcctcagcctgccgagtagctgggactacaggctcgcgccaccatgcccagctaatttttgtatttttagtagagacggggtttcaccatgttggccaggctagtcatgacctcctgacctcaggtgatcctcccgcttcagcctctcaaagtgctgggattacaggcgtgagccattgcgcccagccagcaactgttaagattttaacatgtcatcctagttcattgaaacagcaaccttacgaattaggtgatgttatccctgtcttctaactg

SEQ ID NO: 80842 - DNA, 1477 bp, Homo sapiens
gggcatattggctcacgcctgtaatccccagcactttgggaggccgaggtgggtggatcacctgaggtcaggagttcaagaccaggttggccaacatggtgaaacccctgcctctactaaaaatacaaaaaattagccgggcgtggtggtgcgcacctgtaatcctgctactcaggaggctgaaacaggagaatcacctgaacccaggaggtggaggttgcagtgagccgagtttgcgccattgcactccagcctgggcaacaagagcaaaactccatctcaaaaaaaaaaagaaaaagaaaatgtcatttacatgcagattgccctcttttgtctacttccacccagtttcaaggaagcactactcagtttccctggtacaaaaaaattccttcccctttaggtatcagtctgcttttcttggccatttcatgccttttatttatttatttttttaagagacttgaaaagtccataaaaaataagctgttattaccagttgaagattctggctgagccctcagaggttccaacagttccgtctaatcagcacagctaatagcaggccggcaatagcaattggttgattatactttttctaagggagtgacaaaatggctgaggagacgatatttaagtaaaaattataattaaaacattacaagatcaaaagtatattgttctcataaaagggaataatgttaagtataaaacataggagagtgctgaactaacgtttcaatgatgtggcgagcataaaccatgagtgcctattaagcttctctgctaagtatgcctgcctgcctgcaatacaaataaatgtatgtgtttgtttttagtggaaattgcaacactaacaagagagaatggaaagacagtaatcagagttctcaaacaaaaagaagtggagcagttgatcaaaaaacatgaggaagaagaagccaaagctgagcgtgagaagaaagaaaaagaacagaaagaaaaggataaatagaatcagagattttattactcatttggggcaccatttcagtgtaaaagcagtcctactcttccacactaggaaggctttactttttttaactggtgcagtgggaaaataggacattacatactgaattgggtccttgtcatttctgtccaattgaatactttattgtaacgatgatggttacccttcatggacgtcttaatcttccacacacatcccctttttttggaataaaatttggaaaatggaaatgaaggaataaattctctgtagcagtaattgttaaatatacaaaaactgacagggcgattactttttgcacattgtggcttacagtcctttcacaaagatgggcacgttcctcaggctggccagattattcgtctctgtctgcaggaattggtttgagaatgaacacgtgagctgaacaaagccagaattgatgtgtgggtgtggatctcgcagctaggactgaggctgcccaca

SEQ ID NO: 80843 - DNA, 1060 bp, Homo sapiens
aacctctgttaatacttttgtacactctcactacagtttatatttttataggctattttctcaaggtgtttctagattccacatatctattttatataacaagttcttatgttatgtgtgtgactcccttgtgtgtatctgtgccagcctcagcctccgagttgcttttccctctggccctgactctcactgactcaccgatgtgatgtgcaggcccacttcttaccccagatagcctcgggtgctgcctgtagtcatgctgacagctgtacagtagccgccaagactgctgacggctggagacggttctggtttcaacaactacggtatattgatatcggaagtattctagacagatcctcagttgggttttctagctacatgtttgtattgcacagatccccacctgccatcctatagtgttgtcttcctgtgtgttccggggcttctgggcagctgggcctgcccggggaagtccttgcaggtgggaggccatacagagacccagtgtgtgccactgagcgtcccaccgctgctgggcaactggaggactgcagggggcgccaggtgactctctccttttatatcacagcagctcctgtgctgaccttcaagttatgttttggaactgtaatactaaaggaagaaataaactactaatttgtataatattctgcattgaaattcagttatagtcactagtgatggggctcaccccaagggcttggagggtggggcagggcttattggtgttgcggggggcgaggaggggctctccaaccttccagcctggcgtttctgggtgtctctgcccttggctcaccctggggcgggtgcatcaggatgcctttgccagcaggggcagccttgggaggccccaagaaccatggccaagctgcaggtgtgggctgggggcaccgaggtgggaaagccggaagctggagactccctgtgtccggataaccccccgcccagccacaaagaacaggcatgcctccttccgccagctgtgccatgccctgcctgagtcacaggcttgtttgtctcccgtcttggctga

SEQ ID NO: 80844 - DNA, 1311 bp, Homo sapiens
gaggctgagtacagcccctgtggctggaggtggtcacggaggcctggcaggacagatgcactggggcagggggcggtggcgggagtcgggggcagaggccgctgcaggctggcaggaggccccgggaccgcagttctgtgccaggatctgtccgggaacaccagggatgagcaaggatggagatggggtggcaaggcgtcgccctgggcaggctctttaacaggcatgtgagggggtcagggtggggtctcaggacctttcctccagaaacctcagcccagcagcacccgttctcgagtcctggggttggccatgagtaggtgggacagagacagcaacagttggagacctgcaactccggttcgggagccgctccagaaactggggctctctgcttggtggggagctgctggagcctccttaaggtggttggcgtagggagccaggttctgggtaccccaagctactggttctgatgcctctctgcccccccactccaggctgtgagcgggaccgcctgtccttcgggttctgcgagacgctgcgcctactgggccgctgccagctgcccaccatccgcacccagtgctgccgctcgtgctctccgcccagccacggcgccccctcccgaggccatcagcgggttgcccgccgctgactgcgccaggatgcacagaccgaccgacagacctcagtgcccaccacgggctgtggcggagctcccgccccctgcgccctaatggtgctaaccccctctcactacccagcagcaggctggggacctcctccccctcaaaaaaggtatttttttattctaacagtttgtgtaacatttattatgattttacataaatgagcatctaccattccaaagcacagcgtgacttcgtcttggatttggagaatcttaaaagtgagaaactcttccccccacccctctgcccaaaactccaccgccacagcacctcggcaggcgtggcttttcacctgctcctctgggacagatctgcagggggcagcgtagaaaatgagtccctgagagcatggcatctggtgaggcacggaaggcctcagaagctggggggctgctccccagggagggctgtctgcagagggtggggttctgggggcaggaaggtcttccgggcaggggcacggcttggcccttacttgctgcctgccttcagctcaggctcccagccttccctggggccccactctgtggtcctcagagacctgttccacagggattgagcccaccatgtcacttgcagggactgccccctggagtggtggggactggggccccca

SEQ ID NO: 80845 - DNA, 1072 bp, Homo sapiens
cctgcccatgggctgcggcaggtcctctgccctgtccctcgggcacagcggtgtctcgcccacatctctgcccactgctgcatcagggctccatcccggcgcccctgcccaggcttctcaggcatgtcctgtgtgaggggctcactgccctgccgccccgagggctgtcccacggttctcacgccccttccctctgcaggagccgatcccacaagtgagagtggggttccagcaccaagtgggctctaggaatgggaccaggtgctccaggaggcactgagggggcggctgggagcaaggccaggccagtcaggcacagggcgcagggacggcttcccagaggaggtgtccctgcccccactgctagggctggccctggagacactcattcctcccccgctcccctcagtgctcaggcccctgtggtggtggtgtccagcggcgcctggtcaagtgtgtcaacacccagacagggctgcccgaggaagacagtgaccagtgtggccacgaggcctggcctgagagctcccggccgtgtggcaccgaggattgtgagcccgtcgagcctccccgtgagtcccctgaccccaggctccctgctgaagtgaggtggggtggggagggtgatggggaaatggggtcgtcaaaccattgtgcccacggcactggctggttccatctgtagtctgggctcaggagccacatggccactgaaaatcctgatgccacaggatgccatgctggaggctgggctgtgctgggagtcagtcaaggggagtcccggccacacaacatcccataggcagctgtctgaccttgggggagtagagggagtggccctggcccctgatttgctgtgtgaacctgggtaagctctttctcctctaggtctcagtcttcccacagtgagaccagggatgtccctgaggctgtgtgaaaactgggcctgggtgagtccctgtccccagccctggcctgtccattccctggctagaggactgcctagagtgagcaatggaaccacaggaagggcctcctttccagggtcctgctaatgaggtaatggggtttg

SEQ ID NO: 80846 - DNA, 1081 bp, Homo sapiens
gcaatttattcctatttttagtcagggaatctcaagatcagaaaaggaaagtgaccaggcagagccacacagcacagatctgggacagagccaggaggcgaattcaggcccctggcctctgatccctgtgtggttcccagtgccccagagagagctcactgaggagaggccctggagacgtgtgccctgggcctgtccactggcagctaactccaccccatctgggcctccagtgtacccagagctggagtctcgacgggagcgttgggagcagcggcagcagtggcggcggccacggctgaggcgtctacaccagcggtcggtcagcaaagagaagtgggtggagaccctggtagtagctgatgccaaaatggtggagtaccacggacagccgcaggttgagagctatgtgctgaccatcatgaacatggtgagtctgtgtgggccaggagcgggtggcggggatggtgttggggggtggggtgcaaagagtgggtgcagggcaggaaggctgtcaggctggaccccagacccaggtctaggccccaagtaggaagaagggtatccaagctcctgaggccaggaaggggtgggggtcttggcagctagtcactatgagagagcctgggcagagggctgctgtggggacaccatagggtgtcatgccactaggagggggagcaggagtgggagactgaggcagccacaaccctgtgcttgcctggggggcttgtagactagttgggtccttcatgtttccctgcacagatacttccttcctttgtgtcaggacctgtgctagatgctggaaacacagaaatgcctgatcagactacactctgcctgagactctgcctgagacatcagcacacattacagttagaagaatctgtgcagttctatggtcactagctggtagccttgggcaagtcacttgccccttctgagtctcagcctgctcatctgtgaactgggcatgacgacagtaccttgtggggtgggcaaactgctcttgaccccacatgatggatgagatatcagaggccttcagagggcgagtaacttgcccaggtcacacaac

SEQ ID NO: 80847 - DNA, 1095 bp, Homo sapiens
gtgtgcacactctcagcgtccactgttcccaggaggccctcagcttagattgctcaggcaaaaaccatgggctgtggccgcacagggcctaatgacagggcagcccacaacgcaagctgcacaacgtctggacctttgaaggcccatctgccctgcacagtattcccatttatggagcctgtgcctgtcccttaatgtacaattgatcttgttgagcctgtgccacagctgtgcacatggggcatcattcccatttcacagatgaggaaacaggctcagaggggaacttgcccagggtcacctagtcattcagtgagtggtgggcgggagggggggactccgcattcatacccaggtctccagacccaagagctgatgcactctccagccctccctccaggccccctggtcctgtgtgacccaaggggcagaattggtgcctatgaggggaagtccgagggacataaaaccttctttcctgttggagccctgagcttcctcaggaggtagtgggcatcaaagatgcttcccagggcccctcccctccctggactctgaatgctggcggacatgtccaagacactcctgccagcttcccttctctgggcagccctgggcccagagaacagggtgtcctggtggccgtgggcatctcctccgctcgggtgtggctgtggatgcttttggagtgattcattgccttagggagatagagggaaggtcagaagccctggccagctgggagggagcacagtgctggaaatggctggcatgcagaggagatggagaatagcctggaggcctgggcacaagctgccccactcaggatggctgtctgggactaagacaccgttttgtcagatttggatgcagacacatttccctctcctaatggggtgggtgtgtggggcagcatccccaggggcggaggcttctgagctccgctttgaaggtttggctgtgtgtgaaatggcagagaagggctttccagatggaggctacagagtgagcaaaggcccagcgggaggaaagtacagtgtgtccgcgggcagtcacaggtggtgtgggcagtgggggctcagctgagcaggacgg

SEQ ID NO: 80848 - DNA, 2033 bp, Homo sapiens
ctcaccacccccactctcccccatcgccagctccgccttaacctcccacgaaatcaaatccccgctttaccaacccgcagcagccgggggcatggagagagaagcgggggtggggtggggtagggtagccggcccctcccccacccggggggggggggggggcgcctccaccgactccgaactaccagtcccggcgtgccctggggcggcgcgggcgcaggggcgcgtgcgcggcgggctgtcgttggctggagcagcggctgcgcgggtcgcggtgctgtgaggtctgcgggcgctggcaaatccggcccaggatgtagagctggcagtgcctgacggcgcgtctgacgcggagttgggtggggtagagagtagggggcggtagtcgggggtggtgggagaaggaggaggcggcgaatcacttataaatggcgccgaagcaggacccgaagcctaaattccaggagggtgagtgtgcgcctttgggaaaaaggcacctaacggcgcaggagatagaggcgggctcgaggtgattgaggcttgagggccgggggcggcgcgggctgcgccctgagaaggcggcggtcagtgctttgtgcggggaaagcgcattgcggatggcaattccggtgcgtcattgtgagaaagcgctttgtgaagcgagagtgctgcgcaggcgttagagtgggagagagagcgtttggcgcgtggcacaccctcgtcaagtgtttgttattgttctgaggaagagggcgcggagagagcagcctattgtagggaggcgacgggagcgccatggcggcggttaggggaagtgatgtggcggcggggggggaggggcggtggctgtttcgggcggtcctgcggcgcgcccggccgcttgggcagctacgacgggtttttcggtgcttcctggagccccggggtggttgcgttcggtggcaactcagctgcggatgggggtgggtttggcgccacggggcgggagaagtgcgttgtaaaatggccgttgcaagatggcggcgccatcatggccgccggcgtctcggtcccgtatggaggcacagcttacgggcagatgcagcgcccccttccacgacgaccagaaggttgccggggccctccgcataccacagagtggtgggtggggacagaaaaaaaaaagtgagatgagcgttttcctccgctttgtgttgcctggaggcatcactctgctattcttgggcgcagtgccgagatcctatggtaatgtgagtgagctctcgctttgcagttgctcgtaaaaagtaaataaaaatgatctgaatgcagtgttgacgccgtttgcatttgtaagtcccattgcctcgacgtcattttttaaatgcagtaattgtttgattagttgcagtgtttaacaatgacttgaaagttgaatttctttttattaattggttttcgattgacatgagttttgggtaaggttagactgactcccagtggaaggcagctctttaaattttcacaacgcttcagttaacgtataataaggtggaggtctaatagctaaaaaggaagtaaagtcctgttgagaaaggaggaacactttaacattccttttcattgctatggaaatttatgctagttaccgtaaatacgatgtctacatgcgtacgatttttgttctaggggtttttagacttgcattagaattccttttagagccgtaaacctcaaaccgtagtactgcgtattttaagtttatggaatatttaaggaggttttaggggtattttgttaatgagtgactttttttgtttgtatttttgagacgatgtttgtcacccaggctgtagtgcagtgacgctatctcggctcacctctgccccccacccgggctaaagcgagcctcccaagtagctgggatcacagacgcgcgccatcacgtccggctaagttttgttttgttctgttttgttttttagggtttttgttttttcttttctttttctttctttttttttttttttttttgtatttttggtagagacggg

SEQ ID NO: 80849 - DNA, 2865 bp, Homo sapiens
ttttgtatttttagtagagacggggtttcaccatgttggccaggatggtctcgatctcctgacctcgtgatccgcctacttcgccgtcgcaaagttctgggattacaggtgcgagccaccgcgcccggccgagaaatagggtttttaatgattcttgtaaacttgttaaaaaaaaaacaactcgtaaacttataaaaaagtttttttttatttgataatggcgtgcaatatatgttgtataagcaattcttaaggcatagtgattgctttgcactggacttggttttccattggaaattcttttttgttttgttttgtttagattttgagacggagcatttgctgtcctgggtcatactcctcagctagctgtatattttttcaacaaaatactagggcctcgtagctagaatggaggtcacagggcctcggtttcagtgcacttttttttccggcagtagcagccaaggggagaaaaatggtaggccattttcagagtgcctttaaaatgtaccaggagagtgaaattaggaaacacagatctgatctgatcttgttcgctgtttattagcagtatagtttacccattttagttctcgttcctgggccgttggagaagtctttgatcttcccgttttccagtctccgtctttaattcagaaatgctattcgtaggtccagcagcctctagcagtgattctttatagagtgaccacttaaaagaattatagaactgatttaaaaataaagttaataggtcgtgctctgggagagtctaataatatgggtctttggtggggcttgaaaatacatagttttaaaaaatattttaaattttagtggtttttttttgaggcggagtcttgctctcccatccgggctggagtgcagtggtgtgatctctgctcactgcgacctccagctcctgggttcaagcgattctcatgtctcagcctcccgagtagctggtagctgggactgaaggtgcacatcaccacgcccggctgatttttttttttttttttttttttttttgagagggcggctccttctcacccaggctggagtgcggtgacaagatcttagctcactgcaacctccacctcccgggttcaagcgattctcgtgcctcagcctcccgaatagctgggattacaggcacacaccaccatgcctggctgatttttgtatttttagaagagacagggtttcgcctgttggccaggctggtctcaaactcctgacctcaggtgatccagccacctcggcctccctaagtgatgggattacaggcgtgagccacctcgccccgcctgctcttttaattttagagctaaaaaagagctgacattcttggatatttcagttgtccatgggtcttttgaaaccaagtggactgaaaataatgtgtgcaaaatctttcaagctacactcaaatgtaatctgaggtactgcctagaattgcttccaagacttccaggtcctgacattttctttagtcttgaagtaggctcaacgtagactgttacgttccaaaggttaggctttattgtctcatttctttgttcattgaagcaacttagcacctagaacatcattccacatttgaagaatgaacatagtgagaccccttaatccagccaatctctgatgcatattgatattttaatttgtacgatatttcactgagtaaaagggttggaagcagagatacaagtggagagtaaaggtcctcaacttagaaaaacagatgaggaaagcatttaaaaaactgtattttcagatatatagttaaaaccaaccaaccaaccaacctcgacagctttgcaggagagtccgcttatgtgcttaacaggtgatagatgatttgattatttaagtagattgacctgctaatgaattgtttttgtttttaccatcggataccaacgtgtttttgtcgtagggtatagttgaagtttgagccaaagtggtgctctgtatacccgtcctcatttttcctaatttggctaggaataccttaataaaagtgtgatgactctctaagatgttaatctttttatatatgagaagaaattacaattcagtactttttctccctttacaggtgagcgagtgctgtgctttcatgggcctcttctttatgaagcaaaggtatgaaacttgttttcttttgagaagttggccaaaactactggttagatctggccatttaatatacaagtacagtattttgttgttgcctcagtaagagagttgccttttttaggttcgtagttaataaatttcttcatctttctgagattcttattgttttgcttagtggctcaaatgaattaaaacattgctactctcttccacttttcttactcatctggaagtagcatttgaggggaatgttagaaggggaagatgggctgtgggaacaaagagcattttgtggttaatgacttggtgagaaaacattgctgaagttacttttaaaagtaatatatgctgagtaagcattgagctaattatattaggttaaaggtaaaagccaatattaaaaataagtacatttaactgttgattgttgatttgtctggcaaagtttgtattctgggaggccccctttgtatcagggtgtgctcaagttataaaaactgattttacatttagctgaaggtaagcaggagaatgcattccaaagtaaaaaaaagtttcagtattttgtttctgataacttttttagtacaaatatttaagacttgactataccttaaacagtcgtagctccaaaaatgagcccgtaaaatacaaaacagtataatgtttaatttatgtaatttctgcataaattcttggtgagtagttttatgctat

SEQ ID NO: 80850 - DNA, 1062 bp, Homo sapiens
ctcagcctcccgagtagctgggattacaggcaccagccaccacacctggctaatttttgtagttttagtagagacggggtttcaccatgttgaccaggctggtcttgaactcctgacctcgtgatccacctgcctcggcctcccaaagtgttgggattagaggtgtgagccattgccccttgggagactgtctcttaaaaaagaaatcctaaaatgactgaatttggatgtatggagatggtcaggaatttctaagtatatgtatacgtacatacatcttaatgatataatgtttgtaagtgctaaattacgactcatggccaggggctgtgacgtacaagcctgtaatcccagggctttggggagccaaagcaggaggatcacttgaggtcaggagtttgagatcagtctgggcaagatagcaagactgtctctaccaaaaaaaaaaaaaaaaattatgtcctgttaatcgtttttatccctgaatgttgttattgttgtatcaacgtttggcaaactctactaaactggctgatttttctcctggcacctgacactctggtgaacaattttcgaattgaagctattgaaacaaattaaactgttgtggttattttggttttctcttaaagacttttaaatccaaaaccagatagtcatcacttgtcatagttaatgacttgcctctagtaattccttttgtctggctgcttttaagaaaagtgaaatatttttaattcattgctttacaagttgtttaaactaacttttcagaaacaggtccatttactgcctttcataagctaatgaagtttttttataatatagtttaaagactttgctttagaggaatttgcttttgaaataaatatagctcctggctgattagactgagaagacacaagcatagctttcattagctgtccttggatagcttttgtaatccattgattaaagatttaaggtgaccttttatgcttgtggttctcagctttgttggaccttttgtgactaatcttcagttttgtaacttgagtattctacaagcttagtgttcttagt

SEQ ID NO: 80851 - DNA, 1003 bp, Homo sapiens
tttttgtatttttagtagagacggagtttcaccacattggccaggctgtcttgaactcttgacctcaggtgatccacccgcctcggcctcccaaagtgctgggattacaggtgtgagccactgcccggcctttttgtgtgtgtgtgtgtgtatgtaaagtaccgatgttattgatcttgttctaggaatggacagtgggtatagattgaacacattctagaatgtccatccagtggagctgtttttcagtgatgggacttttctccttgggcctcacaaataaccctgtctaaaaatttacccaagtctcctatttggtgattgtaatgaaaagacttgtaatttttactatgggaggttttacattttattaatgatgccttgtccttcaaagatagcactgccattgctatttagtattgttcttgtggaattgtcctctagtaacttaaggctttgtgtcacctgactcaggctcttttacctggtttactatgggatcagtgccatctgatttgatgagtattctgttactatggaaggagtttatttttcctgtgaagttcactggccctgtgactttggtcttgtttcatctagtactctatccaggtgaccaacccagttaattttatttctttgttaggaagttgttttcacgtatcagatgttttcagctgagaatttatcagaccttttacttccattaatataaatgtggaaaggtagaaatctgaaatgcatagaagtgcatcctgacaacttgtgggtatttttttcccagttaatgataattaaagtatttctaatcagtgaggtgtggtggtgtgcacctgtagctacttggaaggctgaggcaggaggattacttgagcccaggagtttggggctgcagtgagctatgatgtgccactgcactctagcctgagtgacagagcaagatctggactcctttaaaaagaaacaacaacatgtatttctaataatgataggtaatatttaa

SEQ ID NO: 80852 - DNA, 1350 bp, Homo sapiens
tgaccaacatggagaaaccctgtctgtactaaaaatacaaaattagctgggcgtggtggcgcatgcctgtaatcccaattactcaggaggctgaggcaggagaatcgctagaacccaggaggcagaggttgtggtgagccaagatcacgccattgcactccagccagggcaacgagagcgcaactctgtctcaaaaaaaaaaaaaaaaaaaatacacacacacacacacacacacacacaaatatctcaaaaataatctcattttgaaaatggcttgtgcagggtactttttaaaattcgtacaacaaaaccttaatccctaaattggaattctcttaaacttcagttaatcttttttcaaaaacataatagatgatggagatttctaaattttcaaacctcattggaatttgttgacacacacttaaatactccatttgtaaatgaatcttaataaagctgaggctcaattctgcacctggtcactgagattactttgtactatgctgtctgtatcagaagtgctgtgaggcccaggcgctctgaaaaatctttgaagacacatgaggatattgtagccctttttcctgttcctgaaggagctccctcagtacaccaccccctcctgacctctaggtaaatgcatgttttgaaattttctctaggaaatcatgttcaggattgctttttattattttcctcttggctgtattatataagaggtcagaggtgggaaatcattaaacaaaagaaagtcttaaatttttttttgtaattgggtgccttgagagtacacctaattgtgtcactaaaggagctccatcagcaggagaaaagatttactgctcaaaaaaagttagcattccctaagaaattacattgtttttgtttgccattttgggggaaaaaacacataatcagaaattgtgttttgaacaagctctttgaagtgccagaatgtcttaacatttttgagagagttggttctgccttctaatatttagaaagccagctttctgatcagccttgaaagttattagtgtgtattcatttgtgactgaatgaaggtggagaatggtgtcaaatcattttaatactttacaaacttaagttagtctagttggtgtttgagtattgtagacttcctaatatgtttctgacatacctttagtgttgttttgtgtcagggattctcaggtgttttacatgtattctcataacagttatttgagataagtactgttgttatcctcatttcatagagaatgaaatgaaaacacaaagctatatggaactttgtcattacacacagctggttttaatttttaaaaataactgagtttttgactc

SEQ ID NO: 80853 - DNA, 1425 bp, Homo sapiens
acaaagatagtactagtggttataagttttgagataacttttggcaagccttttcaaacctaaaaagcaagtgctggcaagtgctaaaaatacatacgaattaacctccactttggtgaaactcatggtaagaatatgtgagaagttaaggtttcaaataactgccctcctcatccccacccctaagaaaaccattgcttttttttgagacagagtttccctcttgttgcccaggctggagtgcagtggtgtgatctgtgctcactgcaacctctgcctcctgggttcaagtgattctcctgcctcagcctcccaagtagcggggattacaggcgtgtgccaccacgcctggctgatttttgtatttttagtagagatggagtttcaccatgttggtcaggctgacctcctgacctcaggtgatccacctgccttggcctcccagagtgctgggattataggcgtgagccactgctcctggcacaaaaccattacttcttgttaactctagattttagaacatctgataagaagcctagagtgagaaagtcatgtgcatgcatacattttgtatgtttaaagtttatgtaggacggtgcggtggctcacacctgtaatccccctactttgtttgggaggctgaggcaggagaatggtttgagcccaggagtttgagaccaacttgggcaacatcgggagcctctggttctacagaaaaataaaaaaattagctcgggggtggtggcacatgcttgtagtcccacctattcaggaggccgatgtgggagggtcacttgagcccaggaggtcaaggctgcactttagtcttggcgactgagtgagatcctgtcttttaaaaagaaaaaaaaaaaagttgatgtacctgaaagtggatgacaagagtggtaacttaataagtattcttaagtatttgtaataataaaaacaaaaattataacttttattaagaggtcattttatttcctaccagaattactgatctgatttttctacttaaaagtaaggtgttacacccagtgctttgggaggctgaggtgggagggattgcttgaggccaggagttctaggctgcagtgatctgtgattgcaccactgcgctccagcctcttaaaaaaagtaaggtgttactaatgaaggtatttagtatttaatgcatttggagatgtttgaagctttttatttttttttaaactctttttggtgagaagataattggcaaggattaagtgtgttactatttgaggattgttcatagttttaataagtggtaacatgttttcatgatctggttctttggaaaactgtagtgtagtatttcattaggatttaatagtaattatgtcttaaaaggcagtaattttctctatatagaaaagatttttatcaaaagtaatagttcataac

SEQ ID NO: 80854 - DNA, 1959 bp, Homo sapiens
tcaataaaaatccttgtgtctgagtaggacacatatttaccacctgatcctttatccaagttagtatttctctgtgaacttaaccctgataaagggagttgaaacagaggcagttttactggaaataattatttttcttttttttctctccttttaggaaaacgaaaaagaacaaacagaaaagtaagaatattaactttcttaacgttaatttatgttacctctatgacattgacgtttttattttgaaagctatgaaattttggagtaagcttatgtttattgattatctcaaataggagtctcacagcagtgttataaaataggtacatggtggtagagacctctttttgccaaggagaaacttgtgagcatttattttcatctgctttagtcttaatgtctcccactgagaagataacatttataaataaatggaagatggtgatactaaatgttgtctatactaaatgttcggtagagctcttcatgaaagttgtatttttggtaggaatatgattctttaacttagattgaggtaacagctgtgtaatggagaaataatgaaaagggttaatgtgtcaagagactattttccttatagagtttgttaaattagctaaatgagacccctccccgccaacatttacagcacctggaaatggagatggtggcagtaccagtgagacccctcagcctcctcggaagaaaagggcccgggtagatcctactgttgaaaatgtgagtttttcttgtgtttatgaatagcatgttaggatttttagtctcagttacatgacataaccatgggagctttgattatctacaagatttgcttacatggttaatacctgaaattaaaaattttctcttttgggggtaaaggataaatttctgtatatctttatttcacctgtagctccagatttacctacccaattgatcatttgttgtgtaagcttcatgttcacctacaagactatttctttggtgttacgtatttatttttaggagttaaagatgtacctttaagatggttgtgtttggaatagttttgatatccatggtaaataagaaaatactaagttaaaatgtatcaagtcagggtgtttcatttcctgaacaagaggaaccttactgaagaatttttacctttacaagaaaatgcactaaatagactatagttcaggtcagattcttttctcccaacagcgaaccgcgtatggtcgtttttattaatgattttaaaaaatgacagtacagctgtatgcttggctactttaagatttatccctagtgcctctaaaagtcagctcccctccatgtttggtatttagcaagaaaggttaggtttttaatactcctcctgtttctgtttaggaggaaacattcatgaacagagttgaagttaaagtaaagattcctgaagagctaaaaccgtggcttgttgatgactgggacttaattaccaggcaaaaacaggtaacttgaaaagctacccagattgttaagctatatgatacattcttgctagcaaaaaaagtttttaaaggaaaatgttatattgacttgaattattaaggtatgactgataaaataatattttaatttagaggctgaacactttagaactactaccagaaagagtaagttagaagaataaaagttcacatataaattttatgaggttataatgataaaggtggaaataactcatttttggagattgctagggcaggaactcgttctgaaaattcataaaggtgaagaagcatatgtcttactgtcattgctaatggtaggccatagaaagcacacaccaccacctgcaaggtattcatgaccctgaaaagaacctgaatcttactaagcgcctggatctattgttagtttgcaggaaataggatgtttaatggagtgacatgtttgtcaatcgttgaactctataattgagaattt

SEQ ID NO: 80855 - DNA, 1717 bp, Homo sapiens
ggtgtgcaccaccacatctgtggtaatttttgtattttctgtagagatggggtttcaccacgttcgccagggtggtcttgaatacctgacctcaagcgatcgcctatctcggcctcccaaagtgctgggattacaggcgtgagccactatgcccggcctaaaatcatgtattttaaaggaattggtggtgtttgctcacataattaaaatacatggttgtagtgcccctgccttggatgtaactttggataaattctcttgtttaaacagtacgaattggagcaatgttggcttatacacctctggatgagaagagccttgctttattactcaattatcttcacgatttcctaaagtaagtctgtgcttgaaattataaacatggatttgaaaattagcgtgtaatgggagggattggcagtatagatgctaaaacattaaacattatattggtacaggcatagatagttggtaatggagcagtaaaagtaagtgcaaacacatgggagtctcagaaatgatagatggtatatagatgatatattggtgcagtaggggaaagcagtggagtctggtagattggtgataagacagctgacagtttggaagaaaacaaagccacacttgtcatgtaccaaaattctagatgaatctgaagtttaaaattaaattgttaagataatgaaaggagaaatgtaatattttcatagttctatagtgttccatttatgataaatggttggtacctttaatacacacagagttcttcggtaagaaatgaacaaaccagtgaaaagtaggacaggaaatttacatcaatggcagcacaaaggaccattaaaaatatgtcagaaataatgatgaaagtataaactgtcagtaaagtagcacttgtcagattggctaaggtttaaatgtttgaagaaatggagaaaagggcaatcctggtttctacaagtttttggagggcatttttataatagtgaagaatttgaaacaagcacttattaaaagggtgaggtcactctaaacatactgataaagatgtccatgttttcaattgaaaaacagccaagctgtagtagaggagtatggtgtaattgttacttgtagagaaacattattttaatctttgcataagatctggctttccaatgtggatcttagttaatactgggttatttcttgggcgtggtgttggaagggagggtgggagttttcagtttctactttgtatacttctgtatatgaattttctcattacaatcgttttacagtaaatttaaaactgcaacgtggacttgagaatgtaggcaagatttatcatcttttctttactaatgataaataccttctttggacctcagtttctttatggaatgtgctctactacttgacatttcacgttcccttttatgtaattaaaaaaaaaaagtttattcatttagagatggagtcttgctctgtcgcccaggctggagtgcagtgatgcgatcacagctcactacaacctccgcctcttgggttcaaacgattcttgggcctcagcctcccaagtagctgggattacaggtgcacaccaccatgcctgactgatgtttgtatttttagtagagatggggttttgccatgttggccaggctgatcttgaactcctggcctcaaatttttgtgcctcggccccccaaagtgctgtgattacaggtgtaagcaactg

SEQ ID NO: 80856 - DNA, 1079 bp, Homo sapiens
ttttttttttcatttcaaaattgctgccagtgttttcaatgatggacaacagagggatatgctgtagagtgttttattgcctagttgacaaagctgcttttgaatgctggtggttctattcctttgacactacgcacttttataatacatgttaatgctatatgacaaaatgctctgattcctagtgccaaaggttcaattcagtgtatataactgaacacactcatccatttgtgcttttgtttttttttatggtgcttaaagtaaagagcccatcctttgcaagtcatccatgttgttacttaggcattttatcttggctcaaattgttgaagaatggtggcttgtttcatggtttttgtatttgtgtctaatgcacgttttaacatgatagacgcaatgcattgtgtagctagttttctggaaaagtcaatcttttaggaattgtttttcagatcttcaataaattttttctttaaatttcaaagaacaatgtgcttgtgttgatgccttacaaaaaccattgtatatttgtgtattccttcttgtatttagacagtggtttttcaggtgcgtgctttgttttctggtatggcctttatggaatgagacgctttagctttggtacgtagcgctaatccatagcagctttggcagtttgctgtcttgagtcttagctaaaaagttagaagtttacatgactgttttttttattttccctaaattattacttactctgagcattaattaagggcattttcacctgtgtaaaattatggtcagcttttttctgtctataattgtttacttttgtgggtttactctagaaacatgagccaaaaatgtcaatagacaacacagtattaaaataacccaaaagttgtaaagggcaacgtttctcccctttgatagggacactaaagtggtctgtacttgggtagaggatggcagacgttaagaattaaaatgcgtctgggtgcagtggctcacgcttgtaatcccagcactttgggaggctgaggcgggcggatcacctgaggtcaggagttcgacaccagcctgatgaacatggagaaacc

SEQ ID NO: 80857 - DNA, 1018 bp, Homo sapiens
ggagaaaaggctggcatggggcggcctgggtgtatatgctgctgtgcctttgtcctgtcctcccagattccatgtccttgtctgaaaaggagagctttcctgttccctcgggctcctggtgataaaatagctgtgtgagggcccggccagggctaagagggggccctcggtaaattttcgggagaagtgggatatggatcattcatttggcagctaaggagagggaagaatgaattcttcacaaagtcaggtccgtgatttgccggtgatcaaataagccgaatgctactgttttatgaataaatttagagggtctcacccctgaagtcagctcttggtgagcagcaaaacattctagaaaggcctgtggtggggagaccgccggccgggcctcagctcctctttctgcccaggtacttcctcatcgagcgcggaaagaacatgtgtggcctggctgcctgcgcctcctaccccatccctctggtgtgagccgtggcagccgcagcgcagactggcggagaaggagaggaacgggcagcctgggcctgggtggaaatcctgccctggaggaagttgtggggagatccactgggacccccaacattctgccctcacctctgtgcccagcctggaaacctacagacaaggaggagttccaccatgagctcacccgtgtctatgacgcaaagatcaccagccatgtgccttagtgtccttcttaacagactcaaaccacatggaccacgaatattctttctgtccagaagggctactttccacatatagagctccagggactgtcttttctgtattcgctgttcaataaacattgagtgagcacctccccagatggagcatgctggtcctgggccatgactcaaaccaggtctgtcctcgccactcagtctcccaggagggaggcatcagggggtgtccaggctctggctgggaggatggtgggggtgctggcggtattatccaccagatggggtatccaggatgaagagcaggcttaatt

SEQ ID NO: 80858 - DNA, 1050 bp, Homo sapiens
gaggcagtcggatcactttaggtcaggagttcgagagcagcctggccaacatggtgaaaccctgtctctactaaaaatacaaaaattagctgggtgtggtagccaggtgcctgtaatcccaggtactcaggaggctggggcaggagaatcgcttgaaactgagaggtggcgatcactccagcctgggtgacagagtaagactccatctaaaacaaacaaacaaacaaacaggggaatactgtactttcctgaaacctgctgtaaatccaggcaaggtattatggcacttttaaagtcctgactagattggaatggatctattttagggtaaggcacggttcaccagcagattattctggccccagaataatctctccagaggcaaactggtagtcaattgtcctaaactcaaaccctgcctccaactcttgtcctgagttgaggtctgtcttcctctaaagccctcagctgcagcagggcccttaatcaagatctggaatcccctgaaaccctaaagggagccatgttgaggaaatgtgcattttccccagggaaaacggccatagattggtctctggaacaggttcgagacccaaaaacggagatctaaatgctgtgtggtagtgatcttcacactggaggtatggatccttggggaaacaggaagatatttcaagtgatgccggcagagagtgttctggaaatccatttacagaccttttatttccaagtgtcctctttgctaaaactgggagagagcccctgaaggcaagggggaacctctttcctctcattcaatctgaacctgaacccatgggtataaaaacaatagggacagcaaacaaaaagacaaaacggtaataaatcgttcatatctggcattctcaattcctcaaggaaactgaattgaagaggagaggacttcatggggatatcaactgatgaggtcttaaaaataatgttgagtgaggccaggcgtgggggctcacgcctgtgatcccagcactttggtaggccaaggtgggtggatcacctgaggtcagaagtttc

SEQ ID NO: 80859 - DNA, 1032 bp, Homo sapiens
gacaggcagggacatggtgtgaggtggggacaggaagggacatgaggggtgcgagttggggataggcagggagatgggggggtgcgaggtggggacacgcagggagatgggggacgtggggatggcgacaggctgggagagggagaggccaggctgagacctccccgcgcggtgccagccagtccaggcagatccaggactcagccaggcctgatacccagataagcccttcctcccagaggagataagggagcgacgcggccggccgacaggtgaactagagctggcgagttagtcggcgccgccccctcccgcgagcccggcctcgggggagtaccgcccaccccgccccgcgctcgctccgccccgcgctcgctccgccccttcgcgctcccgccgctcctccacgctcgtgccgctccccccccgcgctcccagttgacgctctgggccgccacctccgcggaccctgagcgcaagagccaagccgccagcgctgcgatgtgggccacgctgccgctgctctgcgccggggcctggctcctgggagtccccgtctgcggtgccgccgaactgtgcgtgaactccttaggtacgcagagggcgcgccgcccgagagggtgctagcaggccctagagtggacgctgggagaacttggccaggggcgcactgggctccggaggaacggggcagagctttccccggtgagaggccaggaactctgcgtgctggcacggggaggggtaaactgcattataggcgggggttctcggagggtgggcggcttgtaggaccagaggagcagatgggctgagtgtccagggtcccacctagccaggtggctctccagcctagaataccaaaggagcccgcagctccttccgccttcctcaactggggacacagagtgtcacacagaggactctgatctgtccctgccagaggtgagcaaggacgtcccagccttctctagcagcttcccccgggacttggcacacaggggatccccgtagtgtcttgggagtcccatc

SEQ ID NO: 80860 - DNA, 1009 bp, Homo sapiens
caggccagggaagtcattctcctgtcccacagcctcctgacttgactcatggcagacaggcagcacccaacctcaacctgtagcctcccctgccctgactgccaggaagtgcgcagtagctggactggggtgggcaaggagctccttctgagtcacccacgtaatgcaccctggcactgccagcctgcagcagggatggctgtcgccttgccctgcgacaccatggggcgcacactggaccccagcctgcacctatgcccaggcatctgctgagggttgggggtgatggtggactgtgagtctcctcagctgactcaaccggttgctccctgagcagatggtagcagaggtcttggggtctgggatgccagagtgtggggaataagcagccaaggacccatccaaggagctgaaaaagcggtgggaggtaggaacatgcatgaaccaaggctccaagaacctgcagtgtgctcatggtcccatcaaattccactcactaaacacaattcaaagagaaaactatcttaagaatttcaacaaaagagcttaaagtcccgaatgcagagccttctgagcatagggccccatcacacctgcgaatccagctctgcctggaatgttcaaagatctaaagccaacaatttcaccttgttccgcagcagccaagccctgaactaagagtaatatcaacttgcaacctcaaggtcaacaaaaattccagattctacacatctctgctagcctgataacaggcaccttcacgacatactttcattccccacaaccatcctgataggatcagtcacctgcatttcacaggagaaaccagactcagagagcccaagtcacttgcccaagctcacacagctgggaagtggcagagctgagactggaacccaggtctcctgtctgcttgccagtctttccactctactctggtagcctcttcccacagggctaccagagctcagttcagggatgtccccactccggcccacccagttcattc

SEQ ID NO: 80861 - DNA, 1403 bp, Homo sapiens
tggattcagagtccaaacacaactgtggtctagttcacactttgctgtttattagttgtatgactttgggcaattcgtgtagcctcttggagcctcagtttcctcatctgtgtgtgggataagccctcgttaacagtgagggtaatgatccgtgcctatcaggagtattgtaaggattgaataagagagtatagggcagtgcttgaaagcataggctcaggactcagactctaactcagccacatactaactgtgtgactctgggcaagttacttaacctctctgagcttcaattaggcttgttgtgaggattaaataaaaccacgtaaaacccttagcacagactcttagttagcattcagtggatatcacctaggatgttgacaacagcatttgctgtttgctggatcccacatttgtctatgggttagcagtgtgactgcttttctcttcctgcccagatggagtccgcctgcgtgaccatccatgaggctctgaaaacggtgattgactcccagacgcattaccggctgcgggaggcccaggaccgggcccgagcagaagaccttaatagccgagtctcttactggtctgttggcgagacgattgccctgttcgtggtcagcttcagtcaggtgctactgttgaaaagcttcttcacagaaaaacgacccatcagcagggcagtccactcctagccccggcatcctgctctagggcccctcatgccccaggctggagcagctctcctaggtcacagcctgctgggctgggtcgcgtagcccagggtggaggcagaacgatgctgctgtggtagccctttgcctttcatgcccatgcttgattcttgcacctcagcagctgaaggtctcagagaccagtaatcagaaggcatccgactgcattaagtgtgcagcgctgaaaagacatttacaactaggccagggattagccactgtgggagggtggacaggcaatggttcagtggcctggctgttggcaggaactccaagtgcccaggcctcttgggcagcttagggccctgcctctgtttcatgatgcatgggtcatttgtcttgggtgtcctatcccatatggagaagaaaggggctctaagttctggctcttctttctttggggttctctgtacctgaggaaaccaggccctgggtgactttgcagatctgctcaccctcggtgagcaacagtgtcagccatgcaagcaggacagaatggtgactgggtgcccttggtgagctgtgtatttcctaggaggtagaaaactgtgggaaactgtggctaataaaaactaagtgtgagcgtcctggagacttgtgcctttatttctttgccctaaaggactccagagcttactgcagagcatgggtgtgtgcataaataat

SEQ ID NO: 80862 - DNA, 1099 bp, Homo sapiens
ggattggcgaaattgaacggaagctggaatccctgtcgggtgtccgtgatgaaatctcccaggtcttgggcaaactaaataaattggaccagaaaatgcaacagcctgagaaggtgagtgtgcagatagatctgaactccttgacaagcgagggtccgtctgatgacagtgcctctccccggatgttccacgcacacagtggctcccacggacccaaactagagaacaaccctgactggtgctgctctgatgctagcgggagcaacagtgaaagcctgcgggtcaaggccttaaaaaaaagcctcttcaccaggccatcctctaggtccctaacagaggagaacagtgccacagagtccaaaattgccagcatctccaactcgcccagagactggcgcaccatcacttataccaaccgtgtgggcctcaatgaggaggagataaaagacacaggcccaggagataataaagactggcatcggaaatctaaagaggtaatttaaatttaagttcacataatcgggcaccagcttcatcatagccctggtgtatttcaaagccttgaacatggcgttaaacaggcaagaggcctggcctctgtgtgccagtcatccttccaggtttggcagggttttcacattggaatagagaggacaacataggcaggtcgtgtgttccaccaggttgtccatcagctaggaggagcacatgctgcgatattgctgacagcagaacgtagggttgggattcattagacaggtggtgtgagaacagattttcatagaatggggaacgtatcagagcaggcaagcatcaccaaggatatcttcctgtcctttctgaaataggatgcaggccaggtacacgagggaaaatactgaaaaggtgctggctgatacatctttttcatggacttcattgtatgtgtgatgttcctttttaagtatgaggtttttttcattataaaataaattgatgattaggaagtaaagaagataaataggatcatgaggtcaggagtttgagaccagcctggccaatatgttgaaaccccatctctactaaaaatgtaaaaaaaattagccaggtgtggtaacac

SEQ ID NO: 80863 - DNA, 1048 bp, Homo sapiens
aaggcactgaggtcttctcagttaccccaacacctactccagagttttgaatacttgtcagcagtgcaaaaaatattatctgtttaaccacttatctatatgtctatctatctatctatatgtctatctatctatctaaatacttgatttttatttattgtcttctctgttaaataacttgagagcaaggtttctttcgtgtaaaagaagctgttgtaatttcatccaaatttgatctgtttccacctgctgaatggtgctctgacaataatggaacagaaagaatccttatcagcatctgattccaatgtcttgttacaggtcaaagaaaaaaggattgacagaaactagctaccttatatatattttttgataataaggtgggatataaatagattttggtagcaagtgtaatcactccgtatgatataataaatttctaaaagatttgagagcatctcaatttttaaagcaataggagtctagcatccattctgaaaaatcgcaaataatgcttagcttgctgtgtctgattctgttgttcaccattaaggggtagacagttaattttattatgttaacaagtgagggatgaatgttttcatctgtggtgaacctttatttttagaagtcttcatgttatctatttgtattatcatgtttatgtatggattttcaatttcagtaaccgaaaacttaagccttagtatgaaaaactgaggatttataattgaaaatgaaaaaaatatgttactctctatcatcagaattatagtctttggtgctctgttttcaatggggcatattacataaggttgtttctttcaccccaaagagactactaggttaccactctgggcattgcctttccacctaacccctcaaccagtaagactctacaccatattgtagccccactattctcctctttatcacagatgaagtgccagagcatcagagataggtagctcccaacctcttgctctggatttgcagaagagggggagatgtacttacccaggataagaaaaatctagtcaaatccacc

SEQ ID NO: 80864 - DNA, 1050 bp, Homo sapiens
catgcagggcagacatggtggctatgtgtagtctttgataagtgtcagctgagactggtgagaattagtaaccactgaggccaagagcttattcgtatcctattcaggggctttcctctgtgccctgcatttttcatggcccctacaatgtaatttatgcaagtatgtctccttcttactttaagcatcttgtcttacgcactattcaccatgataggccaattgctgtaatagatgaccttagaatttcagtgatttaaccaaatacatgttgattgatcattcatccaacagtccgatgtaggtgttttcttgttagagcctctcctccaagaagtgactcaggaacccagggtccttcttccattttgtggctcttccctccatcaatgcctcagctcctctccattccacctatggaaagaaaaaaaggatggagcattatgcatgggaaggacctcacttctactcctctggctagaacccagccacatggtcctgccaaagtgtaaaggaggctagggaatgtgggttggcttaatgatcaggaggaaaaggaatcttggtttggtgaggtactagcatctgctgcacgtccttactcaaaggcccatcttgagggacaaggttactcagttgagatgaatgagggttttgcttccttcccacagatggcagatgatggtcatggctgagatctcagaacccgggatccttcagctgagtcccttgtgcgtctttgggttctccactgtggctgcattctctgcaccacattgccatagggtgatgagtgagggttccaaaactcctttttgtaaaaagaatcattgtgtgctttgagtgggagctttgttttagagaaacaaagccaagacatgattattctgtctgtgtagcactcttcaacacctacacgggaacagcagctcagaagccatttaatcatgtcatgcctcagagttattaaactgagaaaaataaatgtgaatctgtgctctggccaggcgggtgatatgaaataggcaaagcaagccaggcatgagaggt

SEQ ID NO: 80865 - DNA, 1050 bp, Homo sapiens; identical to SEQ ID NO: 80864

SEQ ID NO: 80866 - DNA, 1031 bp, Homo sapiens
tgctgctataaagacacatgcacacgtatgtttattgtggcactattcacaataacaaagacttggaaccaacccaaatgtccaacaatgatagactggattaagaaaatgtggcacatatacaccatggaatactatgcagccataaaaaatgatgagttcatgtcctttgtagggacatggatgaagctggaaaccatcattctcagcaaactatcgcaaggacaaaaaaccaaacaccgcatggtctcactcatagatgggaattgaacaatgagaacacatggacacaggaaggggtacatcacactctggggactgttgtggggtgggggaaggggggagggatagcattaggagatatacctaacgttaaatgacgacttgatgggtgcagcacaccaacatggcacatgtatacatatgtaacaaacctgcacgttgtgcacatgtaccctaaaacttaaagtatgaaaaaaaaaaaaaaaacagaaaatctcagatggcaacgggcagcctccatgtttccccaggagttgagtggaacaaatagtccagattgtggggtacaaagaaatgtcatgtatataggcttaatttagggtacatcttctccccacaagactgagtgatttctagaggaactgttggaggttgcaaactggtagccctggggccaaataaaggctgtagatttgctttgtttggcttactttatggggtgtgtatatttttatatattctttgaaggtcttcaggtaaaggagcttgttccagctccgcttctgtcctaataaccctctaatacgtgtatatagctgcttgacctcctgaataatgtgggtttgcaacacttcattaagcgagagtggtctttgttgtcaagttgaatacaacgtcatggccacttcagttccagtgagctgctgcaagcacagggcaggtaactcagccccttctcttcccattctttgaaggaaagtttgttaaaaggaagataaggattcaggactctaaataaatgagtcggg

SEQ ID NO: 80867 - DNA, 1031 bp, Homo sapiens; identical to SEQ ID NO: 80866

SEQ ID NO: 80868 - DNA, 1037 bp, Homo sapiens
cttatgaatttattggtgctgtcttcatgctaatgagtgagttcttattctcttagttcccatgagagctggttgttgaaaagagcctggcatcgcctcctctctctcttgctttctcttttgccatgtgatctgcacacaccagttccccttacccttcctccatgagaggaagcagcctgaggccctcaccagaagcagatactgatgccatacttcttatgcagcttgcagaactgtgagccaaataaatcccttttctttataaattacccagcctcaggtgctcctttatagcatcacaaaaggactaagacaacaaggtttgtttgtacagacatccctcagcctcaactctccttacgatttccttctgttatagggaggacatctttcacatcggaatttcatctcttgctttaaagaagaaggagggttagagtgttctttttgtacttgctgttttctaagtgcttttaaatcaaaatagtcaatactctagaatggcatatttggggtgttatattccgaactcctctgaattaaacttaattcagttatatctcattagtgatgcccatgggatatagttaacaaaatgcagcccagaagtggatgaagccttccagggagggttgtattcatctgtatcaatcagtggccctctgtatctctcctttgtccctttaaaggtgacacattgacacagagtgtcactgactgtgcccttctgttcaccttgagctctcccatcatggtaaggaggatgttcttttagcatctgtgcctcagactttctctccagaacctgcttcttgttctgacttctcatggttatagtttggtctcctcagagtccctgacctaaacaggattgacactttgggctccctgggagttcttttctatcctcagcctgattggcttttccatctgcttttgattcaacctcacatttgccatttcttttttagactgtgcccaaatccatccttcctttagctctccacggctatcccctcagtgcatgtccaagg

SEQ ID NO: 80869 - DNA, 1037 bp, Homo sapiens; identical to SEQ ID NO: 80868

SEQ ID NO: 80870 - DNA, 1120 bp, Homo sapiens
caggcaagtgccaatatggaatatttcaaagatatttaaacttcgaaactatcaaagctatcaacatcttcttttgtcttctgaaaaatcagatttgctaacattgggccacatccccagtaggcagaagctaagcaccagctgccccttagacagggcaccgtctccatcacctcctactgtgtccttgccactggcaccaagattagcagtgttcttgctgagctgtggctccttccatagcctgctttatgtactctgtgatttgtacccacctggcctctatagaaatttgagtttatagcccttgattttaaagataatgaagagatctgcagttcccagaatttgtcctgtggtctctttcatttccaggcctttgccaatgctggctttcaacctggaatattcaccttcccctcttcacctggtcagcttctactcattaccttagatggcacttcctgtaggaagcatgctttggttttccaatatagagttaagtgcccttccttataacaatgcaggaagttcccttcctctcattctgctgtgaagtcttctctgtcactctgtattataatttcttatcttcttccctactagatttagagcatttttaaggtagggacatgtcttgttcaccttaagtccaggagttggcaaattatagcccacaggtgaaacttaaccggcaggctctttgtgtacagccctaacgctaagagcagtttctacatttttagagcatggtaagaacaaaacagtatgtgagagacagcctatgtggcctacaatgcctaaaatattcactctcacaatctttacagaaaaagtttgtttatccctattctagccttccatctggcacaaagtaagtattgaataaatgtgaaatgaataaatagctgttgtcttatacctggcattccaagtaatacacatgtactggagattctaaattgagtggagagataaagacattgtatatagcttatcaatgtatggttacttaacctcataattttacctgctccagggggaataccccccatgccctctgcattgcatgatgctgctcacacattacatatatgtaatactatgtttatattacaat

SEQ ID NO: 80871 - DNA, 1120 bp, Homo sapiens; identical to SEQ ID NO: 80870

SEQ ID NO: 80872 - DNA, 1023 bp, Homo sapiens
ctatggacacaagttttcactgtgagcagggatctcctccttacctaccatttcccctgaagcacagccccaggaacctagtgaatcttctctgttcccagtggagatgggataccagccttttgtggttgtgtgtacctgggatcgccatactgccctggtgtattcctgctcctggctttgtgacaaccctctgctgattgctagcaagtgacagccttgtcctcaagcacaggtggtactcatgggcgtgagcagtcaagggctctggaggcagcccagtgcgcagtgcttcttatcaaggaggctagtgtcggatcccacacccaccgagggtgctaatgtcctgggaagggtggcactggggtctagctggccacctggagtttctgtcaaggtctagaacaggagcaagtaagagttgatgtccactggtcactttcatataaatacatttgtcatttagaggcaggaactcaggatcatttcaactctaaggtactggaattatccagacccatgtttgtatttaattgaatgacttctagattcacagaccttacagatttatcaagttcagcatcccctgcatatcatgtgatgaaatccctgcaaaatagcctcaatcctctgactcagcactttcaggaccaggggcctccctgcttcccatgacagtcaatgcagtctttggattactcctcaactaatgtttctgtcaagctctatttttcaaaaatagttattccttaaaaataaaaaaggcttttcctccttatattctccctattgccttttcttgagcgatcccttctttcgcaatagaaacagagctacagaacatgtggttgttgaggggcctcagtccataccattcacaccacgtgattcgtatgaagttggccccctgtgtgcactatgaacaggcctctttctttgcatgaagaatgtctgtactgagtgaaggactgtggaaagaaaagataggtagaagccttctagactgctacgcagtctaagaaa

SEQ ID NO: 80873 - DNA, 1023 bp, Homo sapiens; identical to SEQ ID NO: 80872

SEQ ID NO: 80874 - DNA, 1057 bp, Homo sapiens
catggaatggggtcttgtcagctaagaagcagtgcttaaccagccattgagtgagctgttagggaccctggaataattacagccttctcaaatgagaagatgaagaggggttttttagtgtgtgtgtgtgtgtgtgtgtgtgtgtgtgtgttttgatagtttgagatttaaaattacatagtagaactaataggccctttctgtctcataattatgtttgtcttgatacaaacccttaaacgtttggctgctggtcttggatgaaactcccagcctcagatggaattgtaacgccatgatgagccattatgctgtggccaagggtagtccctctgcgacacttgctgcctggcagtgctgttgttctcagcatgtacaacaagggctcatatcagaaggaggttatattttccatggagctgtcacaggggcccaaggactaggaggcaggagctactggctcaggaatccttgggagttagatgggacctgggactctgtcatttccccctttgctggaaacacagagctttgagaatgctacagtccaagcaagagtggcactgggctgccttcatctatatggagattattccttcaacagagcaattgcagataattgaactttataaattgttctatcccaaagaataatgaacattgagaccattccaccaggatgatgagtttagtcctggaatagatgtcgtacaagtcgggtggtgaactgcactgaacatgcctggagtgatgttaggaagacagcaagctgaaaattagcattccagaagggataaagccatctgcatacaatattagaagattttatgacattatgtttctaggtagtttggactccctgagttagttaagaaacttaattttctttccatcacaaatatcttagggatcttttggttgcaagtaagagaaatccatgtgcttattaaagtaaagggagatgctttatgagtgaggcaggataacctggtagagaaattaggtgttttttccttccttctctcaaaaggctggcaaaagactagctccttatttt

SEQ ID NO: 80875 - DNA, 1057 bp, Homo sapiens; identical to SEQ ID NO: 80874

SEQ ID NO: 80876 - DNA, 1048 bp, Homo sapiens
tgctggcactgtgtgtattgtaccattctctagcttacttctgacagtctccgctcagatcctgccctgcagaagcacactcctgaagttccctagcccagtggcagccttcttgaccaagtcctttcaggatgacttgagtctattaatagttccacttgaggtgactactcgactaaataggtaattggctgcacgccagactggaagtgtcacctgctcccatgctactcttgagggctgctccagacagtccacaactgtcagagttctgctacttccccaagtgctggaagtcacgtgtcacattctcccaggaactgctgttcctctcctcccagagctaacagtagcaccagggtgtctgattctgccaggaggtagattcctcttttggcaaacacttccatactctgaagcagcctttacttggcttggagtgatggcagggaatcgtggggaggggaaggaaaatgtcacagcacccttacacttataagtcctctttcttcaaagagtctgcttaatctctttttttctaatacaacctggagaaggatggtggcggcgactaaagagccattctggctctctgttggtaaatcctgcgtggatgtgcatgttggacaccccttgtcctgtacctacatcctttcagaccacttttttccctccagccattgggtacagcagactggctgcatacaggtgaagccagacagcagttctcctcacctgcatgattttcagccctggaatgtcacatctgagtgagacccttgcaaggaccttctcagtcattctggtgcatgtacaaacctggaagtgtgttgtagttaacacctcaaggggtaatgaatgcttggccagtgtggattagaagccagtggataaattatcttgtcttccaaccctttggcagacaattccgaggtgtattctccatcattcctgagaggattgttaggctagtagcagcaaacttctgtgcccatggtgggaaccaggtggataattcaccctcaaattggccttccttctgtttccg

SEQ ID NO: 80877 - DNA, 1048 bp, Homo sapiens; identical to SEQ ID NO: 80876

SEQ ID NO: 80878 - DNA, 1052 bp, Homo sapiens
cctccccagcccttccccttgcaccttcaggccaagttgttggtacagtcagctaccccagggactgtaccatctctcttgctttctctaagcatctccatctctttattaatcttttctagtttccctagtttgagtgtgccttctgtccctcaccatggccctgacctgactggtacagacgctgcatccagtttgactgattccaccaccaaggcaaataagcagcgctctccctgtctgctttaatttcgtagggaaagaacaaagagcttccacacttcactagagctacactaccattcacattcccaggcctgcatttcctagctgtatgactttgggcaaattacatcatcttgttgggaagattaaattaagtcatgtttgcaaagagcttagcacagtgtctagcacacagctgaatgtgctgaaagaaattataaaagagcaacttcatttttcttggtttgtaaacagatacacctcaaaggagccttttaaagagaaaggctatttctaacagaggaatgctttcctatcacacgtgtttcggagactgtatttcagtgagccatcacggctcctgctctgcctaaggcttgagcagtttcttacggaccgctctgcatgtttctagctgacaggaggtggcagtagagagctaggcccacccttgcacatggtttgggctgataggaaatctgcatgatagctcttgtagtgttagtattatgactcaagaaataactttcagagtcaacagaaggaggataggcattattcatatccccaagtataatacagctagaatttattgaacacttactagagttttatctcctttatttagtccctctaaaatagcattatttttatctgaagaagaaattgggtttcaaagagaatttcagtaactttactaatgtttcttagctagtaatggttgttatgggattcaaacctgggcagtctctgtaaaagcctgcacagataactgctgtgcaggactgcctccaaggctcttgtccttgatgtttgtgtttaaaaaa

SEQ ID NO: 80879 - DNA, 1052 bp, Homo sapiens; identical to SEQ ID NO: 80878

SEQ ID NO: 80880 - DNA, 1052 bp, Homo sapiens; identical to SEQ ID NO: 80878

SEQ ID NO: 80881 - DNA, 1052 bp, Homo sapiens; identical to SEQ ID NO: 80878

SEQ ID NO: 80882 - DNA, 1010 bp, Homo sapiens
cttagtacctgggtgatgaaataatctgtacaccaaacccctgtgacatgagtttacttgtataacaaacctgcacatgtacccctgaacctaaaatgaaagttaataaaaaagttattgaaaagttccatccacccattttacagatgagtaaaatcagacaagcagaggttgcctacagttagtgaaaaataataggaagttctaatgtcttctctgtttcatttttaggtccatctgattatcaacaactcagatgccaaataaatataatatttagaaatgccatttatattaagctactgctgatgtggatcctattttctgcagagcatttttacatatctgcagtaaagagagtttaaattatatttttttccagtaagttttatttttgtcagtatctgctaagataggataagctgatgtatagatttttttttgttaaaaaccttatggcagaagctgtaaagtagggattggcagggtgctttttctgcagagggccagatagtaaatatctggggctttgtagtccatacagtgtctgttgcagtgattcaattctgctgttttagtgtgaagacagagcatggctgtgtcctattgaaactttatgtacaaaatcatacagtggaccagatttgacttgcaggctatagtttgcaaaccccagtggtaaagtattgggacaccattcccacttttcagtctgcagcaacctagcttgcttctttcatatacaattgtagttgtttatggtgatggtgatgatgatgttgattaagaaaataatgtaaatcaaattactattatctgttgacatgattttagagttattttctagacaacgtagtaggcttaagatataaaaaacatacttaagaaaatagcatgtttgaagtacctcttcaaaaagaagactggaaatttttctgcatattgttaaaaatatttttttctaaaggaaaatagctttgttcttataaagataagacataaagaataaa

SEQ ID NO: 80883 - DNA, 1010 bp, Homo sapiens; identical to SEQ ID NO: 80882

SEQ ID NO: 80884 - DNA, 1010 bp, Homo sapiens; identical to SEQ ID NO: 80882

SEQ ID NO: 80885 - DNA, 1010 bp, Homo sapiens; identical to SEQ ID NO: 80882

SEQ ID NO: 80886 - DNA, 1023 bp, Homo sapiens
aggcttggaaatcatactgtgcaataattaattaagaatagtgggccaggcacggtggctcatgcctgtaatcgcagcactttgggaggccgaggtgagtggatcacctgaggatcaggagttcgagaccagcctggccaacatgatgaaaccccatctctactaaaaaaatataaaaattagctgggcgtggtggtgcatgcctgtaatcccagctacttgggaggctgaggcaggagaatggcttgaacccgggaggcggaggttgcagtgagccgagatcgtgctactgtactccagcctgggcaacaagagcgaaactctgtctcaaaaaaaaaaaaaaagtgactttgcgagctcatcttctaaaaactgagaaaaatagaaatagctccaaaacaccgttgtatttctgtatctgaagaaattgttcttcactgcttttaagagtaagctagacttttttttcttgagtacaccctcacatgaatgtgagcataggatggactgccctctagactcttccctaaatgcctaatttctttctttctttctttctttttttgttgtggtaaggaaacacataacaaaatttaccatcttaaccattttaaaggtacagttcaggagtgttaagtatattcacattgctgtgcaacagatctccagaatttttcatattgcatatctgaaaatctatacccattaaacagttcttctttcccccctttcttcagcctctggtaaccaccattctactttctgattctatgggtttgactgctttcaagacttcatttaattaggatcatataatgtttgtttttttgtgtgtgtgactgacttaatttatttcttgattgaatcacacagataaacaaggtattgtccttaaattctcagagtcactaagctttgattctaaagagatctgagatattgaatctataaataacttaaatttacaagaagaaaacaaacacattaaaaaagtaggcaaagacatgtgcagatacttttcga

SEQ ID NO: 80887 - DNA, 1023 bp, Homo sapiens; identical to SEQ ID NO: 80886

SEQ ID NO: 80888 - DNA, 1023 bp, Homo sapiens; identical to SEQ ID NO: 80886

SEQ ID NO: 80889 - DNA, 1023 bp, Homo sapiens; identical to SEQ ID NO: 80886

SEQ ID NO: 80890 - DNA, 1045 bp, Homo sapiens
agaagatataatttcataagaaacttgcatctttgataacatgttttcaaaacaaagtattcaagactaggtttttaaaggctatttatgagatggattgaatagttttcttaatttccagcagatgtcagtgttttacaaatttattgttagtccacagagacagatttgtcttcagtctcccaatttctgtatcctttagttatttaattggcacataggggattatctgaattggaagggatttgaagatcatctaagtcagtttttcattttgtagataagagaacaggcctaggtgggaaatgacttgtccgaagtcacacaaacagaggagggctaaaacccaggtgttcttgtttccaaaagacttttcctttctgaaagactcatcctttcgtggttgatacaataggccacctccctagtgaggttttcctgtgtttaactcccttctcaagggaatacaacttccttcctttgtacctattaccttggaacttacattattctaccccttattactattatttaataatctctttacagacaactgattagatgcatttttagctgaccaggttgttaggtcctagagggcatgaatagtaacttatctctgtgttatctgtagttccttgggcagggccttccataaagtgagtcattagtaatgactattgatttgaatccattaaattttgattcaaacttttttctgctcttttcctgtaaagctgttttagaaggttttagagaggattatgttttttttttttttttttttgagatggagtctcgctctgtcacccaggctggagtgcagtggcgcaatcttggcccactgcaacctctgcctcctgggttcaagcaattctcctgtctcagcctcttgagtaactgggattacaggcacgcgccaccatgcccagctaatttttgtatttttagtagagacgggggtttcaccgtgttggtcagactggtctcgaactcctgacctcgtgatctgtcttggcctcccaaagtgctgggattacaggcg

SEQ ID NO: 80891 - DNA, 1045 bp, Homo sapiens; identical to SEQ ID NO: 80890

SEQ ID NO: 80892 - DNA, 1045 bp, Homo sapiens; identical to SEQ ID NO: 80890

SEQ ID NO: 80893 - DNA, 1045 bp, Homo sapiens; identical to SEQ ID NO: 80890

SEQ ID NO: 80894 - DNA, 1058 bp, Homo sapiens
taccacttgggcagaattacttaacatctcaaagtccaaatttccccatctgaaaattggagataattacagtactgactaattgtgttgttgagaggataaagtaaggtagtaaggtgatatatgtaaagtgcctagtacagttcgccttgtagtcagagatcaatacatggcagttattaacagtaagcagaaattatttcccccaaaccttccatggctgcctacaatgtactagtccttttcttccgtaattcttatgtacttggcactttacgtatattagcacgttttattaattctttttggaagtatatcccttttctttgctgatagactctttcggagcagaaaccttcttctaaatcatttgtatccctggtacctagtcatatggtttatgttgtagactttcagtaaaagtttcttgaggtgaagctaacagttttgaattcaaagcgtgcctgtataaatgaatagattatcaacactttatagctatgaaagaaaatctggatttaaaaaactgtgtgcatgtacacagggacacattaaaaagtatactagagtcagttgttttataaggcgctgtaacttgttgtttttagagacaaggtctcactctctcacccagactggagtgcaggggtgtaatcatagctaactgtaaccttgaacttctgggctcaagtgatcctccaacttcagcctcctgagtagccaggactacaggtacacactaccatgcctgactaatttttaaattttttgtagagacacgtctactctgttgcccaggctgatcttgaactcctggcctcaagcaatcctcctggcttggcctcccagagtgctgggattataggcgtgagccactgcacccaaccaacattttttatatttgtgagtaaagagttaacatcggtcccggactaagctgggcctgcctgggggaataaccttgaaacttatcttctctcagcactagttttggggaagccatagagttgtgataatgtgggatgtacctgtacctgcctgttactgtgtgctactac

SEQ ID NO: 80895 - DNA, 1058 bp, Homo sapiens; identical to SEQ ID NO: 80894

SEQ ID NO: 80896 - DNA, 1058 bp, Homo sapiens; identical to SEQ ID NO: 80894

SEQ ID NO: 80897 - DNA, 1058 bp, Homo sapiens; identical to SEQ ID NO: 80894

SEQ ID NO: 80898 - DNA, 1058 bp, Homo sapiens; identical to SEQ ID NO: 80894

SEQ ID NO: 80899 - DNA, 1013 bp, Homo sapiens
tctgtaaaaacgcaccaatcagcactctgtaaaatggaccaatcagcaggatgtgggcggggacaagggaataaaagctggccaccccaaccatcagaggcaattggttcgggtctcctcccacagctgtggaacccttgttcttttgctcttcacaataaatcttgctgctgctaactttttgggtctgtgccacctttaagagctgtaacatttaccgcaaaggtccaaagcttcattgttggtcagcgagaccaagaacccggtggaaggaaccaactccggacacactatcactgtttatatatcctttcttagagtatatttaacacaaccaccttgtactttggtctgtgtagtctagattgtgagcaatctaagcaggaggacagtaccatattcatgtttatgtttctgaacagaaccacagtatagtaagacttcagttatactaatttaaatgaaatcaatctatcagtgatgttaggttaaaatgaggtgaaactgtaaactgagaccaaatttcttacatgaccgttatgccagttacagatgaggaatttcacacagattctgaataatggcagtattgaatctcctttcccatgatgaattaaaaaagaaaatactgtctagatctagtgtctgattttaaaagtcagttttagaattaaccaaagtactggcatggctctgttttgtaggattacagaagcactttgttttaaagtgctttgtactttttgtgatttccaagttttctctcatgaatatgaattgcttttataatttaaaaaatcctactgataaaatttgtcagtttcattaccgcgtggtcatgtagggatcataatataacctgatacattaaaagccattgatgttttccttgttacttagtgctagtaagattatacatcacagatggagaaattttggtttcaataagtttagataatgcatttttgatagaattggaacccaagacagctgatatgatcttatgatctatt

SEQ ID NO: 80900 - DNA, 3199 bp, Homo sapiens
atctcggaagttgtaaccagttgtgaggaagttaggaccttggggttacctaaagataatttatattaagttgttgggccataaaaactgggcagaattggccacgcgcggtgactcaacgcctgtaatcccagcactttgggaggccgacgcggactaatcacgaggtcaggagatcgagaccatcctggccaacatggtgaaaccctgtctttactaaaaatacaaaaattagctgggtgtggtggcgggcgccggtagtcccagctactgggaggctgaggcaggagcatcgcttgaacccgggaggcggaggttgcagtgaaccaagatcgcgctactgcactccagcctggcgacagagggagactccgtctcaaaaaaaagccgggcagaattaatgattttgaagctccgagaaacaggattaaattcctctttcaaaccgaaatcggaatttgattttttaaaagtgtaaaataccataaacttttaaggttagttgttcggtaaccatgtcaccaattttaaggcactttctgagttgtgtatagtttctccagagccctaggggaaatgttttgcaaaatatgcacgtttagctttccaaaacaagttgtcttttttatttttacttttttacgttttaaaatgtgtttaaagggagacatcacaaatgtgcaggagaaaatacaggggtcggtggatttattatcttgtagtgataactttttgggtgtatgcatatgtcagaacttacacgttttacacttcaaatatgtgcagtttattgtcaactatatgtcagtaacgtttttaagaagtaaccaaaatatatttaatactaccaaaaaaaaacacggtaaagtataagcagataaaaacatcataaatccttgatgactccccccaaacccaaaactggaacattactaaaacttgcatttgtctatgagtttcttatctgtgcagtggattttgtgtatgtcacttccttgactttttgaaaaatagttttatcatatatgtttgtatgccgaaactgtgtggcatttaatttgtttttcttttgagctttataaaaatagtatgtggctgtagtttatttcattgctttatgatatgttaatctgccataacttatgggcacttcgaccgtgtttttattgttttttattttgttttgttataagcagtcttgctctgtgaacatttcttgtttccggctcttggtacacaagtacaagaatttctctagagtaaatacttaatgtggattgcattagacggtattaggtaatcaggactagaatagattgaattacttagaaataagatgaatgaaaaacattaggattctctattatgtttaaatagaagattcatagccgtagtgattgaactagttcaacctagttgaacatttgcatgaaaacccaaaattcctgttaacctatgtgtaatgactctcttactttgaagtcacattgtaaaaagtctggcactgtttggtatctccttttcaatgcaaaaatagtatagtagaaaaaacgctggattgtatgtaaaataaattatcctttctgctgttcctctcctcccctctaatctctagcaaattacttaaaaatttctcttgtgccttagcatactcatgtaaaagaaacttgtcctaagcttatccttccacttttgcacagactttaattaaggaaaacacctgtcaaatgtcacaccctttaagggaaagcattaggaccaaggtgttattctgtggaattaaattttgtatcctttggaacatttttggaaaagttgtgtggtggttcaggatttgttaactccatatttaaatatgttttagattagagaatgcccacaaggtgtgtttcccgaggatctgtttcattatgctaacaggaacacagcgacaaattagggaatagtatctccttactatcctgaagataggtgtgtttttatgtgtttcatgtttcattcatgtatgtaagtgtgaatttacatgtaattttgaataacctttttgtttgaaggcatgggagtagagatggtttcattttttctatatgtagcttgcagacaaatatcaggatgctttgttttggtagggctgtattctgcttttaaaaaccttattttttatttaattataaggacaatgtgtatatggggttttccccctcaaacttgagaaagaatagaaagttactaagaaaagccacctataacaccatgatagataactattattaacattttgtcaggtatacccctggtctttatgtgtgtattcttaatatcctaaactattaagagtccattctaaacactctcagcctggctctttcttaagaacttaccgaaatgtaatctgcctcaccatcttatttcatataagatgataatagaagtcatctgttaccattgcttcaacttttctactcttctgcttcatttaaatgtgtaaatttgtaaattacagtatcttactctctgactcaaaacctcccagtagcttttcaatataccaaataaaattgaaacctcttactgtggcttatatacctcagaccagcaaagtccactagaaatacaacgttagtcacaaatgggagctacattaagtaatttaaaattttctggtagccacattatgaaaaaaagagaaactggtgaaaatacgttttatgtaacccaaaaactattatttcaacatgtaatcagtataagaaattgttgatgggatagttgtctttttttagactgtctttataatttggtgtgtattttccacttaaagtacatctcaattcagactagctacatttctttttttgtattttttttgagacagagtcttgctctgtctcccaggctggagtgcaacggtgcgatctcagctcaccgcaacctctgtctcctaggttgaagtgattcttgttcctcagcctcccgagtagctgagactacagacatgcaccaccacgcccagctaatttttttttttttttttgagacggaatcttactctgttatacaggctagagtgcagtggcacaatctcggctcacagcaacctgggttcaagcgattctcctgcctcagcctctccccagtagctgggactacaggtgcatgccactacacccagctaatttttgtatttttagtagagagg

SEQ ID NO: 80901 - DNA, 1082 bp, Homo sapiens
tttagaaatgaaataagctaactcttaattttaacctgtttgctacctaaaatggtaatcatcttgatgttctttcaagcaggtcccagagatcttaaaatgatccggaatcactgagtccacagttctcttttctcttggttatgtatagatggagagtggtcttggtgttatattagtgtatgattcgtatttgtttcataattaacttcgaagtgaaaaattgatgcgagagcaaaggtttatttggtttccataactatttactaattttatgcttgccagattttaagattaaactgtttgccatctcttttttttttcttcccgtaaaacctttggccatctacagtcacttttcctcaaatcttatgctgtaattcaaactgtatattctttttgctgattgcttctgtacctcctctgcttccagtgttcttttgcaagagtgtccacacagtgggaagaaaacctgaacttgactcatgaagtgctgggcattcaaaacagtgaatccttgcaaaggatcttgggagtagacccctgtgaattggctctttcaatttgtccacttaaagggcataatagattatgcagctgtttgggcttcagcagggtattgctccatattcatgcctagttgcaattatgtgaattttcagtttgttacaaagacttccctttgtattcaaaacaattttgttggctttgtgttctaatatttgagttttctctgaggaaaaatagttgcaagattttgaactttgaaaacttcaaattaaaatgtttaaaggttttgtcactttttattttctgatgcaaaccatacattgaaagcatattttaagaagaagtcactctaataagctttaatttcgagtttatgaatcacaggatttttggtagaggtaaaaactatacttacaccgtaaattagacattaaatgccatttaatcagtcagataatgattaatgttagagtaatgtttgatgggccaagctgctaaaacataagcagttctaattaaaatatataaacttatcacgtaaaaatagcaaacttagtaatgtataaagtgac

SEQ ID NO: 80902 - DNA, 1049 bp, Homo sapiens
agtgtatttcagtacaagaatattttttagagactgttttctttatattgttgctctttgttctcatagaaattaaggtataaattgcaataatcattgcaataatcagaccaaaagccagctaagcattttcagccattgtatttgctatgctacttgttccggatcatgcaaaggtttttaaattaatgcttttctgctatatctgttgtttaaacaatagtgtaataataatgaaatcaagaaaagttacctatctacccaccagcagatcattgtttggtcatctcatttttttcctgttcccttctctgtcttatattcttgcagttttccaataattatgaatctgtgcagttttatgttttcacttaactatctgttgaaattgttttcatttcagtaactatgtaattctcttaaattgatgtgacctgaattaacctagttttttgaattgtctacttttaggttctaatttttcgtcatttttaatagtattgcgttgaacacacctgtgtgtagctgtaaaatattttcctttttaaaaaagatttcttttggaaaaatcctggagtggctttacctagatcaaaggataatgaacacttcactggccaaattgtttttctaaaaagttataccagtttatatcgacaccagcagaatatgcttcaaagtttttctgatgtgtagccccttaaatgttctgttaaagtgtgcctatggagctctctgacttgttgattagtttttgcctaaaagcctattttcaacaccactttccaagatgtagatggatataaagcaatttttctggatattaaaatcagctgagggaaattggaaacacttttacccacttaactgagcaattgtatctatgctagatattttatatacttagtgtatgtgttgctattagtaagtatggggcttaatgttttacactggctttgttattcaggctggcttttctttttcttctggtaagcacataccagaagaaatattttctttcaagaaaatatatcagaaacatttttagg

SEQ ID NO: 80903 - DNA, 2230 bp, Homo sapiens
ctttttggtttcctagggagagtggaaagtagttttctacaaggagaagaaaacttttaaattgacctaggtatttgggtcaagatatgaaaagtgatggttgcgttttatttcaaaaataatgtattcaaagtctctgttgttagatgccattcaagaggaacatagtgatttttttccctccaaataatatgaggaaaaaacttaatgggcagtaagttgataaaacttgaaagaacctagagccatttttgtttaaacctattaatgctaatttttgaactgatgtgtctatgaacttgtttgactaaatttggttttctgtgtttgtatgccatcggagaaaatgaactcgaaacagttttgtcgttagtagtgctttggtagaagagagcagatccatctatccctgtttataccttttttccccttcgcaatataaataccctgtgtcatctgctaccaatagatttttgtaagtactagatttctcagcaacatttagtgccattgactacttttcctgcttgaaactcttctcattattttcatgatactgtctgtgctttcctcattagtgatctctgtgtcttttgcaaatgtttctcctttacaaccattaagtaatagaagttcgtagcattttgttcttaactcttctctagacttcccttttgataatctccagtcccatatctttaattagcatactatacatattaatggttccaacgtctgaatctaaaatccaaaactttttttgtacctgagacccatatttatccagctcaccaaaagtcacagcaaatgggtgatactgccacccaagccagaatctgattgtcattctgattcttcttcatcaccagttagccacaattagcctataaattttaaattcagtgtctctagaatcaatctttttttttttccttcacgtgttagcataaggccacacggtatgatttcttagatgactaaacacccccctaattgatcttcatttccattttaggctctgtataatacattctttactgtgcggtcatatctgtttttctctgcttcatattcgttagtgaatactagctagagtgaagaataacaccagctgattctgtgctaaacattctctcagatggtccccacgctaagtactgttagtcttttcgaaccagtaagtcaatttagaaaggctagctaatttgtctaaggtctccttggctggtaagtgactagcatactttaaaactgaggtttgtcagactggaagtcctttcctttacacactgagctgtgtgctttcctgagcttacttctctattccttttttccctcacatcattccacttcactctttaaccaccagctatttgtaattccttcttctaaggcatagtgaaaacttgctgcctgtctaaaaatgctttaagggaaacaaacattaaaaaaaaaaagtatttctgacagttttttggaacactttgataaaggatattaaacattttagcatccccaggatacaagaagataaaagaatgaggcacaggcaaagtaaaggtagttttccttatgcacatagttttgagtttcatagctgttgaattcctcacgtttaataaaagcttgagaccaagctgtgtagtgggaagattaggcaaagtgcaaaagcactttaagctatttgaaatgctaacaactccttaaataactgttggcttggaccttgtgctcattctgcatccgggtgtataaagcacctgcctgtgaacaaaagtcaaataacttactgagtaacttatacatagggtagagaggctacatagattattttgcatcaaatattctatcatcaaaaaagttaaataatgcagacaacattacttacaaataaaattgacgtgaacagaaaaatagttgatttggaatcattttcatttaaaatattttctctttgtcctctgtgccattccccctctaacatattttaaagcaaaaggacctctattggaccaaaaaaagaaaaagtagcctttttattcatagctttgaaagcaacttggtggtaaaggaaaaaggtcaaattgatgaaacttttgaaatacaggtaaatattaccaatgtttgtttctttgaagggatcaaattattaactatagttgggaattaaaggtaattataagcatagtaaaaatccatgaattacccattgtaagaataggagtgagtt

SEQ ID NO: 80904 - DNA, 1124 bp, Homo sapiens
tcttgtaccaaagctgtgagatcctttgtgagtaggggccatattctgtcttcgtgtgtgagtgtgtgtgtttttttttttttttttttttttttgagacagagtctctgtcacccaggctggagcagtggcacgatctcctcactgtagcctccacctccctggttcaagcaattctcctgtctgagcctcccgagtagctgggattacaggctgtgccaccacctggctaatttttgtattcttagtagagatggggttttgccatgtttgccaggctgatgttgaactcctgggctcaagtgatctgcctgcctcagcctcccaaagtggtgggattacaggtgtgagccaccactcccagcctagcctttgtgttctcttgacctagcattcaactatatgttgaattgaaatgaatatgtaatctctgccttctagctgcttaccataggctgattgatgatcacttgtatagactccattgcctgtggaaatggaatagctttccttgtaatactgcctgagctctgctttccacccagtccgttttagcctacttgagccctggaccttgactgctgtctggatgcttgaactatgttttcctttttatttttctaatcatctagaatccagcctaactctccacccttctaggtatttatattttaagagtatcagtctacttgtgactcttgagtgcactatgtagaatcatggtatcatgttttatttagtctgtaatatccttcatcctcattcaaaatattaaggtgagtctcccaccataaaccaaaacaatcctttccctataacgaagctaatcactgtataacttctcttccttgtttctatttgtgttgtttcatattatattgtgacttgttaatttgtctgttttcctgagtagcagccattccttattcaaatcatactgctcagaaactttttcatttcagcttacgtagctattaagtagtaaagcaagaatttgaagccagatgtacatttttttctgtatcctcagtatctgatagtacctaagtactcaagaaatgcctcttgaattgaccagtgaccacaactctgtcagaatctgcatttcattctttttgatgtct

SEQ ID NO: 80905 - DNA, 1086 bp, Homo sapiens
gacagaccatttatttgtagaatctcccttaatttgagtgtatctaatgtgttctcatgataaaatttaggaatgtggttttggcaggaatgttacacttgtgtgcttttcagtgcatcacattaggaggcacatgtccacttgtttccttatcagtgatacttacttagatctttaggttaatgtgatacctgccaggttcctctacttaagttaatatttctccttctgtaatacataatttgtgggaagacactattagactcaatatataccagtcctcatcaaactttcattcacaaagagttttaacattctttggtaactttgtctaaatcaaattattactagatggtaataattcagatatttaatggatttagatatttaaccgggtttaggtatttaattgtaggagctcagtaccatagtaggaaccgctttgagctgttggattctttagcattataaagtgctttgtgttgaacaagaatgtctcctgagacttctatacactgtttcaagttctgtactctgtaccacgtgagatgagcctgctttatttgtgtctctctaactgcccttcaaaatgtgttcttttttgtcttttcgataggttacttgctttaatttcatatagtcacttcttgtaagagatgactttcctgaatttataaccatcctgttggttttctgataacattcattcatcagtatcacacttaacatatggtatccaaatctggatactaattccagatacagtttgatctatcagtacaatggatcactgtttgcctgtaatctagctttatgctcaagagcaccaggttttggagacaaatagatttggcttcaggtcctagctctgccacttaactagctctgtgatcttgaaccagttcctaacatctccaaacctgttttgtcatctgtaaagagttggtaataatagcacctgacttttaaggatggaatgaagattaagcgtgcatgtaaaactctcagtggtgtctgttatatcgtaaacacctataaaatgtaaattatttttatgcagaaagcatgcttctgttttattgccca

SEQ ID NO: 80906 - DNA, 1028 bp, Homo sapiens
ggcgtgatggttgggtgcctgtagtcccagctactcaggtgactgaggcaggagaatctcttgaacctgggaggcagaggttgcagtgagccaagatcgcaccattgcatgcactccagcctgggcaacaagaacgaaactgtctcaaataaataaataaataaataaatacatacatttatttttgcagtgcaaactgtcattatgactgcctatgtaatacatatttgctaatgggatggagaaacaaagatttttatcttgtaattgtagttcttaatttacagactttctgtatttttggtattttgaaagttcagtttagtagaatagttttttttttttatgggaacaaggttttattttctaggcaaggcttctaacacttgattaacctgtagtaataatggtactgtagaaattttaatctgtcaagaaatgtgctataaaccatagaaaatgtcagcaacatggctcctcctgctgtcacaaaacaatctcattctccctagtccggtgctatgacatgtatacttgagactctaaaggcattccactgactgttggtaaaagtgttctttagttggtagctgtttattctaaataaattagctagacttaaggaaaacagaaaaatacctacttttgcttactttggataaaatgattatataaagtaatccttactcacctagtctgtggccaggtatagaaaatctatggattagttatatgcatattgttaataatgtcaaataccaattggaatgtttttatttttcactttttcttcagccacccttttaacctagctataatagcgaaagcactccttaaaattttaggtggttaaaatgtggtacgtaaattttatatgtctcaactctgtttcatgttaaatgtgttacaggaatgaatctgaagtctgctgcagtaaaacacagaaggctttaaaatgttttcttgcataaaattcaaaacttttaagtagctgcttatgagaatagggaaggcagaaagctaatgtc

SEQ ID NO: 80907 - DNA, 1520 bp, Homo sapiens
ttgctctaccctttaccttaccacaatagtgtaggcttctcattgatcctgtacgaaattctgtcatttggttttgcttagatttttaaatgtatttgagcttgttttactgttgtataatgcagtatattaaaatgaagtttttgggctatataaggccatgtaacatggtcatgtacacaggctatagagtctggctgcctgagttcagatcctagctgtcccttctaacatctctgtgatactgagcaaatttcttaaaccttcctgggcctcagttgtgtaatctgtaaaatagatacagtaataatttgctacctggtgggatattgtgaggttgagtgaatcatcagtgcttgcaaattattatcattattaaacctgtttgttctttgagaggaggaatactaggtagcatattataaatgctcaaaataatagattttaaggctttaggattaagaatttgaacattacaaagtaggatattttcaattaaggtatcataagaaacatctcaagaagagtagaatagaaatctttactcccggctgggcgtggtggctcacgcctgtaatcccagcactttgggaggccaaggcggatggatcacaaggtcaggagttcaagaccagcctggccaacataatgaaacctccgtctctactaaagatacaaaaaattagccgggcatggtggctggcacttgtcatcaaagctactcgggaggctgaggcaggagaatcgcttgaacccgggaggcagaggttgcactgagtggaaattgcgccattgcactccagcctgggcgacaaggcaagactccatctcaaagaaaaaaaaagaaaaaatctttactcccctgccttcctgtctcaatctgctgtgtgcattagccccatttcacattctcagtagctacatgtgactgatggctactgtgttggacaacactgttctagatagttggtttcactaggtaatgtatttgcattaaacatgacatttattgatgacacaattctctttgtctggaacatgaaagattggttcttgtatcagatataactccaccaagaaagagaagaggaagcaaaaaatatttcttcaagaatcttggtgaaggttaggtgtattttctctgggttttatgtaaagtgtttttttttttttttttttgagacggagtcttgctctgtggcccaggctggagtgcagtggtgcgatctcggctcactgcaagctctgcctcctgggttcatgcccttctcctgccttagcttccggagtagctgggactacaggctcctgccaccacgcctggctaattttttgtattttttagtagagaacggggttttttagcatgttagccaggatggtcttgatctcctgacctcgtgatccgcctgtttcggcctcccaaagtgctgggattataagcatgagccaccacgcccggccataaagtgatttttaaacaatttataaaatttattatagtgtagttatttttattt

SEQ ID NO: 80908 - DNA, 1023 bp, Homo sapiens
tttgagaggaggatgttagaaaccattccatcacacttttaataaaaaacggtatcatctcaggtggaagtgaggcctattcacagatctcctaacaggtgattactgtctctgtggcaaggagaacttttatgaacctgccctttgtgagctatgggtaaataaggagtcttggatttatgactgcagctactattaaatagtggacagtttgaacctctctctctcatgatgaactgcagatatgtgacttaaataagccacccaattctgaactgagctttatattgcaacttacgggttaaagtattttcacaatcaccgtcccagttgaccccctcaaaattctatgagttagaaaggacaggcatcataactatcttaaatgaagtacttcaggctaagcacttatctaagtaggaagtttatattcacaaccaacttgaagatgagtcagttcttttttctttttactacatatcaagttgtccctgtatatataacagttgttttgcagtgatttgtagttaaacttcctttcatgatgcatttgttagtcatccctacaaggtgtgttacgttttaactgaaagaaaatcagtttctgaagtatcttgcaatcatttctggcatccatttttatatacctctatgaagtgagagtggtgtattctaaaactttgtggttttgatacttaacattttgtggttttgtggctaataaagttgtaattttggagttagatgtgatgtttgtgcagatacgtgaaaatcagacattagtatttctgttcttgtacctacattgatgagagcagaactgtgtgtcctaaatatcttttacagtgtttaatagctagcggagtgataggtacgataagtttatcaagatatccttgaacaaagagctatgacaaaagaaagtacttgcttatagtcatggaattttgctatgtctttcctgataatatctctaaccaaaatagttgtgaaatcatttattcatccagcatgtatttgagt

SEQ ID NO: 80909 - DNA, 1851 bp, Homo sapiens
aatcaagatttaataaaagggccgggcgcagtggctcacgcctgtaatctcagcactttgggaggctgaggtgggtggatcacctgaggtcaggagttcaagaccagcctgatgaacatggtgaaaccccgtctctactaaaaatacaaaaaaatcagccaggcatggtggcggacgccagtaatctcagctagtcgggaggctgaggtaggagaatcacttgaacccaggaggcaaaggttgcagggagccaagattgcgccactgcgctccagcctgtgcaacaagagcaaaattccgtgtcaaaaaaaaaatagatttagtaaaaataatttgtttcatcaggaatactcagcaagtgaaactggttttttgttttttaactgtgagagtatggtgatgaatataatgactactattaggtagtcattacataatgacatcaccatattatgtgacatctccttgtcatataacgacaactgtactattatagtatggtttggtgccgctgtcttgatggcatgttaaagctctagctgttttacccttcattgcttttacactgccaatgcaaatgtcaacacagtgaataagacgaataacaagttcttgttattatgaaaataggggctgggcgcagtgtttcatgcctgtaatcccagctctttgggaggctgaagcgggtgggtcacctgaggtcaggagttcaagaccagtctggccaacatggtgaaaccctgtctctcctaaaaacacaaaaagtcatgatgataggcacctgtaaatcccagctactcaggaggctgaagcaggggaatcacttgaacctgggaggcggaggttgcagtgagccaagatcgtgccactgcactccagcctgggcaacaagagcaaaactctgtcgaaaagaggagaggagaggggagaggggaagggaggggagaagatggggttgggagggcagcggggagggggaaggacctctgaaaggatctcaagaatccccaggagtccacagatacgctttgggaactactgatttagagtgtggactccagccaactgcttgggttgaatcccagctcctcacttactagctgtgtgtccttgaacagtttatttctctgtaaaatgagagtgctaatagtacctacttaataggactattatgaggattaaagggattggtatttataagtgcttggcacataaagttctatataagtattgctcagtaaatggtaaagcaagttttcttctgtaaaaaatgtgcagtttcatgagcagaaaagatataaatttagagaatgaccatatattaaactttaaaattagggaaggacattcatttacaattgaagatttaccttagggggagaagagattttttaaaaggttttgggtggaggggttggggggaagtacaaagtctacatagttgaattaaaagctttaagggcaaagagggaataaaaagccatagatagatcgatcaatctgtggtaatcgtgagaagaaagagaatgaatgtccatgaatgtggaagccagtgggaaaatttgaacgggttcctctttttgcaaataagaatattgggtggccttgtgctggtaaaaactgtgccttgttctttaaggtatgtgatatgaaacctaggtcagtttgagaatatgaaattcactgcaacttaattttactaatagaattactgtttggtatgctaaattagtcacattgctaaatgaacctctttctgagtaggctgaatggaaaagatgcccaaaagcttggagcatgaggccaggcatccttgtttttttgttttttttctttttttttggagtctca

SEQ ID NO: 80910 - DNA, 1053 bp, Homo sapiens
tgcccagtagggccctagctgatgggttttaatttgaggaacatgagtccaatattgtcagatcttcctatttttcaacagaagaaatctggaattacgtgacattccccaatttttgaatgctagcaactaatttttttaaaaaataataggtactggccaatcaaatatggctatgggtcagatttaactgaggtttgctagttcacaacttctttggactaattcatcattataaattatattttctccctatttttttcgggaggagggagaaaaagaatgaagtgaaaaaaagtatgcattttataactgccttgggctgttggtcattcttgctgaataactgtttcattttataaattatgaatattgcagtgtgaaacattctacatcagttttctccccttttcaacagaatatagccgttttttgcctgacatgaatacttgtgacaataatgaagtgtgtttactcaacaaaatattttgtggggttcatgttaggcataaagagggtttgaagaagaaacttagagtttagctgggaacagagttgtataccagtgagaagaaacttagagtttagctgggaacagagttgtataccagtgaagtatttgagtaatggtacaattaagtgccccaaaagagtggtacaagcagcttccttaggaatatagagtagaagaggcttgaggtggtcagaaaggggcccagaagaaatagaatttaagctgatttcctgaagtagataggattattacaagcagagtacaaaggtagatgggatatactaaaaaaggcgcaatatgagctagaagcttgtttccaagagtgagcatgatttgtttcaatcagatggaagcaaaagaccctctgcttttaggaagaatagagtaagaacagttattgaaattttgctatgtgccacacactatttggatgcttttcatatgcattatttaatctggttagataagtgatgtaagtgccctcttagttgaaaccagggaaatttagtaacaagtccaagcttttacaggtaataaaa

SEQ ID NO: 80911 - DNA, 1044 bp, Homo sapiens
ataactgttaagtattgtctgggatgttagagggagtaataggttggggatttgactacgaatgttatgaacagtcaaaagtcacattttatgaattctcttcaattcataggcttttgtttattataccatgctaatcatttttaaagtatctggtagagtgatcttactctctgtctctggatttgtggttttataattccacagtgcagcagttaaggaattgttctgccttttctccccttatcccttttcctccctgatcatttgaatgccagactgattgccccaaaaaggtatagtagcaaagggagggaggcaggacttccagtttcttcatagctaccccatctatgccattacacattcagataaactaaattactctttatggttttttgtctttttcagtctttctgactcttcatgtaaaggtacattttatggcctaacgattaataaataagactgattcttttttttttttaagaatcctgtgagaaaccctttgtgcctcttgagttatgaaaatcattgttaatttgatgccgtgcaggcagtttgacttgggaaaattggtagtgttacaagttttcaaactttaatcttaatgttttgaagtaattgtaatgaaaagcttagtggtcatattgtactttcatctatgactttttacttgagtttttatggaaatatatttatccttttactgtttggttgctagccatatatttaccagtatcattgggagagttcctttaattcctctcttacactttaatgttgttaataagcagtatagcatagttggtggtttagacccgagttcctcagtcttttttctctattttttccctaaggagcctttttaggttttttttttgtttttttttttcttaagtggcccccacctccagaagattttaactccagagagatattgcaggtctgtttatgtattttatgtatatctgtgttttatacaagagtaagggtttttgtgaccctttcctccaaaaatcagtgttttctcccttgaggggc

SEQ ID NO: 80912 - DNA, 1100 bp, Homo sapiens
tcttcaccagaaatgatactatgtgaaatgcttttgaaacagaataaataacacacattagcacatgaacttccagcaaaagtttaaatgcttagatattagataatataacatacatcaaaacttataatgtatatctcttattactaggagggtccaaactgagctagacttaataagttatccttgaccttctgggggtagagtcttcaaaacagatttctttctctaggagttctttatactttctgagcctgtacagacttggcttatgtagagtgggttggagataaaaagttcaatgtgtgtccttttggtttttatatttttctctcctttttagccctatgtcttgggacagttatgtagaatagtttgatatatgtgggcttttttctttatcatataaaagcagttttggataatgtgtgattggaagttacgtgtctgagttctttgctaattttatgtaattttcaggtgtgcaactgaggaacatggctcaagaaactaatcacagccaagtgcctatgctttgttccactggctgtggattttatggaaaccctcgtacaaatggcatgtgttcagtatgctataaagaacatcttcaaagacagaatagtagtaatggtagaataagcccacctggtaagtaattctagtgaaacccgtctatattcataattgaaatacaagtggatatttcggtatacccaatacctttttctgctctcacattatatttatattaccatattcatatcagtaaaatttctcattacacattgtgattataatcagtagtgaggagttaggaatgagtatcatcactcattgaaaatactgtaaattcataccataatcttatttctgtggctgtggaattctgttactttatttagaggggacacctcaagtgtcttggaaagtaagggaagagagtgataaaagaacctttgttcttttatctggtgtgacttacagctcaagtagttgttgaaggaaggagtggattattgataaccacagctcagtggacttgagaggaagctttactccattaggaaggaggagtatcgtggattaactcatagtaa

SEQ ID NO: 80913 - DNA, 1051 bp, Homo sapiens
atatattttttaactctgaagtcacatcatttagaagcctgcatacagcaatactggtttcatttttattctgcttttaggaaccaatatattaagttcctacactggggttccttttttccagttcatgataagatatgttcagttttgctatgccagaatatcatttacagctttgtcttagggttctttaagcatgtctttatcatgctagttttcatttagtgaattcatgtggtacttgaaatacacaaaggacatatacactgttgctttgtttccaaggcagtaaaattctggtccaaattagtctctagttttaaagctctatgattatgtttaagttattaaaaaaaagtatgtctgtgttctcatcttaattatctacttagatatgttgaactcttactgtgtcacattagttaatattcatgtgtagagatcaccttttaaaatgaaatattttgcttttctagccctgtatcaaatcagtcacttttatcagaatctgtagcatcttctcaattggacagtacatctgtggacaaagcagtacctgaaacagaagatgtgcagggtttgtatatgaactagcatgtattttgttatttgagtattataggccagacactatcctaggtgcatgtataaaaaaattgccagcttaaaatacatgtttttctgttttccctatgaacacaatactttatatctttaagtatttaattaacatgttggggagccatttcacacttacatgtaattttatcatcagcataaatgttgcaaattcaaaatttgtttagtttggaaaatataattaaatgaatgtgtggcagtgttacactgttctcttttactattttggccgtttcagtctatatactactctgtaagaaaactggggctgctggtttgaggggcatctctttcttttgtgttttgactcattatctgagagactgtgtccatcgtgcctggcagttctccttttttcttccccatgtgtgcaatagtcacattcagttgctcgtattcacagcatggtatc

SEQ ID NO: 80914 - DNA, 1001 bp, Homo sapiens
ctcgtttagcaaactacccaggtatcagttttcttcttcctcactccatatgcttccctcaagggaaatttatatagataggaaaaccatcccaaatggaagaaggtatatgagtagcagctatatgtctaagccagaagtttgtaacattttgtaattggaacattcagaacaactttttctctacatgtattctgcttataattaggatatgctgccaccaggttggtggtactgctttcatattggccacatggctctgaagaatttttatgtttcattgagaatttagcatattgaagcatgtttcttagttgttctttttgatttaaaaatatagcagtaccttacttacatagtgtcactcaggagtataagtcaaatttccagttcacaaatgctagcttttaaaagaactactttaagcattttggtacactctaaaactgttgaagaatatgcttaaatttggtcaacctcttagtccctcagatcttgggtcatagtagaaaaatactgaatttggattcataagttctattttcctatcttggtatgcctgcttaacttcactgagccttactttcattactcttaaaagagaataagaatgtccctcttacagggtattaaaagatactgagataatggaggttggatgagctttgtaagctgcagaagatattctttatattgcccaagtgatttgggagttgtaggaggcctagagtaagagagaattttgaagctttccaacactcgaatgatgtcatatgttaagatggtaaggtctacatcactgaagcattctaggaaagatgagttgatgttagagaccatatagagagaggaatgctgtgcttagtgacaggatgaactagaattctcaggctctttcctactctgagggtttctgactttatacaaagttgaattgtcaaatcattggttcagaaaaatcagagggggacagtctctttggactgatttaggaaagctgt

SEQ ID NO: 80915 - DNA, 1242 bp, Homo sapiens
ttcagatggggaataaggtaaccatccttctcaatggccttacggtgtagttggggaaatgaggcacataaataaaataggtaagtaattcaattcaacagatacttattgtcgaatgtctgctatgtggttggagacactgggataggcactgataatgggataaataggaccgatgtctcccctcaaagaattcaaagttaaaccaagttaagccaatgagggaattttaatatgaaaagtgctatacacagggtttcccaccccaaggttgttggagaggcagtggaggaagagctgattatataagcttaaacaagaaaaacaagttagagttagcctgataaaaagagggacaggaggggcatagaaagagtattttgtatggaaagcacaacttatacaagagcccagaggcaaaagagagtttgatatgtccagggaaactgcaagtccttcagtatggctgaatcatggagtactgttgaggaatagtgagagatgaggctagagaaagaaggatgaagaaaatcatgaaggacctctgggctttatcctggggggtagttgggagccattgaggaattctaaacatcagagggaacaccattagattttcacttaaggcagatgattggatgcaatgtgtgaagcatggattgtagagggaactcatgaggtgcccagtatttggaaaaggtgttaaggaaaatcagagtgagaagctacagagaattgagacaaggaaagggtatttgaccttggtcttgaaaaagaggaggacctagatcaaatggggaaaaaggaaaccctttggaatagattctaagaagtgtgagcaaaggtacatggcatattcccagtgtagattaatggagcagtggatccctggggaaagtctagttggggataaaactggagaggttaagaatttgatccatgggaaattccaccattttagagcaaaatgtcacgtctgcaaggtcatattatatgattctgactctggcgacagcattcatgagggctagagtagttagcaactggagggaggcatgttaagatttcagagtagtaatttaacccgaatcttggtaaatctggctttggtttccatacataaatgcatcaacttattatcttacaacattttaaagcttctttgcttcaatttgccttatttctaacatttaaagtgcttttatgtgaaacattctgggaactttaaacatacttaatatt

SEQ ID NO: 80916 - DNA, 1050 bp, Homo sapiens
gtttcaccttttccctcctcgttctctgagagacctatgtcattctgaccccgaacaatattaagaactatgcatatggctattgtcttgcacactcccttagaatattcaagtagtatttgtttatgtgccttttattgattaaatttgtagttactagaaaaattagaaagtacagttaaaacctaaagaaagtctataaaaccactgttaacatatcattacatattctagattattttctacatgcatatatacatacatttaacaaaaaggggtcatatttttgtaaacaactttgtaatttaatgactagttttctgtgctaataaattcctcagtatcctctgaataatagactagggagggtgggatgaggaatagcaaaatcttacagaataattaaattttgccaccttcgtatttttgttagcttcagtatcagacacagcacagcagccatctgaagagcaaagcaagtctcttgaaaaaccgaaacaaaaaaagaatcgctgtttcatgtgcaggaagaaagtgggacttactggtaaggacctaaatcaaatgtttaaaattaaaatgatgttttataataatgcatagcttactgttgttgacttcaattaagattgttcctgttcccttgagagttaatattggatatacttcaccttctgaattttcttaaggaaataaaaatagctttgattatacacctaaaagtgaaatgaatagcttttttaaaaaaagttttatttcagttgaatttagaagtattagacaaataaggttagtgtgccagattctgtgaaaggtcaaagatgtggctcctgcttttaaggagagaatattttgaagtacttggtaaactggaagtactttctatatataaaatagggctaatcatacgttgttgtgtgggttcagtgagttaagacatgtaagcagttagcccagtgctgccacacagtaagtaattaatatatgttggctactgtaacatagctatcagatgcagatggtggtgggagggagaaagaaatgttcaaa

SEQ ID NO: 80917 - DNA, 1232 bp, Homo sapiens
tagtgtttggatttgaaaaatgttttacattttcaacctagcaactgtgtttttgttaagaagtaattgttgccatatcacaggtgaagaaacaagctcagaggactttctctagggcaaacctgcgtttgtagataggaataagaaatgaagctctcaggtagtgaataagaatgtagtttgtgagacagtgtatttagaatgattctttagtttacattgctgccctaaatatattgtgctgttcagtattaattatgccaaagaccttaatatttcatccttcaactcatgtatgtgtattactccatttccagggtttgaatgccggtgtggaaatgtttactgtggtgtacaccgttactcagatgtacacaattgctcttacaattacaaagccgatgctgctgagaaaatcagaaaagaaaatccagtagttgttggtgaaaagatccaaaagatttgaactcctgctggaatacaaaattcttgagcatctgcaaactaaaaattgacttgaggttttttttttcctagtcattgggaatgtagagcagtgtatcttgcatgtcatcggaagaatagatttttgttttggttttgttttgaaaatgactctgaacatttatttccattgcaatttctgtggctgaggagacttaaactttacaagtattatccttttaagatcattttaattttagttgagtgcagagggcttttataacaaacgtgcagaaattttggagggctgtgatttttccagtattaaacatgcatgcattaatcttgcagtttattttctcattgtgtatgtatatatcgcttttctctgcagcacgatttctcttttgataatgccctttagggcacaactagttatcagtaactgaatgtatcttaatcattatggctgcttctgttttttcattaacaaaggttattcatatgttagcatatagtttctttgcacccactatttatgtctgaatcatttgtcacaagagagtgtgtgctgatgagattgtaagtttgtgtgtttaaacttttttttgagcgagggaagaaaaagctgtatgcatttcattgctgtctacaggtttctttcagattatgttcatgggtttgtgtgtatacaatatgaagaatgatctgaagtaattgtgctgtatttatgtttattcaccagtctttgattaaataaaaaggaaaaccagaatgctcccttgtat

SEQ ID NO: 80918 - DNA, 1445 bp, Homo sapiens
gtctcttataaggacatttctaattggatttagggcccacctggataattcaggatgatcgtgtctcaaaattcttaacttgattacatgtataaagactctgggagttaggacatggctgtatctttttttttttttttttttgagatggagtcttgctctgttgcctaggctggagtgcagtggtgcgatctcagttcactgcaacctccacctctcaggttcaagcgattcttctgcctcagcctcccgagtagctgggactacaggcgtgcaccactatgcctggctaatttttgtatttttagtaaagacggggtttcaccatgttacccaggctgttctcgaactcctggcctcatgtgatctgcccacctcagcctcccaaagtgctgggattacaggcgcgagccactgcacccagcccagaattttcttcctttttgaggctgaataatattccactgtatgtatgtaccacagtttgtttatccattcatctgtggatggaaacttgtaagcacctgttgatttttgagccatgtgtatgtggcgactctttgtttctagtttttgaagtttttaaagttaattgacaacatataacagctctgatgccctgcattctcttgccttcctttctcaggctgcacttaccagtgggctaccatggccgtgcctcctctgtcgtggtgtctggcaccccaatccgaaggcccatgggacagatgaaacctgatgactgtgagtgaccgcagcgtccaggccttgctggtacccagctctctgttcccacacagagagttctgtggcctcactcacagcaccgttttttttttttttctggtgttattccagctaagcctcccgtatatggtgcctgcaagctcttggacatggagctggaaatggtaagtgagcttgatgttttattgccatgggatctatagacacccggcaggagagccctttgggatggctccccgcaccatgagccgcccactcccctcctcttcagccacatcggcagccgctctgtgtccccacctggccatcagaaggacagttgatccttattacttgcagattctgtatttgagaattcacaactacttgctaatatttatttgtaagtccagaattaatattcacagagcttttgtgggcatgtgtggacatgcgcagggcagtgaaacatttgagctgcctggtgagcatgttcctaggtgaggctggacaaggtgttactctgccttcttgtctcagcttatgctgtaaacatgtgtcctttgtagtctattcggtgccatgttttttgcagatctgtgcttttttggctgtttcattgtttttttataatgaccccaagtgctgtgctaaagtgccgtctagtgtccctagcacaggaagactgtgacgtgccttatggagagaatatgcgtgtt

SEQ ID NO: 80919 - DNA, 1058 bp, Homo sapiens
accttaggttttgtgggtttggaaatctctagtgaccaagaggaactgcttccaccagggaatatagttatgggtctgttaaattggaagatgatcttgtgccatctggggctccttatgttgaaatattggcagagaaagagatcactgcactgtcaggatggttaaccccaatatccaagggaaagtggggtttctgctacacaataggggcaaggagtactagctttggaaccctgggattcgctagggcacttggtactccctgtatcccttgtcctcattctgtaagcctgaggtgggggcatgaaattagatttctaacaagctccccagagatgccaatgctgtccatccgtggaccatagtttgagtagtgttgccctagagcacctgctattctttctgataattttacagagcttccaggtgagatcttcaaggcctcttcatgttctttaggaatctgtggatactgtggcaactcattgaagacacggcactaagaatttgaatcctctgtggatgaagatttgggtcattccaccagataaaattctccaacagctaagggactgccagaaagtagaggggctatggaatgggtggtgggagaacaagactgcagttaccactctgggcctcatgaccagccacagaagggggcactagcagttgtgctttacaggaagtgttccacttacccgggactggctacattatgatttaagttgcaggagggagtgggactaaattgctatcacccccagacaatatggctgctggtgagattttatgtttcccctgtgccggggacaaaatatttttctcccatctaagcaaagtttgtgaatggctgctaagtggtaataagatgaattgtgctggtttttcttcttttgctccagtgtgctgcctatgtggaccgtatcacccagggtcccctgacctttagcttctgttgtttttggccaatggaagacccagacaggagattggagggcaggaggcaagaggtcaaggtatttattcccccagctctcttcctactgagctgc

SEQ ID NO: 80920 - DNA, 1063 bp, Homo sapiens
ggaagacaagttatctgctctgaaaatcatgggacaagcataggataacagttacatgcattctcatttcaaaagagaaaaaaacagaaggaagaaaagaatcatagtcccaagaaatctcaaaatccaaccagaaaaactccattggtttccaaagcctgaataatcctctatttttgaagtctccaccctttctgcccacagctctgccctcttggccacagctcttccctcagagtcatcctcccttttttcctgaagggtagcacatatttttagctggttagttttatcagtatgttttctgcctgtagaattttgggagtccaacagcttttttttatttcattttgtctctgtcccttttaatccaagctggcagtgtttctgctgatataacatttgaaaaatttttgcggatctcccatatatgtcgtggtgatttagtccttcagaccagagagttttccaatatttttttctggataactgtatctctatttctaacttctgctgagatggctgaggggatctgcgagtgacacatctaagttttacagcattagcaaaagattgtccagtcccacctttggctttctctccagagcatactttcccaacagtgaatatcctaattttagcatcttttgcaacccagatatgcagagaatccttgagggtaaggactaggtctgatttaacattgaatatccaaaacatactatgtttcctgttgtggctttcagtggaagtttgatatcttgaatttaaaagtatggaataaatacagaaaactgatattcatctaccttggatcaggttaccccaaagcagactctgaggcagtgattcatgtgcaaggatttatttgggaagggctcctaggagaaactgacacgggactggaggaagcagggctagaagggaaagaagcccagcaagggtgcaatttcagatgaagggcaagtctcagcctgatcctgtggtgctctgtagtgtaaattacacaacagagtttttcctccctcaggactagtgagctagactttcatactcctgcaca

SEQ ID NO: 80921 - DNA, 1067 bp, Homo sapiens
gccgggcgcccccgggggcgcggagccgcagctcggcgcggtgggtggtggagcggctgtcactacgcggcagccgcagcatcagcaccagagcggcatctgcatcccaatcgctgcccatccggtcccgggcaggcgccggtccggacccgcgggcggccggacgctggcctcgcatcctcgggaacccgaagggcaggcccgggagcccccgaagttctgaaaataaccgcctttgccttccccatcccacgcatttttctcttccggtcccggcttttgtggcatcacggcgtcagccagtcctggctggtggagggctccgcgctgacggagggaaaagtttggagctgggattcaacagggtacaactcccgggactctcccctgcccgccccgcccactaagcgctggtcctttgcgccctttgcgactggctgctgtgtgtcctaaccctccgggggcacaaaacacccagcctgtggtcaccagcgtggagcagccctggtcctgcccaggtgacatcctctgctttctggtctgacctgtccccagggtgcagtctgtgacaactgagctcattaggaaatatttcaaaaatggaagagttcttgatcaagtggcaacattgacttgttttggtattgtagtagggaagttccgttttcactgggaaagttccctacctgatgagcagggtgtgggagaagagaaacgtgaacatctaagctagtacaaacttttgggtgttgtgcagaggctgctgtgggcacggcaggttgctgggtccctgtggaagatgcagggagagtcacagagggcggcccccaggaaattcccagcagagggaggtcatgtgttggagatagggagggtcgggggaggaacagcaatgcctagcaaagaaaagtgtctctcatcatagaattaggaatgaaagatccctttcatctaaggcggccagggaaggcttctggagattggacatttcggctgaaccttgaaaacgggaatgtttgaatatacagagccagtagcagaggggcattgcaggcgtaagtaacagt

SEQ ID NO: 80922 - DNA, 1572 bp, Homo sapiens
cagagtattttcactgccctaaaaattctccatgctccacctattcattcctcccacttccgaattcttggcatccactgatgtttttactgtctccatagttttgccttttccagaaagtcatgtaattggattcatgcattacgtagccttttcaaactggcatttttcacttaataatatgcatttacattttctctgtatctttcagtggcttgatagctcatttgttttggtgccgaagaatattccattgtctggatgtaccacagtttatttattcattcacctactgaaggacatctgggttgcttctaagttttggcaattatgacgaatgaagctgctaggggctaatacttactgagtaactactatgtgccggggactgatcttggttctgggatcactgtggtgagcaaattaggtataactcctaccatcatgctgcttgctagcaagacaaatagtcacaaaagagtaacacaattgggttagttatgaaaagtgtaaatgttatgaagaaatgatcccctgagataaaataaccaagggacctaaattagaggattagcaaaggccatttgaagtcagtgaaagcctctctgaggagttgacccttgagtcaagctccaaggaatgatgagaaatgtgaggaagagcattccaggcacaaggaagagccccttcaaaggccctgagttgggaagagctggagaacagggagcaagggtgaaagcggtgtgagaagctggagctgcggtagaggccagctcacgggggaccacttttgggttagggactgagacttcatttttaaaaagcgctggaaatctactgaagggggtttgagcaaggggcatgatctgacctgcacttttaaatgctgcttctggctgctgtgtggagagccaattggactgaagcgggaggaaaagtaagactccagttagatggtgctaacttaggtcaggggctgtcagtagagaatgagagagagggaggtggatttgagttatactgggggcagggatgccatgctgaacaactccaggggcaccagttacttccctgtccatcccttgggcacgacatgtcctgcttggggcagaatcatcatgacttcattgtaaggagttaggggaagagtcaaggacgattcccagctttctgtccaacacctgggtggttggaggtgacaggaagttagtgagaggcagggggcctgtggggtgtgctccaggcttcagtattggacagctgagttgagctgcttgtgcgacaagcaagtggaactgtcatggaggcagtgggacacatgctcccagagatctgggctggagaaggaaacaaagagggatgttggccagccatttaccaggttctctaaatgctttccttggggtaagttagttcacagaacatagagcttttggtccaagtaccatagttcccaaacaatgcttgcatttactgctttattgtctgtctttattgagattcactaagacacaaggtcatagggagattatttctgcatcttttccagatccagcaatccattcattttta

SEQ ID NO: 80923 - DNA, 1092 bp, Homo sapiens
tccagggtgggagcaccagaggagttggcctgagtggaaacccagctcttcgggtagagccaggccttccaagagacaaattagctgaaggccttactggtggctgagcgagggaggtggggccaaaggagaggagggtggccttccatatactctgcctgttgagtaaggcaacttcctgcctgttttggcctggaccacccaattaccctaacagcagttaaaaaagccactgaaattattaaatcactgaagggaggccaggaaagttacacagttgccctttatagaggtcagtagatgagctgagttccagacttagaggaacaggaagccaaagttaattggtgcaccaatttttaaattaatagccacacaaaatagtattgtctttcttatcttcaatagacctctaagttgggtggcaggacatgtgagaaacctgggcacagaggccaaacgtgtatccacacagtgcttctcaactgggggcatttgcaatgtctggaaacattcttggttgccacacctccagggagtaggggtgctactggcatctacgggtagaggccaaggatgctgctaaacatcctactgtgcacagggcagcccccacagcaaagagcttatccagcctcaaatgtcaatagtgccaaggttgagaaactctggtctatgggaacaaaactctgtaggcctctggacagtggcaactagaagaaaaccccaggagtttcacaaggacatgtggcccccagataataaagggctggcccctttaaaacatgtcaagaaaatgtgacagctttaaaagcaagatgatgcttttgagataattatgaaatccgtgatggaagttaatttaaatgtgaaataacagaactgcaaaaagttattttattattatttttagaacagcattgatgtttctatcccatcagcagtttgaaatgaggcatagtctggaatcgtttgccataatttgatatgcttgatggattccaagtcccccaaagaataaaatgaatgaatgtgatcaaggatcacagctgtgttctctctctcttttttttttttttgaaaatatttcac

SEQ ID NO: 80924 - DNA, 1099 bp, Homo sapiens
ctgaggtcctgggcgcagggtgggtgggagatggatacaacaggggagctgtttgaggccaccttctccttttatgttttccaactcctgctcctgagaggcagcacctggatccttacctgcgggtaaaccactgggatgtctggggtcactctcccctcctaccggttgtcgcctgtaccactctccacgctcactgaagcccagtttccagggagctccccaatcccttagtgtctgcagatacagccaacagccagcactgccatcgggccacctggccacacacctcctgccctctgcctgccctcgtccttttctcagccaggacaccccattgcctcctccataggtgccagctctgcccgaggttctctttccctcttggagtgatggaggctggcagtacagagtacccttccctttaagttttggttctcacttttgaagaaccctgagcctccaggattgcgggcatagtaacttcctcctgagaagagccgttattgggtcagtccctgcttcagaagcagcaaggtccgttgctgctgagcggaggctgcatgggcctttgaactggcttcctttcatcctgggccctggtcctccctttcccaccccttcccatagaaccatttgcctcccagtccaaacagctgcccccctcccatgcacattgctgaccccacagccctctcacattcctctggctcagaggccaggttccctccctccctctgtccacaggagcaggcagtactaaggatatgctgtccaaggccattaccggcttagaagtgggaggcgtgtgggcttcagagacagctttgaaatggccgtggatcacttggcactgattttgcacctgaataattgagaaccttgtatgtgcctcttagggcagcactcagagcaaaatttatccattcattgattcatttattcatccgtgtcaaaaatatgtgttgatggtaaaaggaatttgaggagatatgggcaaaaaaaaggaaaaaaatgtgttgaatggctagtgcgtcccagctacgatgccatgcacatgtgcaattgtgagcacattgtcttcagctaactgcaccgg

SEQ ID NO: 80925 - DNA, 1045 bp, Homo sapiens
tatttatacaccatctgactgggagagttcaaaatacatcatacatacaaggagctttttaatctgagtacatctagaatgcagatttacatttgaaagtgaacatgcggacttgagcaataagttcatgtggcatggcttatttgtagtattgatgttgttatgctgtagacgtagagatggtggtgacctgagtatcgtaaggccattgatcatgcacaagttcagggatgccagaaatgatcttgcaataggtatttgactgtttgtcctttcaaaggccaaggcattcatttagaagccatggccaaataataggttttgggcaaatagtgtagctgaagctgaactttgatgggtccctgataaatatgtttgcatatatgattctgtatcctgctccattaacttactcttagcattttcctataacattatctttgaaatcatgatatttaaaggttaagtaatttttatctgggagtattccataagttatgagcttttctctttatgtcagacttgttagttcatttggtttctgttcaacttccaactgcctttggacagtcaacatgcatcttggtcattcatttctttcccctacctttcatatcctcagccactgtgaagaggtctctgcagtcattgagaactggcctcttcccttttatacaggaaggtccctcaggtatctgaagacagttttatccctccttctgcctcaaggactctccaggccaacaagttgtgtctcactagcaggtcctcctcagtgaacccttcaccatcccatggttctttctcgtatttttgaatgtggagaatcagagctttgaaccctcctgtgtactcttccaccagcaacccatgccttgcactttctccttcagggtctgtcttactgcacagggctcctgattccctagactcaggtcttggtaggccagagtctaggttttggctgagactccttctaagacctcattagggacattcagttcactgacggacaccaatccttccaacctagatgttctgggct

SEQ ID NO: 80926 - DNA, 1041 bp, Homo sapiens
catgtgtggcatggtagttgtaaatatgcaactggcccaatcatatttttcttctgtctctaaaattttttttgccctatacagtgtaggaggatcaggtgaccaaggttttttagaattttccctttttgggatctgacgccgacacactattttgaggcagtgacatcatctctttcctctggcgtgccctccttgcggctccatcattcaggccttgtcatctctcacctggactgctgtgaccttcattcattcccaggagaagtccaggtacagtaagaatgaatcaccagggaccagacctggactgggtaggggaggggttgttcagagacaggcctccttgaggagtgatatttgagcaaaatctaaatgactgtaaggaactaatgaggtgaagagagagaggagagctttcttgccagaggacatagcatatgcaaaggtcctggggtcagaacggaacatagtgtgttcaagaaactgataaggcagcatggctgcagccagagaggtaggctggagaggtaggcagtggcctgatcacacaagaacaagttgatgatggcagggaactccaggtttgggctaagaggaaagaaaatgtgttagaagacagaggcaagggctggccttgtctgatgtggcttccgagtgtggaatgagtgggaaggacaagagtggaatgcaggaaggtcaggggcgtcctgaggcaggccagcagcagagcccagaagatggagagacctctcggaggtagcagcagggcttgctattggattggagaagcagcagcggaggcagcgctgctgccaggcacctggatgagttcacctaggaggacacatatgataggaggctgcacaagatgccctgaggtctggaagaggaggaagaacaggcagaggaggcctaggaagaggggcctgaggcaggaggtgaaggacgtggtcctggaaaaccaggcgaaaatgcttgagacagagcagggggccacatccccatagaaggtcaggggcagaagagccactgtttgcc

SEQ ID NO: 80927 - DNA, 1878 bp, Homo sapiens
taaccaaccaatcaaccaaccaaccaaccaaccaatcaaccaaccaaccaactaccccccaaccatccaaccaaccaaaatcctgcaggaaaaacatgatggacattttcagactcaagatatcacctagcccctttctcctgttgaatctattttattttcgatgcactatttgataaacaaggtttctcatgaagttgaatcaatttgtacttttaaagcaatttctgataacacacagctccttgggaatgcaactgtctggttacagcagaacccacttctcacagcccaaggcctgcagggtgtgcccgtttttaggtggtccaatatgattcttaaagggggcataagtggaggcaatgggaagtatcaggatctgggatggagtgtggctagaatgcaaaagcatattcagccttgtaattttaggttggaaaaaagactgttatgtgtgttgtatagtctctaaaggagggcctgagatttttatgatgagggagagggttaaaaagcccagcagcagagctcagtggttatgccagctttccctgtattcagcacgctcacttgcactcgctgggtgctgatacagccacttctctctctgcagctgccaccatctttacagcagaaccagcagagctataatgagcagtgttggtgcctggggcaaagctccacagatcaactctgtaataaatgatgtggctcaccgctggggcttcctgcaaacccagccatccgatttcaaccagccattcttgctaactaggtgctaaactcagcagttgctaaaagaagacaagaggtgtcaacttaattgattttttttacaattccaggccttttaaaattattttaaatgtctatgtgcactctaactcgcattccctgaggacagagccccattgcttgcccaagtccttttccagaagaggccagcacagggctctgtgaggagggaggtgggctgagtcaggaccaagtccaggcagagatgctcaggcccagcctagtacttacaggaccagaaaccgtctctgtgctgggaagtcgcctctgagcctctgccaggagtttcctcttcccctcccgtagggcctgggctgcggtgagccgaggctgcttccctcctcggcctccatgtttctgaccccagcctggtgtccacaccctgatttgtggttgctccccgagctgatgatttgactggggacccagtcccatttctttttattttatttttagagacagggtctcgctctgtggcccagggtggtcttgaactcctggcctcaagcaatcctcacaccttggcctcccaaagtgttgggacgacaggcatgagccactgcatctagcttcagtcccatttctgaagaagtcctgcaccactgtgctttccttcccgggtcacacacacagcgtggcactggaggcagatgtggatcctgagcaggcagagacagagcctagcatggagttccacttaaagccaagggaatgaaacatcaagaaaagcaatgagagaggaaggaggatgagcagcaattgctgacaaatcacccaggggcaagggcaggacctgtggaaggcaaatcaatgggcttgacctctctagggtgcttgtcctccaccatcctcactcctacttccttttccctgccggagggagggggcacacaaaccatgattccacttgccaagcctcaatggcttagagatgtatcctgtgtctaagcaaagaaacctccatttttacagggccgtttccatagtaattcttgcatctgacgtttttacatgttttgctgaaattctatgactgaggcctccgctgttctagaagctcatgataatagctccttcaaccac

SEQ ID NO: 80928 - DNA, 1058 bp, Homo sapiens
agtaaaatgcattttcagccccctttttgaagactcttctatcatccattcactgtgttgaattaaagtgagtacaataggacttaaaagtcatattttgatttctctcctttattatccagatgctgctgtgtaatagagacacatacaagatataaaacaaaggatgatttacttagacttatagaaaagaaataggcacagcttatggtagtcctatgtaaagtagagaatccaagatggtgatagcagtccaaagcagcagcatcttggcaggtgtggctctaaaagatcctttgtgtcctccagggttgcattgttttccatgttgctgatgagccagtgagactgttttcgggtggattgagtcatcctgagtatttaaacatttgtgtcctgatttacctcctggttcgcctccgaattcctagagctgatggctgtacacatgcacaggtgtgaggcacaggatctgggtccctaattttcccagacaaatgctggttcccaagttcccggcggacttcagaagactctggctctggagcaaggccatctctttctcataccctctgcttgattgagccacagctgacctggccagcgtggtattatttaccatggggctcacttccttatctgtctggtcccacaaagggctgggtaaagaacagaactctttgcaaaaacaaaagtgaccaaccatcctggtgtgtccaggacttttccagttttagcactgaagtcctagatcccaggtatctccactcctatactgagaaaatcaggatggttggtcaccctaaacaccccgaagatcatgaaggctgaggacagagggctggcttataaattgcattttgcaggagtactgacaatcacactcataccaacttgagctaaaaggaattttaaagataactgtatgtctcacacccacttgtggttttgttaaatgcttgcatgagttctttggaatgttgaaactgctatttctttttcttaacgctgaaatgtttttgacagcacgcacggggtgttaaataaccttcatgtgg

SEQ ID NO: 80929 - DNA, 1036 bp, Homo sapiens
taaacccctagagactaggatttgtcttgttgggagcttcttgggtgtgcccatgcaaggatggctcgccctgtgtaatctgccatttcctggtaacctgggtgtcctgtgccttctccaagtcactcattagccactgaagccctgcccttagagcctgagggtatgggtcacccttactgggaggccagcagctctagaatctgtagcagtggtcatttaatacacactccattctgatactgagctgttcaggcaaggagtttctcaagccaggctgccaggcaggctggccttccttctccttgaattccatgggaactgtgcctcatccagtccaccaggactacaaagaacaagatggggaatgcagggactctgagacattctctccaaggagctccactcacgtggatgtccaggaaagctcagacatctgtatcatttttcattttgtttccccaaggactctgggtacacttgacaccaattaagtaccccctctgccctaacatgtttaggaattgtgtgaattaccattacagagacatgattttttgagaagagtttgaggtattagttcaacaaatatctatcaagtctttttgtcttatgtttacactgagaggcccagtaaagggtgaatctgaataactacttggtgagtttccacaagcacagctgatttgagtagcttgagccccaaacagccattttcccctcaacagccatgtttgtggtcctggatttaatagggcaaagtcttaaatgtccttttcactttgactcatcaagaccagccacatttttaagcagtacaaccggtagtatttctctttcccttgtgatcccttcaccctgaaaacttctgttttcaaaatcccgtgagcctttttaggctcttaatataccacaagataaactaagaaaaaagtcttaatgtggaataggtgatgcagaggggtgcaggtattcccaaagatggtgagagaaaaggaagagacacctttccatcatagccagagcaatccattgt

SEQ ID NO: 80930 - DNA, 1049 bp, Homo sapiens
taccatgcccagctaatttttgtatttttagtagagatggggttttaccatgttggtcaggctggtctcaaacttctggctttaagtaatctgcacaccttggcctcccaaagtgctgggactgcagatgtgagccaccgtgcccagccctcgtgtctcaattttttatgcttacaaaaatacctcaggcatatgggagtaattagaagattttgatatgtatttagagattgagactatagacatctgtgcttccaacacatagatgtaagagcttgctgaggcatcagaagggccattttgcccaatagtcattcaaagcactcagctgttaggtgttagcccctagttcctggtcatttggtgttaatggttttatcccattagatagtaatccctaatctgatacttctcttttttccccctctcctgatctcgtgctttctggaaagagagaatcatagtgaaatcgaaaggcgcagacggaacaagatgactcagtacatcacggagctctccgacatggtccccacatgcagcgcactggctcggaagccagacaagctcaccatcctccgcatggccgtctcgcacatgaagtccatgaggggtacagggaacaagtccaccgatggcgcgtacaagccttccttcctcacagagcaggtaccctggtcatcacatcaccattggaaagcggggggaatcccagcgtcaccaagacgaaataaactacgtggggaaccagggctcaaggttgaggaaggaatgaagccaacatgttttgtttccatttttctccaagaagctgtcttcaaaagagggtttgtctgatctttgggtcttctgcttttatgtttcccataaccttaatgggatgtcactcaaaaaaatatattgagcatttgaacatcgtgctcagcacactgacacaggaagaagttagtaaaaacgctgtatgctggaattgtgctgatatgatcagcctatgaaagtgatggtatatgaaaaaatctccacatcactgatcattagagaagtgcaaatca

SEQ ID NO: 80931 - DNA, 1038 bp, Homo sapiens
tctcaccttccccttccccttcccttccttctatctagcaccttttgtgccaagcactatgtgttgggcccttctgctccaatgacatgactacagtttcaatatgtggcaaagctgttcacgcctctggcaacccagtaccttctggtgatcactcattgctctcccatccccctaggctggaaattttctctccccaacaaaggactaatgaagatgggctaaccgtgtttacagtagctgtatcgtagggatggtgcaagctttgtgcatttttctagcttattttccagaaacaaagttctcatttcccaaactatttgtgtaccagaataaatatgcagataaaggaaattgaaggctgctttcccaataagaaagttgaatcatcctgggtctgtcagtgtattgtgccaatcataatcttttctttataggaactgaagcatctcatccttgaagcagctgatggatttctgtttgtggtggctgctgagacagggcgagtgatttatgtgtctgactccgtcacccctgttctgaaccagccccagtcagagtggtttgggagcacactgtatgaacaggtgcatcctgatgacgtggagaagctgagagagcaactgtgcacctcagaaaactcaatgacaggtcagtggagctccctttatgaggctgtttgactctagaaaacattcttggctgggcatggtggctcacgcctgtaatcccagtactttgggaggctgaggcgggtggatcacgaggtcaggagatcaagaccatcctggctaacatggtgaaaccccgtctctacaaaaaatacaaaaacaaaaaatttgccaggcgtggtggtgggcgcctgtggtcccagctactccggaggctgaggtgggagaatggcatgaacctgggaggcagagcttgcagtgagccaagattgtgccactacactccagcctgggtgacagagtgagactctgtctcaaaaaaaaaaaaaaaaaaaaattattttagtaaacaggccaggaaactgga

SEQ ID NO: 80932 - DNA, 1051 bp, Homo sapiens
aacttgattctatctacaaagactttctttccaaataaggtcacatatgcaagttctgagtggacatgaattttgggcagggggtggttggagacactgtaaaacccagtatagattgtaacagtggagatggagggaagtggttaacttcaccagatatgtaggcagtgaaaccaacaaggggagttgatccactcactctagtcctttacccaaatagtgttttaaaaaagctgatatccagggtcattggtggcctcgttggtgcctcttctcattgtcagatctcttctactagaagcaagtttaactgcggggaggacaggaggcacctcctcagcatccctgacttgtcgtgttgagtcaagccacaaaatccactgcttcctttgatgtttatgcattcactgatggatccctttggacccacaagcctatttttgtagatcaacttgggtgcaatgcagaatgtgctcattgtgccctgctgggggataggaatactcactggtgttaattttttataattgctaatcacctatgcagtgagtcagcagaggtacagccctaggaatggtcttctaggctgtgggtggtgtgggatttgatttgccccaccatgtaggcatggagcccattcagatgtgaacgtggttacaggttgagccttgctgtatcgattcctctgcttcactttcctgctctattcctcttcatttccttccagatggggctactgatgctcaccactcatccatctggagtaggctgaagctaccctaggtgggacagagcagcacttccccctcttcctctccacacctccctgatatggcagggcttggaattcagtcgccgtgcagacccaggcaggcagttgaattcctccaggctgccccttgctgtacttctccctgcttctcataccacccagccctgagcccgggcttccatctctcttcgcctgcctttgtcctgacctgattcatcctctcatgcctgagtcctgcccacctccccgtgccttgggtcagacctgccccttcatgtt

SEQ ID NO: 80933 - DNA, 1057 bp, Homo sapiens
tattttgaaaaaaaaaaatccattgcactgtgacttattcccatgccatggagtgggactgggctgtcttctatagtgcattcctgtgtgaattcaccacatgcccagcacccttctccctgctcccagcttgaactgtgagcatcttgtgtgaaatgggagaacttgctcagcactggtctgggtaggtagagtttgacacagcctgtaactccagctggtaaggacgctgcacttggtcactgctgtgaaaccatgtgtcctttcttaaaaaccttttccaggctcaagtgccataaagttctgaattagtagtggataaataagtggataaatagttctgaacttgccagtgggatacatgtagcctgccattcattgcctgtcaccagcctttccctgcctggataaccatatagaaccaggaaagaggagacgtattagttgataagtggcccaggttactaggggagggcctgtgtttatagcctcctagttgttgagaatatgtcaggagctcagcttctggaagttgcttaggattcctactgccaaaggaaaatgctttgttaggcttgaggggtagaattacttgtagagaaaagcattagttctaaatcctcaaggattctttggaaaacaggaaaagagagatacatggagcatccataggagcctgtaaggagttgtaactgggccactgtgcagtcatgacagcttagcctccacagtgggtggttgtgattcaggacagagctgttggacaccagtgtatgtatgcgaggcaccctggactaggggacacagagatattcaacccctggctagctgctttcacaacgtttgtaatccaggaagggaggcaagctatctgcctaagtgtcgataatgttggggaccatgtgggcaatatactaaaaggatccctaaggtttccatcctctggttattcaatcaaacactaatctaagtatggctgcaaagggattttgcctatgtagttaaagtcccaagtcagttgatcatcaaatacagagattatccagtaggcatgacc

SEQ ID NO: 80934 - DNA, 1043 bp, Homo sapiens
ctccctccagcagccaggaggcaggggctaactcccggtctcaggagaccctccctgcctgcggctctctgtgccgggagcctgccagtcacttgtactctgattctctaagggggtttgttgagctttagtgtgtaggtcttgaaatctgtacataacccttcaaagtaggaatgcctgattccattttccagttgaagaaactgaggatccgagaaatgaagtgacctgaacaaactctcacaacccgcatatggaggagccatgtcttacatccttgctgcctttttcatttgaaatagcgtaattactaatttatcagctcactaatgggtctcctttgtacatcaaacccagaacaatatctgcttccacagcttctggttgtgttggaagatttctggggcctcttacaaagccagccattgtgcaacttgagcccaagtgctctaacaactgggtccctgagccacagggaagctcatagctctgtaccaaaagcaggatgctgataggacatcaagaattctgacattagattctccctgaattcaaagaatggggaaggtgagaggaccagagtgagaaaactaattgtggtcctgggggctgtttgattgtaccatttcagatggagcagttatagatgcccgcaagttcccagatgtggcagtgggcatggctggctgccccggacaggaggaaagcgtgctcagaattgaggaggacacgtcctgagagggagatgttaggtgggccttccacatgggtgctgaaaccatgtagggtgatagcaggtcttggggtaaagagaaaggctgtgggtgctgtgctgaaagtctaaaatgcaggaggaggagagacccagaggtgggaagacaacagaaacaaaggaggggtagtaggtggacgaggtggatgacatgagtctggaaggagcgtgtcatgcaggagtcgggttttgaagggcttcggggactgaggaagacagcaagactacctttgaccccatgccatgtgggacatgggagcatgagccttct

SEQ ID NO: 80935 - DNA, 1006 bp, Homo sapiens
actacacaaataaatcatgatattgaataaatttgcatcaatttataaaaggtacataaggagaaagcagctatagcaataataattgttacaaatcaagctgcaaaatgtaaatttttattaaattctacatgtcattgcagtccatataaataaatactttaatacacaagaacacaaagcatatggcaaaataatacatttgaagaaacgccaatgccatcttcatgcttggagtaaataaaacgtttcgtagaatgttggtaattggcaagcaaatgaaaaaatcatgaattctaagaaaaactagcttaaacttaatatatatcattgcctccgctgggtaatgggttatgttaataatggattctggtagtaacaaattgaatctctagtattaggataatgatccaagtcctatctctgaccaactcatacacctgtcacgtacattcctttgctcattaccatgctctgtcaatagacagtgaagccttgctgtcttctagtagactgtacctctgaccttgtatatgaggccttccatgaacaatatggatgatttgaaagcaaaataatttttagatactgtttaaaacgtaaaaagaatgagttttctatattcacaaatatagtaagcaccttaatgcagttcttaaatgtaaataataataataataaatacttactgaaggcttactatgggtcagatgtaattataaatgttttagctacattaactcatttaatcgtcacaacagctgcatggaaagggtgctatcatttttatgtgataaacaagcaaactgaggcacagagctataacctgcctaaactcatacagctagtgcatacataatggagccagaatgtggacccagctagcttgattcttaagtttgtgcccttaatcagcatatacatacatatgtatacatatacagtcttgcatcacttaataatgagaatacatcctgagaaatgtgtcattaggcaatttaatcgt

SEQ ID NO: 80936 - DNA, 1065 bp, Homo sapiens
aacaccccctgtagtgagcgcagacattctgccaccatactgcttgctgggacttactgggagggagggatagagatctgctctccctcacaacatgccgtgttctgtgctgatctcagccatggtggctgtaagcttgtaggttggtcttgctggagccttttcctcatatgcagggaattcaggctttgtcgactcttccctccacccattcttgcctgaaccatatatttcaaagttttctcgccattgccatccttccctggttgccagggctgatatatatgtttctccctatctcagacttgagtcatttttgttgtaaattggggagggacgggtagttactcaagtggtatcagttcaatctgttgagccaaaagcacctggtatacttcaaagctttgccttgcaaagtgggggatccatttctttagggtcaccagcagaaaccctgaaatgcaaagtacctactgataagtactccccaaaatatcttccaaaattagtccccgtagatacaccatgaatacaagaattccatgctcaatccatttgggaaacttggcagtctgtattctcctcctagataattatactccacagtccacagttgcatattaaattctcttagacttctacagtgatgaaatctctttatctttgtttaaactatgtttcccaaatgtgtttggccaaagaagctttttttgcccaaaacttactaatattcctctgagaatactttggatgcatgccgtgaacaagtacccttaactctgctcgtagcagaaggtggttttttccttctgagttttgtggaatgcaaaaatatgtttcaattcacatgtgacaatgtaagtccccggacagcctccacccagtgttgttgaaaaactgtccactgttccctgagtgtttgcacagggttaatgcaatccttgggaagaaatgaagaagcatttctggctaatgccgagtttcatcccaaacagcagtttccagttaaatttcatttgtgtgttgtttatattactcaggatttacttagacctggtatgaggg

SEQ ID NO: 80937 - DNA, 1037 bp, Homo sapiens
ctattgggtactggccttaacacctgggtgatgaaataatctgcacaacaaacccctgggacatgagtttacctatgtaacaactggctgctactccacactgccacgtgaatgccccacagccctcaaatgcagaatgcctgaatcctttcccagcccccagtcctcctctcatcaccatccacctgtttgcccaggccagaaaccaagaaacatccttagcccttccctcaatcccactccacacattcagcccctcctctctttcttctttcctacccccctgaaccagatcaccccatctcccattctgaccattgcagtcatttccttgctggtctctctgcttttactcttactctactccaagccattcggaagacataaattaggttttgccacgtctttacttaaaacatgccaacagggcatttagaatcaaatccaagctccttatcatagcttcatgctgtatgtatacctggccccgtctcatcctcatgtggacactactcttgagtcacgctggccttctttttgttccttgaacatgcttttcccaacctcagggcctttgcacatgctgttcccctgagggaatgcctttccttcactcttcacattactgacatcttatccttcagctttccactcatattgtctcagggatgccctctgtggtcaccctagctaagaaagtcaccccagcctccttctaagtcccttgttttccttcatagcaactatttatttgtccattggcttgtttggggggttgtttttctgtcttccttaccagaacctgacctccctgtgggcagacttcattacgtctgtgctttttttttttttttttttttgagacggggtcttactctgttgcccaggctggagtgcagtagtggcacaatctcggctcactgcaacctccaccttccaggttcaagtgattctcatgcctcagcctcccgagtagctgggattacaggcctgtgctgtcacggctggctaatttttgtatttttagtggagatggg

SEQ ID NO: 80938 - DNA, 1149 bp, Homo sapiens
tccaggagccgtcttcagatcctgactgcaggtcatctctcctcgccctcctggtaaccccatggcatttcatcttgtgtttctgtagtggcagcaagcatactgtctctgggttacagttatctacacattgatccttcacctgctggctgagaggctctttggggagagagaatgtgcattggcagtagggatttatgcaaagggctttggggccaggtagatctaggcttaggatcataaggctttaggcaacatattcaactcctttgaggctcagtttccaggttcacaaaatgctgttatggggactgcttgagctaacatgtctaaggtgcttagcctataacttggacccaggagggtgcagaactgcccgctcccttgttctgttctctttccacagctcctaaggctgagcttccctttccccagctcctaaggtcgtgccttctgtgtgctagttgcatggagctaacaaatttcacactgtctcgggcgttctagttagaagaaacaaacaaaaaagaaggaccgcccttcctgtgcttcctcagagtgcagaagatgtgggtttcaaaacgtggacagtgactccctatgtcccctgtttttggtgcagacacagagaagtccctcttggttgctgacctgagaggcacatggccttgacctccagccccaaggggaaacagccaggttgctgttggggccgcagatgtgcctggccttacttactctgcagctcagcctcctcccctgtggtgtcagggacagcctcccaccctcccagagctcttggtttggtttatttatcactcagggatttcccaccagggagccttatctgacatccgcaggctcagatcttgtctggcttcccctagggacagtgtggagggaggatggccagccccagccgtggggccagcacaccattgagtccctgcgggaagtgtgctctgagagcctgctccttgcaggtcttgaggatagagatggggtattcacaggtgaccaagatgtccctgtccccatgctgcatgcagtctggccaagacgacagacaccaccgaagaatagaccacaagtgtggcgggtgtgaggaatgggtgagtcagaccttccctgatcacagggaccaagtcc

SEQ ID NO: 80939 - DNA, 1050 bp, Homo sapiens
ggccccaggatgaacggcttctcgctgggtgagctgtgctggctcttctgctgcccgccctgcccgagccgcatcgccgccaagctggccttcctgccgcccgagcccacctacacggtgctggcgccggagcagcgcggcgccggcgcgtccgccccggccccggcccaggctaccgccgccgccgccgcggcccagccggcaccgcagcagcccgaggagggcgcgggcgcggggcccggtgcgtgcagcctgcacctcagcgagcgcgccgactggcagtactcgcagcgcgagctggacgccgtcgaggtcttcttctcgcgcacggcccgggacaaccggctcggctgcatgttcgtgcgctgcgcgccctccagccgctacacgctgctcttctcgcacggcaacgccgtggacctgggccagatgtgcagcttctacattggcctcggctcccgcatcaactgcaacatcttctcctacgactactcgggatacggcgtcagctcgggcaagccctccgagaagaacctctacgccgacatcgacgccgcgtggcaggcgctgcgcacccggtgagcctgccggggtcgccaggcctgacttccagctgtggggaggcggggtgggggtctcttggggcccctggggcggcctgccaggagaggggcccctcctccggggctgagggccagcggagagccccttggccgccgtaaattcgcttttcttgtcccaccctggcttgctcccaccctctccaaaaaccgcgccagccttcaggttcctggagagctcggactcagagaattttgcctgctttggctcgcctgtgtgtcgccggcccaccggctgggtcttttgtggctccggtcaccgcgagtggcagagtgtgggtgcttaagtaccgggcagaaagaaacaacttggttcgagtttcgtttgtacgagctgaagtgaccttgggcaaggcacatgggtttctagactcagtttccttccctgtaaagtcagtgggcgagacaggatggcctctaaaagactttc

SEQ ID NO: 80940 - DNA, 1002 bp, Homo sapiens
cactcaggactttgccccactcttctgctcacatcgtcttttgtatctgcccttctcctgtgctaggaacaatggatcctgactggatcttaattggattaggagaccctttgtgttccctgtgcacctggtactcagcccctttgcttgagttatcacagtgttgctgtatctgttatttaactgtatctccactaaattggaagatctctgagggcagggacactatgtcttctctattcctgacagttggcaaaatgtcttaaaataataggtagtcattggtatttgttgaacgaattgcacataatgggcgccccataaataagtggggtaaagttaatttttcctaagttggactcttacaagtacttggatcttattttatcttcggggtttaatatccatgggtacaaccatagacaaaaaaaaaagggccagatgtattggcttgaggcctcatccactttgtattcattgtattggtgttcttgtgacactgaaatgtctgtattgaagagaagaacaatactaacccatcctttgtatgtctctacatcttttatccattacctatttgtgccagctcctgcgcatgctagagtgagctgtccagcccttgaaacagatgtaaatactaccagtgtgcagacccctcatgcatggataaagacagtgaatccccccagatgatgagtattaaggtgggcacgtaatccagagtaagggtttcaggaggaagtagatttggtaagaaaggtggttgttgccgtttggccaatagatgattattttaaactcttgaaaagttactgaaaagagtgtagcggagaggcagggtttgaaggagccaggaagagtggcatgaacaatgaggagagctcattgagcatgatggagagccccaagatcaaaacttgttttacgtttgcattactggtaagaaatataagtatgttgtgaatacaaacaagtgagggaatgaattgaaatcacttagac

SEQ ID NO: 80941 - DNA, 1080 bp, Homo sapiens
gtaaacccagcaatttgggaggcctaggcaggaggatcacttgagcccaggagttcaagaccagcctgggcaacatagttgggacccccatctctacaaaaaatttttaaaagtagccaggtgtggtggtgtgtgcctgtagttccagctacccaggaggctgaggtgggaggatcgtctgagccccaaagtttgagactgcagtgagctgtgattgcgccactgctctctagcctgggcaacagagtgagatcctgtctcaaaaaacaaaacaaacaaaaaaccccaaactgttaaacacacatttatttatgctctgcttgtgccagaccgtgtactacgtactcttgaagtatcgttaatcccaagctgtttctttttgttgtaaaaggatggatagatttcagaggcattttgaatacgtaactatgatttgctgttttataacttttgtgtcggtgattcacaggatccataattggaaaatccatgtcacagcaaagctgtagtggcatcctctcaggtcgtgggacccttgaaaaacaccttctgttggttgtgaatggtgttcacagccagcagtctcagggtggaattctcctccagtagcaagttactttcctgggcatgttgaagttaataacctaacttctttgttctcagtgttctcagagggaatactatgatgccactaagggaagaaagcttagagtttctgcttgagtttgactgattagggaacagaaaaacagaaatatgtcggccgcggtggctcacagctgtaatcccagcactttgggaggctgagacgggcggatcatttgaggtcaggagtttgagactagcctggccaacatggtgaaaccccatctctactaaaaatacacaaattagctggtcgtggtggcaggcacctataatcccacctactcaagaggccgaggcatgagaatggcttgaacccgggaggcagaggttgcagtgagccaagattatgccactgcactccagcctgggcgacagagcgagactccatctcaaaaaaaaaaaaaacaaatgttatgaatactgtttgacata

SEQ ID NO: 80942 - DNA, 2003 bp, Homo sapiens
ttctaccattttgagcctcagttaaaataatgatgatggttaccatagctgcaaccaccttgtcagttgcttaacacagtgctttccacatagtaagaggatggtattgtttaggattattgataacatttttagagctataataaccaaatgctcagatcatgctgaaaactaggtgcttaaatcagaaggagtgttaaagaagttgcttcttttcccactgtgtatagatacaaatacccaggtcaagcctagcttggtggatgtggaagtggaggaacggtaaaggtgttttagttttatttgtagctaagggggaagtctctttggaattgttgcttatggcctcaagagctttggagagtggtatgcattagtattttaaatctgatagcatttcatctacctaggtgtttatatgcccaagggagatctttaaaggagaggaaaccctacctgtaatccaacacctgcagttactttgcaaaccattcctggtttgcccctccactttgcactttttggagctgggcaggaatcagagacttctctgagcagagttagggatggcaaggaccagaaggcaaaagcctgtattgtgtgcaccattcaagatgttctggttgctctttacttatgagacgatccttaatagagttaaccttcccttttcctagttggccaggggacctgaacagcaagcttccttttaaaatatgaatgctcccataatgccttgtacctcagattcatgtggctttttcacagctctgtgtaatggagctcattgataactcccacgttattgattcactttagagtgttaaaggaccatggctccatggtgaaattggaaacctctgttttccaggaagtcgaggtcattcagattcaatgctcagacggatagttaacggttgtacgtcaattacttgctgaattgctgagaggagcctaacctcaagcttacttgttaacagagtactgtttaaatttccaaaggaaaaacgagcgtagagaaccgccagtactgatgattagtttgctccttcactttacatgttttaatggttacagtgaaatctgggcagttattttgggggaaaaatgtaaaggagcctgtgttcagaatatatccacaaaaagtgagtttccagatgttaagtataaatctactagctaaaatctctgagattatgattgataatcagatgagaattcttacctaatctcagactgtttttggagactgtcatggacataactaaaccctgtgcagtgatgattatatggactgcaaaggtctgtgatactagaacaagaattttgtctgctgatctcacttaaataattttatttatccctattgtcataaataactcaagggtatttcagtttctccagttttgattgttgtcgtgatgtttaactatcactgttgtccttataacatgtaaactttatactattttaattttaatgtaactattaggaaaggacaattcgcatgctaatcactttgaagcatgttttatagtatacaagaagactggataaaataagttcgttaaaaaatgaacatgccattgtaaaggccaagggaaaacttctttgtgcgcagaaggtctgctgaaaaatcacttgataaaaagcagattaataggagaaatggcatataaatttatctgtgtgcacaggagaaaaattacagaatacccagtatcccaatggggtgcatattcttatatatctacttcttaggggaaagggaaatgggaaagtgtggatgattttagagggatggaaatgatttttaggggaattcaatggacttgaagaacatacagtggcctgagataaagtctgttggatctgcagggcagacagtggtttgtgacaaaagtctgtctaggtgtgttgacatactgcagtctttcttcctgcagtaggagttcagttaatgaaaacttacagaaggcaccagaagtaattgttttcttctt

SEQ ID NO: 80943 - DNA, 1710 bp, Homo sapiens
agttttttaaaaaaaagctattggggcctggcgtagtggctcacgcctataatcccagcactttgggaggccgaggcggacagaccacttgaggtcaggagtttgagaccaacctggccaacatggtgataccccatctctacccaaagtacaaaaattagccaggtgtcgtagtgcacacctgtagtcccagctacttgggaggctgaggcatgagaatcacttgaacccaggaggcagagattgcagtgagctgggattacgccactgcacttcagcctgggcaacaaagcgagactctgtctcaaaaaaaaaaaaacaaaaaaacacacacatgaaaaagctattggtagctgttgttggcctccaggatatagttgcatactcctcgaagactcgcacatctggatcaccattttctttacccctggatctcctgctttcatcccgtgtagtgtgaatatcctgggctgttgagagcctgttcagcagccccgcctcacacttcccggcctctccctcattgttctcctcctccaccctgcaccactctgcagcagcccacacctgtggccacaccttgtacctcgtgatcacctggaatgctttgcttccaggattttgaattctgaaatactcctttctgacacacctaatatcctgttggatctgcctgtttaacaaacatattaagtgtccactgtgggccaggctttcttccagaacaaaacaagcaaaacccctgctcttgtgaagctttgtttcataagtgcccatgaaaaacagtaatcataatgagtatgtgaatgatagtttattattcaaatatgataagtgctagaggaaaacatagaacagggcaagggcattggagtactagagaatggatgggttggctgcaacttttaaaggatgattagggtatgcttcattcagagactgacacatggccccaagcagtgaggggttagctatgtgcagaaatgggctgagggaccagggtcctaagatggggcatggttggcagatgtagagatcatcaaggaagccagcggggggctagagcagggcaagtaaggggtgcaggggtaagaggagtagtaggagatgaggactgggagtaactggggaggggtgagggcattagtcacatagggccttgcagaccattgcagggactttggctttgacagcaggaaatgggagccattggagggctttgggtagaggtatgacatgatttgacttaggttttggaaggatcactctgtgttaatgacaaattggaggagctgatatgtcgagggaggaaggtgagagaccaattaggatgcaaatgcagtattttagatgagagatgctggtggcttgggccagagtgttagcaacagcggtggtgagattttggatgtatttgaaaggcggaaccaacaacagtatttgctgatgcagagtggtgaaggggagtgtcaaggataacgccaaggattttggcttgagaaacaggaaaactagaaactgagactgattttttttcttttttttctttcagtttcattagcttttttctttttgtggagatggggtctcactatgttgtccaggctggaactcctgggctcaagcaatcttcctgcccctgcctctgcctccctaagtgctgggattacaggcatgagccaccgtgcccagcagaattgctgttgattg

SEQ ID NO: 80944 - DNA, 1028 bp, Homo sapiens
tgcagaattcaaacaatttttttctaaatctatagttttactgactgcctatcagcttcatctcctcggatccatgagacctgtgcatttgctgtctttttgttactttgccatgttgtttattaaaaacaaaacaaaactttataatggaaaaatctcaaattatatacaatgtacagaaaatattaagctaaattccatggcggtctcatcacctgcagcaactattaacattccaccattcttacagcatctacagttccactcacactccacccccagcctcttattactactttgtaagtctttttttttttttaaggaaaaatgtacatgcattggaatgtacaaatcatagctctcttaacttcctagcagtgtcttcttgccacccacatcagctctcaggcgcagtgatgagccagccacagagccaggctctccttggtgtgccgtggtaacagtgtcctgccatttttgggatgtggattgcactatgagagtatagttaagggaggttgtggataaatttaataccaaatagttaccgaaggaaagccactgaggtcttgttcttttttttttttttttttttttttttttcaaaatcagccttagaaaggaaaacagaaagaaagatagggaactccaggagtgtgtcccatttgtccagaattagtggtatgccataaacagagccctggtctggagctgggagaacattggctttcattaatattgaggtacaggccaggtgcagtggctcacgcctgtaatcccagcactttgggaggccaaggtgggtggatcacaaggtcagcagttcgagaccagcctggccaacatagtgaaactccgtctctactaaaaatacaaaaaattagccgagcgtggtggcaggcgcctgtaatcccaactactcgggaggctgaggcacgagaatggcttgaacctgggaggcggaggttgcagtgagcagagatcgtgccattgcactccagcctgagtgacagagcgagattccgtct

SEQ ID NO: 80945 - DNA, 1051 bp, Homo sapiens
ttgcattttaaaagattactttgtatacccctagagaggttcccccccatggaattctatattgtctaactgttttctgatgacataaaatttctcctgagtctttggaaatcaattgaaaggaaggaaagaattgcaatggccattcagattcctctcaccatttggattgggtggttctgaccactttaccattttttatgttgattctgatcagaggaagatggctgaggattagtaaacagaaacctggataactgtaggtgggcctaggttaagagcaaggacagtagagccagaccacctgagtttgaatcctgcctacactgtttaatctctgtgcctcagtttcctcttctgtaaagcggggaaatgataattgtgaatatagtaggattgttattcatagtaaatgagtgagtgtttgcaaagtgcttacatgtaagttggatagaatacatttttaaaaaactgaaaggaatgagggaaagatatgaatgaatgaatttatagtagtagacagctttcaaagatttgaggaagagcaacccacctatttctaaatgggtttgtgatcttcaaagcgctttcacgtacactctcttggttcctaagaacggttctgtgcagcccacatggctgttaagtagtgagtgcaaggtttccatgtatttctttcgacttttacatgttttcagggtttcagttgcccagattaacttgttgccattagtagtcatttttgtcattcgctttgtaatgcttttgtcagtctaaataaagcagtgtgtccaaatggtctagcaacatagtctttccctatttgacctgaaaaaaaaaatttagagcaattgaattttaattcttacagtatgcttgtggacattactgtaattgttttcttgagccatgataacctatattaaataatctggagcaacattttattcctgattatttaaacaaggaccagtttttcctactgacttgcatctttttagacagggagtcaaaatctttaaaagtcagtctgatgtgtttatggagtctg

SEQ ID NO: 80946 - DNA, 1833 bp, Homo sapiens
gatctcctgaccttgtgatccgcccgcctcagcctcccaaagtgctgggattacaggcgtgagccgccacacccaaccctttttcttttcttaacctttgcattgtagttaaggaatgtgccatagctttcatttactttgattcttaagttgatccctttataaactttataaaatctttttacatgtctgtagttttcctctgattgtctgttccttctgtgtgtctgtagctgcctagtgctgggagttgaaataagttctgtcagaggtcatatatagctgtattcaaatcttgtagtttaagacagggagaaagaaaggtttaacttaaagtacaaaaagaaaatacagttaactcgtctgaaagtgttgtagggggtgtgatgaattcttaaggagacctgaccttgatgtcttttccgtgcccttgaacagctgaactttcaatctttccttctcccacatggtgagagatctgaatcgtctagggtcactcagtagtttagtgcatttaagcagagattgagggcagttcagccagtggagagggcgtgttagagtatctggttgcttgagaaatttaagatgagaaattcaaactatctggttgtttggcaggtggaaccgcatagccccatggtgcttctgttaaagaatgttgtgtgtgccctcgctagccttgctatcctagaaggtttgaatagtccagattcctttgagccactcttgatcctttggctaacaatcagtgtcatagcatagcattcttttcaaattagaatataatcagtctccagaaataaagacaatttcctagaggtaactcagcaagtattgggtgagcaaaaggtggggaagaaagggaacagtatgggtgaggactgtgaaccaatgcttgttatttgaggagctgcatgcagtggggtctgtgagcgttcccaaggttgagggggccaatgaccagtcgggtgacatgtgtgctgttctttggcctgattgctgctgcaccatgaattctgaggtttccgagtaaggttctggttcttcatcatttaaaaatgtgaatgtggtattaggggaagggctggggtgacatccatagggattgtcaggcctctgcactccagacttcactttgccactcaagacacagcattgttgctgccactcctccctgggtgcagccgtcattggtggctccgtggagacttatggctctgcacagaggggcttagctctggaggcaggcatctgacctgggttcacagccaggctctgctgcctaagagcgttgtggtcttgggcgattcatctacctggcaggaaccttagtttcctggtctgcgtaatggagctggtggcaccaccttgtaaactgttgccaggattagagatagggtatgtagagtgccatcatcactttattatactttattctgttgtgtgccacgtgccttctaataatgaacaagagcaagcacctgctgttaaggagagtgactgtatgaacacgtgcacgcacactcacctacctacaaactcaccagaatggtctctggcgtcttcctgatgtacaggggccttctaagagccaggactgctattcacacacagatgagacctcagtcctccctgggaaaaacacctttggtctgacctgatcaagcatgctttatcacctggtggggctgagcttttaggagaagtgacagtgactagctgagaaggaccaaaggaggcagatccaggcctcatccattcccctcacttgatagataggagatctaaaggcaggtaaatcacctcaatgcctatgggcatttttattgg

SEQ ID NO: 80947 - DNA, 1147 bp, Homo sapiens
cctgccccagcctgtcagtttcactcactgcctatttaattcttgcagcagtcccagaggcaagccttactccacctttctatggccgtggagagggtgctacaggtgcaaggcagagctgggttcagaccttgtgctgtctgattgcagagcgtactcttctttctatgtcctctacgaatctccaccttccctcccctgtccccgacctcctcatggtcatgaccacatactccaggttacttacagaatccctgttttagtccagcattaagagagaggactctaagctctcatgtctgggtacagggcctcagacgatggcatcaagcaggctcacttgctctcagctttgctttcttccttgtgtaattctcaaggaggccccaggctcagcagaagagggtgctgacatcctggggaggactgggattgaccaggcttgggtcctaggcttatcccctaagaagtcactctggccaggaggattcaatactcttattgcccagacctggacatgtattcacacctagagttcaaggactgggaggcagagggatgctccaaaaagacagaacaggtcatacacgttctctatccccagtaagtcactatccaagaacttcctggcaaacatctcagcagttttagtgcaggagctaaatgtagcattgctgtctcagattcacagtcatttgcaagtcagtgtcaagcaggcaaactcaccaaccatctgtgtctcctccactatagcacttgtatgaactcatcctacaaagagataaaacaattagaaattagatacttgagtttctagttctaagaaatatttttcagccttggcaatcaaattgataattaaattcaatatttaaagtttttttttccccaacagagaattcatgaaatctgtaccttaacttttggctgggtttcttggaaatggaatggtgaattttattttattatttatttatttatttatttatttatttatttatttttttaaaacagggtctggctctgtcacccaggctggagtacagtggtgcgatcttggctcattgcaacttccacgtcccggactcaaaccatcctcctacctcaacctcccgagtagctggggctacagatgtgcaccaccatg

SEQ ID NO: 80948 - DNA, 1879 bp, Homo sapiens
agataaatgggagagctcctgacaaaggacaaagtcaaggcccattaacttaaacaggatgcagtgtgtctcagggaggccaggcttgttcatggttgtagaaggaaaagcaagccttacattaaaacaaaaacaaacagattttaactttataagtgatcgttcccatgagacaccatctccttggcgctgtcagcctccattgcaggaacttcctgcctcagtgcttcctcttgctgctgagatggctgccaaaccctcggtttcagggtgctcttgggggcatgtcccattcccatatgctgagtgggaatggaaacccaaattcgtgctgatcaacctgtactcagcatagcctgtgactgcaaaaggatggtagacattgggagaggctgagagcaaaaacttgcaaaggggattactgcacacatcgcactgcccgtgacaaagagtaatgattcagggctgtggcttcccccggtaaaaattgggagactttaatttcttgtgctctgttttaagaaaatcttacatcatgcttaaaaatgttaatgcttgcatgcttactaaatattagtacggtctttgtttttgctgcaagagattctgttcctgtctagatccccaaggtgatggtaaacttcgaatggattatatgtccactggaatgatgactgtgtctgaaatttaattttaatttgttcaaaaacagcttttggctagaatcacattctgttcaaagcaaaaggtgccccccaactcactgatccctgagcctggaaattgttaacttgcccaaagggagatacaattttatctacccttgtggagcttacatcgtcattgtaagtgtagggcatgccacggtgcagttaaacacatccaccttcctgtcattaagcatctgagtggatggctcaggaaagaaaattatgtctgtagactggaggagtcaagaaatgtgaaaggacgaggtaggaccggaatggacctgtaggaccccagagttgtccaggtgatgacaaggagggagaacattccaggcagggggtgtttatgagccagtgagggaagagcctgagccacaggagcagaagggccacctggagagaaaagaaaatgttggaatagtcggatggggctagattgtggacatggacttttatcctaagcacagtgattgtccaaagagtttgatgaacaaagcagcataaaaaaagtttgttttttttttcttttttcaaggaagatatatctgttgggaaggacggattggagtagggagtgacatgagtgggacagtttatatagatagaattggaaggaaaacaggtctgggagagaagagaagaagtcagctgtgggcattgattatgcctgagggattctcaggttctgccttgggaaaaagggagaagctgggatggaagctggtaggccatcagagtgtatgctgttagcgtgagtcagggtacagcaatggattgacaccaggtcagtagtcaagaaccgtaacacctgcttccttctcaaccataagctgatacacagaaaccaacaggataggacagaacaggtgggaagtttgggcagccaaggtccctgtggggcagtctgagcaccatggaggggatgtacaggcagcaagagtaaggtttccagaaagactctgggtacctggatggagatgttcatcattgggcaaactgtgcgggttcacaaaccaaacagaaggcaggccctgattaattgtccaaaagatgctgccatttgtagcccaccacaaagcaacagaagtggtgtcagagaaacaatgggtctgtaaaacatctcaaagatagaaatggtgagacttagtgactacaagtgtgtgagagac

SEQ ID NO: 80949 - DNA, 1690 bp, Homo sapiens
tcaaagagctgatgaaatctcagtcttttgtatctagaggtggttctgctaattcacacaacacgttaaactgaacagtcgtgattcccagcttcattaccttgcaggaatgggaatgagagctgaatgtagggacaattttctagtgctgtataaagtagcctcgcatctgtttctcaaccttatccatcatttctgacattcatgcaggacttgccctgttgccaccaatgttctcggtatttcacatgcagctctctttctgccactggatacatgggttcaatccatttgtgaagctgtgatagtgtaactggaaagctagtgtggtgaaaattcctttattattttttgttaacatgctgatctttcccggacaaatgaactgaagggtaatttactggaactctcgtgtacagcttcatcaactgtaaccatataaatataactggaatattcttaaacaaaaagaaactaggggtttttttaagtgtaaatttattactagccaacagagttttactattttgattgtctggttggtttaacaaagagcctagctgactttccttctgtaaagtcctccttgtaggcttttttaaagtactgtacatatttgcaatcacattgtgcatagattcttaatggtagatatgatttcttttgtcaggctacaacaatgaactgcagattccttgtttgtaatgtaaatgattgaatacattttgttaatatgtttttattcctatgttttgctattaaaaattttataacatttccaagacaaaaattccaagtttatgctttgaagaatttatgtaattaaaatttcactaaactaatctttttagtttaggaattatttgggttttgacactggaagttgcgccaaataagcatcagaaataggagatgcttaacattgctatactacttgtgttggttaggggtttggatttgggggttctttggttttaatttttttttccacatttaaaagccttaaatgtactgtaagcctcagatcgttgtacaactggactgcggttgattgccagtttgtgtactgttgcttggatgcggcacagtggttggtaatggaataaaggatgcatggatcagaatgtgtgggcttgtgcagtttttttcttcatctctccatcaaagaaaatagtgaataagaaaacaactttttgtcgtaatgtaggaagaaaaccttgaggctttcaaactgcaccatctttctcaaggtatatggttttgttctataaaaggccttggattacttttggaagaagccaagatataaagcatatagcagtaaagtgcagatgatatctaaatagaggatgcagtggattctggctatgaaacaaaattgatgaaggtgacctcattgtgacctggctcagaggaaggacagtgcctcttttgttgggaagcctgaaacaggtgtgttccatagttttcagccctttgaccagctgagcagaaaagagcagctgagggatgctagttttcaactcttggaacgcactctcctaagggtgcattaggaggaagtggtggtcaggaaggtgtgaagacatgagtatgcacatgtgaatgcatgcatatgccagctacttcctgatcttgaatcaggtgggtggggctggcttacccgagggggcatcagcaaagctccagt

SEQ ID NO: 80950 - DNA, 1085 bp, Homo sapiens
gtaacagtgggaaccccagggagaaatcctctattggtttctgagagacacccctcctgagctgcaggctttttctagagctgttctccattcagacctggggccggattccaggtgtttggtttccactaagtgaggatgcgtctcctttctgagtgccttactatttctttctccctagtcaagaaggaaaaattaagtggctacctgaagtccttgcaaagtatagagaaggtatatgtattgtttctaatatatgaattcgtgccttacgcttgtggaaatccgtttataactattaaaagcctagaagtaacattcagagcaagatattgtgaccgtattattattcattctgttgatgattattatgctttatgatccctaaaattaagcagagtaatacagatttggatcactcattataatcgcatgagaatctcaaatcctaatttaaatgattgtagcatcctttgaaaacaagaatggaatgattgctactgtctcaaaatagaatgagtctatagtttaaaaaacaaaaaaaaaacctgttagcactcttgttcaagactgaattttgaatgtgaaaatcaaaggtttgaaagggcaaatgaattgtcaaaatactctttttgggaacatttctgtgactcttggtgtgtggaggagaaatatagaatctatagacttcggggccttgatcacttcaggaaatgatcacaagtgtattagcctgcacagaacaagaaggatcccttcttaatgtgagggatcaccttgggttccagttgaaaactgaatgccccctctctcagtgctcccctttctataggtacctgctactgccctatcttagaactaggacttgaaagtgcaaacacatgaagagggtctgtctgttctagtctttttcaggtgagccttttcagagggaggattaggaccatatctaatctgtctttgtatccaagctgagtgattttgacctcgttccctaatttctctgggcctctgatgctttttttaccccttgttgaccacacgtagggcacatagtcattaaatgaaatcatggctatgcaaat

SEQ ID NO: 80951 - DNA, 1052 bp, Homo sapiens
tgctgctgtaaatgctgctttctctgctcaatcatctagcaaactaccattcattcttcctgaccctgctgaggcatccccttctctgtgaagagttccctctctccttctccaatgtatcagtaagctattgctgtgtaataaaccacccccaaggcagtggcttgaaacaactgtgtattattgtcctgtgggtcaaccagctggttctgctgatccggacaggcttggctaatctcaactctgttttgtatctatcggcagaacaactggaggctggctggtctaggatggcctcatttatgtgtttggcattggctagctctcaattcagtggatgagggtgactggaccatgcgtctctcatcacccagtagactagcctgggtttgttctcgaggtgactgatgctgttctgtgagagagaaggaaagcatgcatggcctctggaggcctggatctcaaaacccaatggcacaccagcacttctgctgctttcttttggctgaagccaggtcagttcatgttcaaggggaggagatttagactctaccttttaatgggagaagctgcatagttacattgcaaaagacaaggatctgaggggaggagagaaggatgagtggaatggttgattgatttttgtgatcaatccaccacacccacctttgatagaggtacttactctgtagtacaattggccttccatactgtgggttccatacctatagattcaaccaattgcaaactgaaaatatttgaaatatgtttgcatctgcactgaacatgtacagactatttttcttgtccttacaggataataatacgggataacaactattgacaaagcatttacattgtattaggtattataagtaatctagagatgatttaaagtatacaggaggatgtatgtatgttatatgcaaatactacactcttttatattagggacttgagcatctggagagtgtggtatctgagggagttcctggaactaatgtgcagatgccaagggacaactgtactattgtacttggaagtactcatgg

SEQ ID NO: 80952 - DNA, 1020 bp, Homo sapiens
ttggccgtattgctgggaattaatagcaacattgcatatggggaaagcatgagatttgggatcacacagacctagattcaacgccttccctaactggccaaaagaccttgagacagctgcacaaatttcctgcaactctgttcctcatctgtaaatggtgatactaattcctggcggggattacatacaaagatgcatggaaaatgcctagcacagtgcctgggatatattaagagctcatccatagttgtcactgatttgagacagtgacaactatggatgagctctcaatatattcttgagttgcatgtctatcagaagatgtgatgccaggttctcaacagtcaacttagaaacacactcttggaatagaaacacgttgggtaccatttgtacgtgtattatatatgtatttccttttcatcttttacctattctcttttaaacagagtggtggattaaaaggtaatgaattacgcacaaagtagcttctcacttctcactgcctttcatttttcttctcctcctacttggcctttctcccccaccaggacctttactctggtcttctgtgtttgctaattcattagtcaacaaatgtttactaagcacaaagactcgttctttgttctcaagggagggaggcagacagatgattgcagcaaggttgaggataaagagaaatccggggttgggtgcggtgactcacacctgtactcccagaactttgggaggctgaggcgggtggatcaccagaaatcaggagtttgagaccagcctggccaacatggtgaaaccccatctctactaaaaatacaaaaattagctgggcgtggtggcaggcatctgtaattccagctactggggaggctgaggcaggagaatcgcttgaacctgggaggcagaggttgcagtgagccgtgattgtgccattgcactccagcctgggcaacaagagcgagactccatctcaaaaaaaaagagagagagagaaatccaggatgtggaggggcctggagt

SEQ ID NO: 80953 - DNA, 1049 bp, Homo sapiens
atccctccatctctatcagctcatggtggagaccatgtgttgaggagatcatgaaggggctcttcctctgggtgctctgtcacccagcccccagcagcccacccaggtgtcaaaagacaggtctgcccctcactccagagaatagctaggatcctggtggcatggcactttggaaagtatgagacccctccttgttttacagaagaagaaactgaggcagggagcagccagtcattgcccgaggcttcctggcaaattagtgacagagccagttgagaatgcagcccacgtttgtgttgcttcaactcagccccagatccttcactctccatgggggctgctttggggaagccagctttgcacccccacttccctggaaggcagagcactaaggctgccacccagccatcgctcaggcgggtccacacagccccgggccaacctccctggcactcacacccagtgtccggagcagctggtcagtgggcgtggagctcctgcttgtgtgcccccacccctgtcgcgccctccccctgcctgggatgagctgcagctgcctcggggcctctctgcctgcgccccccagccagcctgtgccctgctttaatgtgtcctggggaaaatagctggcaatgctcaggcgacaagcaaaggccattttttaaaaaaagactaatgccaggatgagggggcaggagggggtggaaacagctgcaggctcctcttccaaatttagccaggtgactgctttgccctgctcctctttctctggggtttttgggtggccattgcctccatggtaggactgtgttcctgaaaaccaccccccagatgactcacagagctgtggcagctcagagaggaatgtctattcatttcagctggggctcttgtcagccagttggacctgaccagcagctccactgttgcagaattgggctgcttcctacttcctgtgtccccatccgatttcagggcctaccatccccaaagtgacagaagatagcatggaatgaggcagccatgcccagatatcagaggtgctgaaa

SEQ ID NO: 80954 - DNA, 1050 bp, Homo sapiens
tccctggtgctggtcctgagagcggaaggcccttcaagttctcctgatccaacctcacactaagccctggaatcacagaggatggggctggagagggaggcatatggaccccagtctgcatgctgtcaatgccgttgaatgtggagagccacaggggtcactgctttctctctagagtcagagtgggaggggacccagaaaatccccttcctgtgcagaacaggagagccacaactccctgagcacgactctgcttatgtagagactccttcctctgcacggtattcagtttgactccaagggcagggaagtgtccttctctccacgactccactgaatgtgaagccagggcatgctctgactatctatctgctcttgcccacaggtttgctgacaatggcattggcctgaccctggccaggtaagggcaactgtcattgtacttggtcctctgtgggatcttgtctctgggcatctcaccttaaacatcttctctctacagtggtggaaccttcccgtatgacgacggctccaagcaagagataaagaacagcttgtttgttggcgagagtggcaacgtggggacggaaatgatggacaataggatctggggccctggcggcttggaccatagcggaaggaccctccctataggccagtaggtttgcaaccatgtagctccttattctgagtggcttaacctaagtggctgtgatggaagggaaaaagttaatgggtagtttctacctgttgactatgaattcttctaccagccagaggaatcactgaggtgactgagactaacaattaagggatgaaatctggaatggggagagagaagtcaaaaagtggtgttgaatatgagtcaacagggtgacgtggccatcaaaatgcgtaatgcattcctgggctatgttaatgggaatttagtgtgtctgggatcagggactgtgagtccttttctctgacagcactctcacttggagtgtagcatccactcctgaggatggcagagcaatagagtcaggccgaagcacacttaaaggagaa

SEQ ID NO: 80955 - DNA, 1013 bp, Homo sapiens
gcatacatgttgggtttggagaaggagcaagcctagactggggccaggcccaagaaggaccaccaggaagcccagccagcctcgcagacccttgcttcctgtgctctgctcaggagtctgaggcaatgggagaagtgtgtctgagcaacctactccatgctaagccaaggcaaaatcttcaagtcaccagttcttgtccagtctctcctacctccacgtccaagcctgttgccgcttcccacctccttctgggtctcagggccttcttggggttctctgtcagcctacagtcttgcttttcagtggggcctccctttcttctaggggtgctgaaaatgttgccttacaattatttttatcatgtttatcaccttccattctgtgtccttttcccctctgtttcccaaacccagcacactgccaatgtgaaaggcttactcccagaggagaaactcatgtgggtcttaatctgatttaattgttatagcaactaaaactaaggcgataatgactaacagctctatcttcccaagaaacataatattggcacgctccagtggtatttacagtatttacccaatgactctttatgtaatggaaaaattggggaaaatgttgaaatacaggaccattctccaaactccaaactagcaactagatggatattcaactcatccatccattcatccatccatccattcacccggcagtcattcattgacacttagtgtgtctatacatgctttaaattaattaatgaattaataattaattaataatgatctggggcagggggagtttctagaggtggggatcaggaatggttttacccaggaagtctctgctaccatccacctcagaaggggcaaacatggcgtttagactgacgtcttacttccttaactccataggaatggaaaacatttagactgacatcttacttccttaactccgtaggaattttccaattagaggaattcagttatatgatggccccatcaacatccaaaact

SEQ ID NO: 80956 - DNA, 3031 bp, Homo sapiens
aggctgatcttgaactgctggcctcaagtgatccttgcacctcaacctcccaaagtgctaggattactgtcactggcaaccatgcctagtgtgtgtttttttttaatatctcagttgatcctaaagttttatttatctttggatctttagcttttatttcatctgaacagaagggtgtatagcttagtttagactctttgagggacaaagttaatagtttgacagcttcagctagaagtttctgctcagtggaaagtgctttgtgtgtagctatgttcacacatagagcttggaccatgctgttaaccgataactaatttagtatgaagaggctcagttttcacacttgagtatggtcctgaggtacaattttaagaaatctgcttctttttcctcaaaaacagttctgaaatttggggtctgcaaatattctggtttaggaaatataaaagcaatgacaagaaatgggaggagtacttagagagtgtccggccagcaaaatattttcaattagcttaaatagacacctagacagaacaaataaatgtcttggtgatgtctgctccagaaggcccactggtctctgtggagtggtgggagcattagaaactgaagggggaacgcgtggtgtagtccctaaggaacagaagaatcttgcccgctggccacactagggctccacccaggcctcattctttccgctttgttccttgggacctttcgagtgtggacgagctgggcagcttgctgctaagctcaagggctaggatttttgtccaacaaccaagtgtcctcttgagtccttcatagcctcttatcatgacccactctaagccattggttttccacctttatcagcagaagtcttttgtcccataaaagtgtaactggacactctagaatataaaacagatacagatcagatcgaagctgcctctttacctccccagcagcagcccctgagccacctctgcagtgtcctagggaggttttccaaatgttcacttttaacacgggcatccatttatacaacaaaggaacatccagtgtctgtttctattttgatctgagctggatgtttaatagttcagcaagctagtattttaatacatgagatatcagtagctgctaggctttggaaaatccaatttttcattccatattcatgtagaatttgaaataaactgataagtgccagagaattgctctgaccccttagcaccttactagtacgtgctggctgactgattgcatctctctgcccaaggttcattgtgggatcagaccgtgctatcttcatgcttcgcgatgggagctacgcctgggagatcaaggactttttggtcggtcaagacaggtgtgctgatgtaactctggagggccaggtgtaccccggcaaaggaggaggaagcaaagagaaaaataaaacaaagcaagacaagggcaaaaaaaagaaggaaggagatctgaaatctcggtcttccaaggaagaaaatcgagctgggaataaaagagaagacctgtgatggggcagcagtgacgcgctgtggggggacaggtggacgtggagagctctttgcccagctcctggggtgggagtggtctcaggcaactgcacaccggatgacattctagtgtcttctagaaagggtctgccacatgaccagtttgtggtcaaagaattactgcttaataggcttcaagtaagaagacagatgttttctaattaatactggacactgacaaattcatgtttactataaaatctccttacatggaaatgtgactgtgttgctttttcccatttacacttggtgagtcatcaactctactgagattccactcccctccaagcacctgctgtgattgggtggcctgctctgatcagatagcaaattctgatcagagaagactttaaaactcttgacttaattgagtaaactcttcatgccatatacatcattttcattatgttaaaggtaaaatatgctttgtgaactcagatgtctgtagccaggaagccagggtgtgtaaatccaaaatctatgcaggaaatgcggagaatagaaaatatgtcacttgaaatcctaagtagttttgaatttctttgacttgaatcttactcatcagtaagagaactcttggtgtctgtcaggttttatgtggtctgtaaagttaggggttctgttttgtttccttatttaggaaagagtactgctggtgtcgaggggttatatgttccatttaatgtgacagttttaaaggatttaagtagggaatcagagtcctttgcagagtgtgacagacgactcaataacctcatttgtttctaaacatttttctttgataaagtgcctaaatctgtgctttcgtatagagtaacatgatgtgctactgttgatgtctgattttgccgttcatgttagagcctactgtgaataagagttagaacatttatatacagatgtcatttctaagaactaaaattctttgggaaaaaccctcaattgtgattttaataaattaaaagtagcacattacatggttagaaaatgtcagtgttaaagaatggtacaaagtgaaaagtgtatccctctcttgccgccggtggtagcttgtcccagtggaagctgctgttaacaatttgtgcccccacatccccctccctgcccatccaccaaaaaaaagtacatttacttatgtaaatgtacttatggtgatgtatgtttgttttggcctcacagcatctgtttccccttaatttggtagctgctcacatttccctcgaaagaaccacaccctctgcattctcagttctctgctttggatgggacatttgccctgcagtccccccaccctccaggccatgccctctccagggtgaggcctgtgtgatctaccgtactagggtactaggccctgaaagaggcttttcttgttcctcctgcatcttgaacctggagcgggagctgttgtaggccccgcccttggagaagagaactgtctgacagtggggagagagcgccacacc

SEQ ID NO: 80957 - DNA, 1003 bp, Homo sapiens
tgctcattcttgaattttaaataaacggaattgcatagtaaatcttattttgtatctggcttctgtcacttaacatttttgggatttgttagatgtatcagtatttgttctctgttgctgtgaagtatttcattgtgtgaccataccagaatgtggccatttttacagcctaccatgttgggtagattgtatgagagtttaaaagctctagaaacccatcacatgggggcgctctgtgattggtaacctgggtgtgggtagtatgtgctgcctgaaacttagactatcttgaaagttaagaagaggaagaaaacccctggttttcctttttatgttgtaatttaagtcatatacatgcacctgacatcatgcagaagtttttgcctgtgccagttgaaaagcaagattctgatgataggtttgatgcttttcccctaatctgatagaaagatgatgacattgaagaaggagatcttccagagcacaagagaccttcagcacctgtcgacttctcaaagatagacccaagcaagcctgaaagcatattgaaaatgacgaaaaaagggaagactctcatgatgtttgtcactgtatcaggaagccctactgagaaggagacagaggaaattacgagcctctggcagggcagccttttcaatgccaactatgacgtccagaggtaaagcagcaacaaccagctgagagactcataggctgtgctcggtcttttctttattattattattaattatgatgatgatgatgatttttttgagacagagttttgctcttgttgcctaggctggagtgcagcggcgtgatctcggctcactgcaacctccgcctccctggttcaagcgattctcctgcctcagcctcccgagtagctggaactacaggcgcccgccaccatgcctggctaattttgtatttttagtagagacagggtttcaccatgttggccaggctggtcttgaatttctgacttcaggtgatgcacccg

SEQ ID NO: 80958 - DNA, 1174 bp, Homo sapiens
agagactgaggataaacgtccgacatccagaaatgggcttttttagagccgaggcagcctccagaacttccagttccaatttatttcacaggcgagaaactgaggtcaacagggacgttggttagtggttcctggaggccctgaaggaacttttggacctggcttgtgcgttccagagaaaaaggtcggcctctgacggaaaacgaaaaatgagcactcagggacccacccagccgggacagagcgcctcagccggaccaagaggaggagccagtggggcggggccaaaatggcggaggggcggggcttccagaggcgggggttaggaaatggtacggggcggggcccggtaggctagcgagggccgggaggcggggcctcggaaaggcggacaggaaggcgtgtgcaaggcggggtccggcccgcgcaggtcgggtaagcgcgtctagggcgctgcgcggcgcagcgaaaatggcggcttccaggtgggcgcgcaaggccgtggtcctgctttgtgcctctgacctgctgctgctgctgctactgctaccaccgcctgggtcctgcgcggccgaaggctcgcccgggacgcccgacgagtctaccccacctccccggaagaagaagaaggatattcgcgattacaatgatgcagacatggcgcgtcttctggagcaatgggaggtccgcggcgcgcgcacaccctcccggctcttctctgtgcgggaccctgttccctatgaccccttacctgttctgtcttgggacctttctgaccccctaacctcctctactcatgccttgaatccttactgacccactgaagccactgttgaccctccattcctcctctgacccgcgcgccctgctgaccctcgctccagccctctgtcattccagtgccctgttcctcctgccatttctcaaaccacttcaatcacggatctgcccctcactgttcagctttgctctcccttcacccttcagtgccctggttgtctttgcgttgattcttgtggtcagtgagccctgcaaacagggagagtgacctttcccaatctactaaagagcatttccttctgttttgcggtgagtgggtgggagagtgggttgcagtgaagatggtcttccttaatggttatctcagctgtcttctaaatcagtataattttag

SEQ ID NO: 80959 - DNA, 1071 bp, Homo sapiens
cgccgccgcagcccagtgccctctgcccgcggcggtggatggcatgatggtgcggggaaggcaccgcggccttggccagctgagtcgcgacggccgccggggcggcggcagtggccgcggcagcggcggtggtagcgggctccccagcggcatgccagtgccccccgggcgcgatggctagcggcagcgccgggaagcccactggcgaggcggcttctccggctcctgcgagcgccatcggcggggccagctcgcagccgcggaagaggctggtatccgtctgcgaccactgcaagggcaagatgcagctggtggctgacctgctgctgctgtcgagcgaggcgcggcccgtgctcttcgagggccccgcctcctctggtgccggcgccgagtccttcgagcagtgccgggacaccatcatcgcgcgcaccaaggggctctccatcctcacccacgacgtgcagagccagctcaacatgggccgcttcggggaggcgggggacagcctggtggagctgggcgacctggtggtgtcgctgaccgagtgctcggcccacgcggcctatctggccgctgtggccacgccgggcgcccagcccgcgcagccgggcctggtggaccgctaccgcgtgacgcgatgccgccacgaggtggagcagggttgcgccgtgctgcgcgccacgccgctggccgacatgacgccgcagctgctgctggaggtgtcgcagggcctgtcgcgcaacctcaagttcctgacggacgcgtgcgccctggccagtgacaagtcacgggaccgcttttcgcgggagcagttcaagctgggcgtcaagtgcatgagcaccagcgcgtcggcgctgctggcctgcgtgcgcgaggtgaaggtggcgcccagtgagctggcgcgcagccgctgtgcgctcttcagcgggcccctggtgcaggcagtgagcgccctggtaggcttcgccaccgagccgcagttcctgggtcgcgcggcagctgtgagcgccgagggcaaggcggtgcagaccgccatcctgggcggcgccatgagcgtggtgtcggcctgcg

SEQ ID NO: 80960 - DNA, 1068 bp, Homo sapiens
tttcctggaaagtgatttagctccctttgtctccacttacctttccatcatcatgaacagtggctcaggctgcttgaattctgatttgtattctgcctatcattttcagattaaatcctaatcctgtgtggtatgccagccttcccaactcagagtctctggatggaactctaaaagtactgtacatcaagtgagaatagttagcatcttttatgtacacaggtctattcagacaagatcctcatgatttcagaaaaaatatagagagggtcctagactgcttaatagaggaaagaagtatcctggaaagcttgttaagaacgttctagagccacaacatgattgtaggccaagggcttgtttttgtgaccttgatctaagataatgccatggttgattgtatgttggaagaatctttgattggaatttggagtaatattaaggtagtttgtcttttctgcagacatttttaggagtctttttgtgtgagtggtggtggagtgtatagttttgttgaacctagttaaattctgaatatcttcccactaaaagcacaacaaatctatttacagtgcctgaagcctgggagagccacatgagtaaaaactcgtacgtggtttagatttgttccatttacatttttcttgggatttgttgtgcttaaacctttgcagttcccacagatctgaaaagaaagcatttttcactgtaatacattaagagagagagaaaaaagtcatattgactattttacttgtttgaatcgctgtttttattacaatgacatgaaatacaacgtgtaaaagtctttaacctgtgttgggtaagggtaggactgtttcaccaccctgaatttgaaatttgaaaaagtcttaaagtggtagggtacttaaatttttaaaaaaatgaccatgggagcagtttttctctgttaaatcctggtaaacttcgggtttttgaagactttaaaagatgaaaatgaccttgagcatctttattcctttcctctgccccttaatgttgggatggggttcaggatgaaagggaggtgggattctaattcatgtg

SEQ ID NO: 80961 - DNA, 1050 bp, Homo sapiens
tgcctgttttaagcatagcatttatgggtgatgttaggaaacacaaaaattatgtgtgtgtatttgctttcttccgcacccccaccatcctcatctgattggttattttacacacacttttttttttttttgagagggagtctcactctgtcgcccagggtgggatctcggctcactgcaagctccacctcccgggttcatgccattctcctgcctcagcctccctagtagctgggactgcaggtgcccgccaccacgcctggctaatttttttttttttttttttgtatttttagtagagacggggtttcaccgtgttagccaggatggtcttgatctcctgacctcgtgatccacccgcctcggcctcccaagtgctggggttacaggcgtgagccaccgcgccctaacttttttttttttttttttttttaaagctggcatggggatttaaaatatttggcagtttggaacagctaattttaacagaaacacctgtttttccgaatgaatgtgactatggtaacatgcagatcaggcagaggatttgaaaaatgactgccaaaattctttctgagctttgctgagtgaacgtggaaggatttagagaagaaatccttaaagatttagtagcattttcacctgggactgttccctgggctgccttgtggtttgcatcaactggaagaggctttaaggagaccatctctgagtttccagtgtgggcacaggtatttgtgttcctccctggcaaattcttgtctttacttaattttttttttttttttttggtaggagtatgtatgcaattaattgctccattttgactaagcagggttttactttagggttctttaggtaggtgagttgtctgcttcgacttcagtggcagaaggctttaagatttaactgtccgggtattataaggaaaaagtgtgatactagtgtctatgattggggtcaatttaatttaactgtggaccccttaaggttaagggctatagtgcccaacatatgtgtaatttttttttaaatgaatctgtatataag

SEQ ID NO: 80962 - DNA, 1018 bp, Homo sapiens
gcaggtattaccgtggatgtcatctaaacatttgtgccttgcctttcccattataaaaattaaatgaattcacatgaaatgtaagcccttgtgatgagctttaagatcttgtgatgagctttgtaagacaagtacctgccaggcatggttgcttaggcctgtaatcccagcactttgggaagctgagatgggtggattgcttaagcccaggagatcgagacccacctgggcaacatggcaagactctgtctttcaaaaaaaaaaacaaaatgttagccaggcatgatggcatgtgcccgtagtcccagctacttgggaggccgaggtgggaggatcacttgagcctgggaagtcgaggctgcagtgagccatcatctcaggacagcactctagcctagaggatagagcaagaccctgtccccccataaaatttaaaaaaagactagttctgtcttcttcataaagtaaacaaaagtatgatctaaaaaaactatgttaaagtcagtttcccttaataaccttgcctttacccttccagtaatttgacacagcaagtatactataacatcctcaaggacggcccagatgatgagcatagctctgttttctcagtctacctctgggaaggattctgtgtggtttcaaacctcctatccagattctctaaaacattgggtgtcttataattttaaaaccatgtcagtcaaacattttagacttcaggtaagatttgaatgctaattaagatttgttagcataatttaaaagtgaatccatttactgattttaaactttataattcatagtttgattggcaagtctgtttaaatgtcgaagataacatgtatccagattttgctgaagtagacatagagaggaaattttttaaatccaatgtttcaggaagggaaatatatatgctgtgcattcaagtttaatgaacatactgacctgaaaaactgctgaaattatagggcatcacctaagctttaatagcttctgattttgttctaatttt

SEQ ID NO: 80963 - DNA, 1123 bp, Homo sapiens
accaagaactgaactgggctcctgaagatgcacctggcctggagagtgcacctgtctggctgatagactgggagcttttcaaggcaatctgttgtgtctttttcatctgtcatccctagaaggtgaccaggatgctaaattgtttgtttaatgaaagaaaatcaatagctggcatttttttgagctcctgatgtatacgctagaaactttacattgtgtttctcagtccttaaagcaacccctttgaggtatgaagagtcgttctcattttacagatgaggatgctgaattgaaaccacttgcctagggtcaaagaaactagtaagtagggggataaaggtaagaatcaaggtcttgtgacagagacagcattcttagccacttggctatagtgaatgaatgatttttaggatagtgtccctctgcccattgaggcgaaatgctcttcaactctgttaaatttttaatctttccaatgacagttcctatgggtttcttcctaagcctcacttaagcctttggtctgagctcctcttggaccatttgtggagggccctggatgcccacaggccccttgtaaagactcgggcagagttgattccatggacagatggctttccacctgcttcatgatcctggtatcctaagggatgcttgaagaagataaacctctggtttgtcaaggaacttccacttggatttctaaattgcagctgcctttgctcttcacctacttggaacacttccatggttctcccgtggactttaggataaaaggcaaactcctcactgaggcatttctagcaggtctggtctctcacagtctacccataattatactttttagaggtccttccagtgtcatgctgtcttcttgcctccaagctgttgcacaagctgtcccttggaacactcaccccacatcctgcttctccttaacccgcttccgcagtcctcagcctgggtggcaccctctcctgcaggtccctgtagtaccctgcactttccctatgttagtatttatcaagttactgtaattctctgtttacctatccatgttcctagtatggatcatcatcaggtggtggcatcatctttttatctccagtgattaacgcagtta

SEQ ID NO: 80964 - DNA, 1086 bp, Homo sapiens
cattcagggttggccttatgggcacgtgccccttgaaaggagctggagaggaaaaaaatgttctgaactgttttcattcatgcttaggctgggaacacatgctggtcaccattgaatacaaaacctcctctggctcccagacgtagatcactcaaacacccaacctgatcttgaacttcaaaatgcaaaaaaagtaaactcggcagggagaaaactgcccactgactaccaaagatgacacagcatgaatatttcctccagctacacaatggagaagctgagtaatatgcagaattcactaaatgacggggactaagatcacaggggttttaaggtcagctgaaactcgattgccgtagttttccttcctcttgggtaaaagcttctctgagcaaaccacattttttcagagaatcaaggctagagtccctggtgaggcagttcgttcctggccttctgtcctgggccacgtgcttctcagcccttccctgttgggctgcgggagggttcaagatggaatgaggtaatgctggcaggacagctgcccagggagcgaacgaaactctgccctggttgcagcctaagcaggacaggaagcaaattagcagaagcaagcagtaatttgactgccaacaataggagtcaaaactgcatttctgaccctgcaccgttgatcctcctcacaacaatagtcatccacaagccataaaaaggccgatgaaacactatttgagattgcaaatgctggagtcaaaagagtcctgggtccaaattctggctctgccacccatccgctgtacgacctcggacaacttgcctaaggtctgttagactctgattcttaaatgtgcatatttcatcaaggtactgtatgaaatgaggatgtatgtaaagtgtgtagtacatagcaagagcccaataaatagacagtatgttctatgggcttttgtgaacccctgccatcttgagtttattaaccctccatgcgtaaaaactccctcacattttttgcttccttacgttcttttttttttttttgagatggagttttgctcttgttgcccaggctggagtgtaatggcgcaa

SEQ ID NO: 80965 - DNA, 1045 bp, Homo sapiens
tttcagtttcctggaggccatctgtggagtttccagggaacctgtaagtgcatgcctcgttcaaagattaccagaggtgccgcacccttcctggtatctttatgggcctgcctcctaaaatattcaaatcaaccctataacctgtgatcacttgtcctccagaaaagccttactgtttttaatgaaatcatttccagcaaactgtattcttgtgaaagcttactgtccatttctgcaggcctgaagggaggcggggctagtgactttcagccccttctctgcaagtctgtcctaaagagtagtgacagacatggcatggtccaccttctagtccttagatacaatctcaagataacaagtttgattgatgcgttggggtcaaattccttttcgtgctccaggtaccgaggagaaggcattgtatatgggacactagaggaggtgtgggactgtgtgaagccagctgttggaggcctacgagtgaagtgggatgagaatgtgaccggttttgaaattatccaaagcatcactgacgtaagtctttccaagcatgttatctctagatagtgtctgggccaggctatagtaaccccctcccatttcttctggaaggggtccgtgataccttttgttaagggggtgtgtcctgcaagcacaggctgcccactgcttgcagcattggaggcctgcctcagcccagtttcccggtgggaaacctcatgactcagagagggagagaagccccaaacagagtctctgcggggagcatacctgttccttgtgtggggctgctgcactaggcaacacaggatcctcagcccctggcacccacttccctgaagcctgggccagtagcagctccacgtacctgcatgaccccagttaccctctggtatgagggtcttcacgctttttgcttacatgcatccaacagatttttgagaaattatgcatcatcctcacacatccagttgatgtctattaataacatttagtttacaactaaattttcataagttgcaaagcatgtcatttttgacatgta

SEQ ID NO: 80966 - DNA, 1044 bp, Homo sapiens
accctcatttttaacatttgtattcctcctctactgcccagagcctttctactctgtgttctccaattcatcctaaaatcaagaccaaggtagaattctcgaacttggcctattctgaaaaaaatggacatggctgggacagagagcttgtgtgaatattcccaattggtaaggaatgagtttgcacactcatttattctgccatcaagcatttactggctgtctggtttgtgcctgaccctatgcacttccttagggaatggaataaaaaaaaatacatgatcttctccttaaagcaacttgatgcttgatagaatgacagacaaagcaagaattgaaacagagtgaggtgactgctgtgatgggtgaatgcttagagctagggaggggtagaagaggagagagaaggagtattgcttagtttgggtcttgaaagataagttactgttcttaaactacagtagtatactgttgaggggcacagatggaccattcaagacagaaagctgcaatggcctgtggggacaggcggaaactgccaccctcctccagtcactcaggccctaaaccatagctgtgacagtctatcaacttacattccaacctcacctgcaggacacaagggagagagttgccaaagaggtggctgtaggtaatggggtatatacatttggatactggacacagagaagacacagatccaaagtctcattgggataaggaagttaggagagcttgagtttccttgttcttattaaaatatatgaacactccttcattgattatcaataccatcctgtctgaatgcagacatctggtagtggtctcatgtcttcagcaggaactcccttcttttctatcctagcctcctgtccacatcccaataggcttagtgagtcttttgggtagaaaaaaatcttagagccttttattccaaatccctcctgataagtgaaagaagccagtcttaaacagctacatactgagccaggcatggtggctcatgcctgtaattgcagcactttgggaggctgaggcgggtgg

SEQ ID NO: 80967 - DNA, 1067 bp, Homo sapiens
attttatattttttgatgttgcataataatttttatagccacttaaaagaaggattccttttcatagcataaaattatcagaccagactttgtttttgaaatactttaatgggttttcttaataaactaggtcatttttaatactagttgtagacattttatctctaaatcttcagggccctggcatagctggtcaaatctaattggcctagactttggggaaaatgtgactggataattcactgtctgtttaatttcaacagataataatatatgagttagtttaggagagttatatcatctattggtttatttgaaaactttgataacataggaaaaactagcacttcgatttatagcatttgtaaataacatcattcaaactgccagatgtgctataaaatgtatacttagatcagcacattttgcatttaatagagaaaagaggcataacccagaaaaagttggagaaaaagttgcactttctgcagtctgttgggccctgacagatgtgccagtgtgggggaagtgacatgtcgagttgatagattgtctgtcttccttctccatgtttgagagaggtaataatgagcaggaaagtggccacaaagaggcagaccaagggatagagccaatctaccatctaaataatctaccttattgtgtaattcatgacgagacctcagtcattgaaaccctgtccccttctgtgacagcatagtaagactacgtttgtactgtgcccaatgccatgtccaaaccctagcctctgtttgttgaattcagtagaagccaagcaaaatgttgtcagtccacaagtagaagtgagagtgttcctgttcttacagaggggctggctttgtacactcatttatagataggcttcagagacagtgaggaaggctaggttgaggaagccacaaaaccacggctctcactcctggagaattatttgtattgaggtccagaggcagctatccttctgctcaggggacaggcataggcaacaccaacataatgccttttcccagacatcctggagtcggtgggtgaggggaggagaggct

SEQ ID NO: 80968 - DNA, 1193 bp, Homo sapiens
cgtttcttttttgtttttttttttttggtttttttttttggagaccgagtctcactctattgcccaggttggagtgcagtggcacgatctcagctcactgcaatctccacctcccaagttctcctccaagcgattctcctgcctcagcctctggagtagctgggattataggcacacagcaccatgcccaactaatttttgtagtgttagtggcgatgtggagaccatattggccaggctggtcttgaactcttgacctcaagtgatctgcctgccttggcctcccagagtgctgggattataggcgtgagccaccgctctcctggcccttaaaacatttctgcgaatgagataggggagtaaagattactagttcacacatgttaggtgttatggtaagatttcttttctatatatctcagacaaataatatataactaaaagggatcactaatgaaaataataatcattctgctgttttgggaccttttcagactatacttgaagtattgtttttcatttccgggtaccaaataccaagagggatgtaaataaatcatagtagttcaagtaggagagtggccacgataaaacaggaaatacaggtctagtcacagcaagattggcctggaaaagtgaacatgagacagctgtctttgagtagcttacagggtaatttgtgggagagggattaaacttgtcccatgtgataaaaactaggactgatggtcagaaacttcaggggaacatatttgggactcaagaattgtcagctgttacagttatccaaagatggaatgggctaccctgggagaaaatgagttttagagtatacaaggagagcttaaacagctactttagtagaacttcttgaccctcaagtttccttttaccccactgttgtgtgattctgtaactatgaggtttctggtatgaatgacgggggaaatagttggaatggggagaatggaattgccttttgaagtagataatatattcttagacatgttaaatttgaaaggaagttggcttccacagcagagatgccctggcatccattgtaaagtggtattggagatccaaggagaggcctggcttagagatggccttaggagtcccaagcataaaattagttaatttaaaccacacaaattataaattagttgtctcgctgagtggagagtttgttcaaa

SEQ ID NO: 80969 - DNA, 1081 bp, Homo sapiens
atcccaggagacatgaagccctggcacttagtagctctttggacttttcactggtattagttcactgagacttagtttctttacataggtaaagaaaggggataataattcatacagattgtgaagattaaaataacacaatttttttaaatacagtgcccagaacagcacctggcacacagtagttctcttattctctcaagatcatggaactgtttcagtagtgaagagaatataaaggaggattgagccctggatgagagaatcggccaaattattaagtttcctctaaccctgaggccctttgagtcaatatgtggttaattacattctttttaggaaggttcttttgctgattaattcctgaaagcagaaatctaagtttgtttgttttttttcccaaaagaaatttaggcttccatcacattaaggtttttgtgagactgagcgtcattagcagcatttgaaaaatagctgggttaaggccagtatgcattgtgaatcaaatctccaaatacagcatgtcatatacagtgcttttcaaccttatttgaatatagcatgcctattaacagccatggaatttgtagatttgtttgggaaacaccaatctagactattctcagatgctatttttcattttcattgagaactttcttaaggcggaagtaagagttaaaatcaaatcttaatccctcaaatctttgaagaagacctaagagcttttctccagcctctcctaccccgacaaatgcttataccaccactatttgaatacttctattgatggccagtgcacagccagcttcgtgatttaatggtgtttttttctatattgagcaaaatgtctgtcacctgctagtttccaatcatctgtaccaccattcatctctcttccatgcaacaactcttttatgtatttgaaataaatcattagttttctagttttatatccaggagaaaaactccaaatccttcacctgtttttctgttaggatttctgtatcctttcaccatttcagttgctgtcttttggacataatttatttggtcagcatccctcttaaagcaactatatttg

SEQ ID NO: 80970 - DNA, 1026 bp, Homo sapiens
tagccactattgacattttggaatatatcctccagctctttttttctgtgcatatatatgttttcttatatattttatttatgcatttaaagttgtaattttaaagtacacacattttaagagaggaaagatatacttttttacaaacaagttaattatagaatatttgcaaattacagaaataaaaagataaaaaccaggagctgactgaaacaatcattcactttttaaaactttaaagtatttcagacaatagataatataatgaacgttcatgtacctgccatccagactcaactaattttcatgtttttctttaattgtacaactttctttatacctggtgaaatgttagctatctaagtcccttatcccatcaataactcccatattcctcagcagtaccacttcttgaaacttgctgtgtaagtttgtcttccaatgctttaaaacttgtttgtaatttcagtaggtgtcagcaatatattttttttaatttttaaactttgcataatagtatcatattgttcatgaccttctgtaacatgctattattgtactgttttatgttttacagattttttttctatgttgattccattgtatgaattcattataatttattttttcaatctcctgttggtggatattgaagggtgctttcgattttttgctgtgacaaacacattaccgtgaatacttttgaacatttttttccttgtgcacatagatgagtttttctagggggtacttcttaaccctgtcaaactctaccttcttttcataacaaatattctgacatcacttttactacccaggaatgaaattcaaagataaaataatctgcctgcctgcataatttcaaaaatatcagtataatactttaatgtaagggataaataaaagtgaagtgatttacaataaaataacatgcattttagtatataaatgttccagtttgactacatgagttaagtcagatatttgtagtcaccatgtttctgtgacagtcacagatgaagcttg

SEQ ID NO: 80971 - DNA, 1027 bp, Homo sapiens
cactttaaccaaacagcttaaggataaattacgcctattttacaatatttgttttcgctattagaaagaagtgaaactgaagctccaggcatatgtcacaatgttggcctctttgctcattgacaagtgccgcctctgtaggaaagcactacagtagcactagtgcttatcatcccctgcaaacttcctttgtaagatgatgtataataaagaacattttttcaattactctttaaaatggataaaaatagcttctgtaagaaggtataacaaaatatccaaagggcatggtaatgtctactcagagttcaaggaaatgacaaacaacatacctctagaaattagtctaaaatcactacaggctgaggttccagtgagggagtgctcaaaaggctacctaagaagcgcctgaattattgaggcgctgagatgtcagttccaggggacctgcaatttagagcaaaacaagcctcgatcatcaaagaggactcaagtactgtgaaggttctagactagaaacagatacaggaacaagaccaacactgagtcatgtgggactagaacctccaaaagggtggaatagaacactcaggtctggaaatggaaaaggaaaactgtcggctcataagagcagattgctaaattttcaggaaatttgttaaccagttgttaaacttggccattattaaagattaaatcacataaatttataatcgagttaattatgttaaaaataaaggcaatgaatgcttaaatggagcaaaaaaaagtggctagcctttctgacaatatcaaaacacagtgaaactggaacacctggtatttggaaatgattcagtttgtgagagagtgtttaactgccagagcatccattcttttgccgttttctatggttaagagatgtgctttttaggttgggctttactaaagagccagacaatatagtactttaggctagaagatttttgtgttatgttaatggcctttcccccttattgctttttgaccttaccccttgcatattata

SEQ ID NO: 80972 - DNA, 1049 bp, Homo sapiens
ctttgtcagaaagaccacacacacctcttgaaaagttactttcagatttgatcacataatttccaagtgtcttccaagaaagtgagcatgatggccctgagtgaaaaactgtggcacttgaccaaaacctcagtttgtttctaatcatgtatggatagagtgtaatttgattaaagctgactggcctgaaatgatcccagtaagatgctgaactggatctggatgaaagcactcactggatgagtgcttgccctcatccaagcactaaggaatcactgaaatgaatgagtttgggatttcatgtcgaaatccatttttaatactaccaccttatgttttcatagtaccgtatgcttttcaaaatgcttttatctatagtatttgatccgtgcagtctgcttttagcttctatatttcaaaggccagtaatggttaggttggaagtaatacctatcagaatagtgactttgaaactttgaaatcatttccaggtgttttagataggctacatttgagtgatgaaactttaaactttcttttttataaaagaaaactttacgcttgaagtaacctttttagaaattagtagccccaaagatttcagggtgtgttgtattgttcttttttacagtgaatgggtgtaacttactgcaatgtgaataatgcatagtatttgtagggaaaagtagggaagtagccaaggagaaaagatgggacaaagaaaactgtgagttttctttaaatatctgaggagatggaaaggaattttaagcaattacttgacaaaataaactccccccccttttttttttattacagtagggataccaataagatggaaaaacaaaaatcaaggaaagttggagaataaaataatacctgcacagtatatatattttggtggcattgttgaggctgtacttgtgatctaatatccatttttaagtgttttgtagatattaaagttaatttgcatacatacgtatgtatctgtatatatacacatataataaatccagatatacatgtattatatatctatggataat

SEQ ID NO: 80973 - DNA, 1043 bp, Homo sapiens
ccagcttattaggaaacttgagtttctaggatgtggccaccagcttgtgtacatcttcgttgattctcatgttcactgtgttccccaagaattaatttctcccaagggcctacatcagtttagagtaggcaacgaggttgggtgtgtgtttttcattagtagatatattaatctgcccagacatgagatacactagcacggtttacagcctgaaaacacagctctaagagtttgtgggtaacagaacattagtcttacttaggtctttctaaatatcttcactcctcagagtaactttgagtgttttctggatttgagtttggctcattaaagtctgatttctacataattcagatacatccagagttttttggataatacatttgaaaaatttccccttatgaggttagacaagtttataaccgaaaccaagttcattaaacctatgctaaaatataaaattgtctttaagaaaagcccaaacaggtagaaagtgacagtttattagtaaaattataacaataatttgaatgtattgatattgaacgctacgtgatataaaaatacattatttcccaaggtcacaagtcattaccaagtttaagtttattttaaaatatagcagatccatagttttgttctttgtattcatcatagaatctttctgtgtatcctattttgttttctttgcctcattgattacaagattccgaaaacattgactactagattttgtggaaaagtagagaagctgagcatttgaacccactaacttcatctatctttttgagtaaagcaagctatttattttcataactagggaggccttacaacgtgggttgctgaggacatcctgtttatgcctgtcatcttggagaagttattaatagtgtcgcctttcaccgtttaaaatcgtagctcggatgataagttctatgtggtcacccttattatcactgatatattctgtccttgattattttatgctttgattttaataattctgtaagtgcatttttgactatacttttctgcatttttaa

SEQ ID NO: 80974 - DNA, 1498 bp, Homo sapiens
cctcttccaactactaaaggcattgtttcaactgtatatattttctctatttttgttttctcttcatcttggaaattgagttatgacacctttggttgtttctagttggaaaaaagcattattatgaaaatatatgctgtttagtgagcaatgaagcagaatataaaatatcactaatatcctgaacccccatgcaattagaagcacattgtcactagttttgttttatgtttcccagatgactgttaatttagcagttcagcacataattgcattgatgatcatatttctaaggatttgagtctattgattcaagtgtagaattgaagtaaaagttgttattccttcactgttgtatctgaatttgttttattatttgactctataatgactggaagaaatcagatatgcttggaaatcaaaggtaaattttctgtcccctgggaataggggtggaaaggaaagaggaacattttttttagctctaaacaaaatgagcaattagtagatttattgtataatagttgtttttcttcaaaaccacaagccttcaattttctaaaatgacaatagtaaattttcactttctaaacagtttacataatcagtttcactatatttgcatatattttgttaactgatactaacaatgatgccacaattttttttttttttttttaagttggagttttgctctgtcgcccaagctggagtgcaatggtgcaatctcggctcactgcaatctctgactcctgggttgaaacgattctcctgcctcagccttctgagtagctgggattataggcacccaccaccatgcccggctaatttttgtatttttagtagagacagggtttcactatgttggccaggctggtctcgaactcctgacctcgtgatccgcccgccttggcctcccaaagtgctgggattacaggcgagagccaccgctcccggccgaagccacaattattaatgcacttgaaagatatatcaaattagatttaaccaacgtttatttagtaccaactgcatgccaggtgttcactgagtcagttttgtttgttttcttacttaagccttgaaacaaactttagtggtaaatttctcttcattttgcatattaaaaaactgaaaggattttgacttgctcagcaaattacactatcccagccattgcttattagctataattttattttctgtgtagttgtatagctgagattatttgaaacactgttactgattcttctcacttactatgattattaaaaatgaaaatatgctctaatgatttttgatactctgcatatagaacccttgagtttcataggttctgtaggccctttctcctataaataatctgagactcacagagaggctgggtctcctccaagcttgggcagctgatagtttgagagttgatctagaacccgggtctttccctttgtaaggggcaaaaccactggaaaggacaggcagagaaatagctgggctc

SEQ ID NO: 80975 - DNA, 1104 bp, Homo sapiens
atcctctggttggagaaacagcactggattttaccagtgggacctctggcaagttggccactttgtgggaatttccagacctgaaactgcatctgcatagaaggaagttgaggtagatgaatctctatggccttcctttctctcctggttggttttccaggacccttcctcaccttttccactgtccatgtcttgggttttcctgtatttcttagttacgttgctgttttcagtaccctctgtgccctcttctctatctgtgggttgctttaagtgacattcagacagccagaggtccagaggccatttgacatagaggaattccatccttccaaagatctcttctcataagcaggagttttttgttttttaaacaaaacaaaatagttatcctgattggatccatgaggactagctcacttggctgtgcctcgggagaggtccagaatggctttcttggacttgaacgagctcagaagcattggcactttctcgtttacactggccttgattttgggtagagactgagcaggccgaagtcccctctctgaagccatcatgggatgatggtaaaaggcatctgcaatgttccagctctagcagggtcacaactgcactgagatgaacacaagggggcagcctttcccacagattttcatcaaatcacagagaaacagagtgcaatttcaatgtcagcgcatgcatgagcctgtgctctgtccacaccagtgcccatgtgtaaaacgtgtagcctgtaactgtttataaagggccttagggttaacggcatatgaatgctcagtagattttgtgctttactgtgctacagtttcgttaacacaacccaggacttctcattgtaggttatagactatatccccctgcctagcccagagtcttacacatggcaggcaggcaggttggcaggcagggcaggcagcaggtaggcaggcaggcaggcactttttattactggaggcttagagatgactgaatcattaatatagaggagttgaaattgatttagcctgctgtttcaacctgaagaatgacttcaaagcaggcatttaaatttattttggccctttttttcattctcttgcc

SEQ ID NO: 80976 - DNA, 1111 bp, Homo sapiens
ctttagaagtgaatacattggcttttcagtataaatctactggaattttaggtgaaagcaaaatactttcttggtctgaacatttcttattaaagaatatcagagtagtgatgttttaatgtgttcggattattcaactcccagagccaagatgatgttatcactggggattttttgtttagctcagatagtacactgaaactaactggttcttcctgccctcactgtgttctgggaggctcccaggtatgtcctggactgaaaaaggtgaggccatttgatgttaagagaagcagaaatattctgagtatctttctgttcttttctctgtgccatggtccagtcaacaggaggggagaacattgtcccaggcttttgtaaagccaagattaccccccagaagctgcttggagccggtttccagtctcctgagctaaggttgctgccaagggaaggcaagactcaattgcctctgcctaaagttgttattttgtatagtattctcataggtgtgctgtatagacttaagctccactactgctttccctcttttttaaaaaaattctcttattttctaccatttattttggcatttgtactcttccttgtgtttttctttgaatgttttacgttctataactctcatgtgcctggctaagcctttctagggcatgacccaggtaatgcataagcttgggtattcaggtttgtttttttcccgatgcataggtgttgtgccagcacagtatatcaaataaacttgcccctgcccctgcttccttccccgctgtttcactaccacgtttcccatacaactgtagtttgtttctggatgctgttttctattctgctgtatttgcaagcctgtattgtttgattttgagggtatcaataattcatttttgaatctggttctgtcacttttagctttaataattgggggctatttttaaacatttattctatataaacttgaaatgattttatctcctgcgatacattaaatgtctatgttaagacatcttatttacagaagtaaattatgaccactcttttactgtaaaggtaattatatagaaaaagctaagcaagttgccttcctagggctgat

SEQ ID NO: 80977 - DNA, 1038 bp, Homo sapiens
aagaatttaagtaggctactaaaaaaaataggaaaagagtacttttctgggggaaaagtactcttttgttctagtgaagttgatctgaaagacgtcgtccagcaatatatgtagaaaagaaatcagattcactgtctgttgctgaaactctgactttccctctccattcttattcagtgttgcaaagattcaaaactttttgatagcttttaagaggaagtttgaaatagcagaggtgatagagggaattagtttttctgagaaccaaggcaaaaggagtgaatccttaaaactcctgaattgtcaacattgatgttggagccccactccagattcgggttggagtgtgactccgcaagtagacattttggagaaggaggagtggctgatgcagaacctgtggcttaaagtaggaggagggagagagttttctactgggaggcatatgtattaatacaagcttacagacaaagtggagaaggaaacagtagtaaccatattgtcccagattcttctctgacaagccatatgcctgttcaacaaagccattagctgtgtggggtagattcagagtgaaagtttgagttctttttttttttttttttttttgcaagaagttattaactataaaaatgggcatatgttcttctaaaatgatattctgacaaaataatggttcacaaatacaaagcagcccacacaattgcagtataatttgttttattaaaataaaaggatatatttattcttttaagatatcgtttacaaggaaaatcctcaactgaacctccagaattatgttaagagcagtaggggttgcaagcacgtagattcttccctggaacacaatatattatggtcttttaaaaaacacttggcctttttctggttttatacatagagtgaggagagttagttatctttgcttagggaagaaagtccccctctcctttgtagatgagcacagagcttttaccttcctaacacccagacctgctgatttagagaggactaactgcaaattccctaaggactggg

SEQ ID NO: 80978 - DNA, 1042 bp, Homo sapiens
ctttatgctcataggtaatcagattgactatccagtttatttgtaatggagaccagtgttaatactgattatattcatgacaataattaacatcagttagagcttactatgtgctagaaattatactaaatattcggaagtgattatcttctttattccctgccaaatgagatacatacatttcacagatgggaaaattgacacaaagattaagtaactttccttgatcccataataatatttattaagatgggatatttacttctgtatctgtagttatttaatatgtttccatattacttgagtttttttccttttctcttgatgtcttattgatgacttgttacattgtatctttccttctgcccttaaataacccattctttatatactacaattcttctaatatattatgtatcatctttaagtcttggttcctgcttatcatagatgactttatattttaattttctaattgagatttggtttgtttttttctcaaaggaaatcatttatggtctgaatcttagtataatttggaatgaatttcttttatttgatatgctatattctctttatcatatttttatgtgtactctaattcaatgctttgcgactagtggattacagttgccttttacagatgtgacaagccactgatttctttagctcttgaagctgctgagcaggttatgggaaggtgggagtccccttgtctatcacccagatcagattgttagcatacaggttgataaaatgcttattttacaacttaagatgtgtctgttaattctcattttcactgtctgaagtaactggcaatgactatataagttcttttgaacacatagattaatacagcttcataatctaataactgtttatctactaataagcccattgctgccatagatattgtataagaacaaaggattatttgatgggaattctcttcccctccatcttcaaagagtatattcctcttttactcttaaatgacatttaacaatgtagaggccagataattagggaagatgaaatg

SEQ ID NO: 80979 - DNA, 1047 bp, Homo sapiens
gcgagactccacctcagaaaaaagaaaaaaattaggaacaggtaaaataactcctgccctgcattggcaggagaaaggtcagtggtatttgcagacataagtgagcttgtagattgggatgtggggcacttgaaggaaatctgagtaataggttccattttctctctgaggtaggacataagattactgcctatttgggagtgaaagtagagttgaggattaggagttgggaagagggcctgaagagggtagtgcacatttcagacagccgatgtgagagatgggcaaggcagtggactaaggttacaaactaggattgtggggttggaaatcatgagtactttgtgatactaggcctcagcactgagaaacaaattaaggatatgacacattaacatttacattaaactaataataataatcacaaaataaccttccaaaaaccttataatttagttatgctgagtttaggaagaatggatacatctaagttattcactgattatgaatgtcacctccattcatgtatgcttaatgagcccaaactgactaatgattctagccctaacacaggttaaacagtgtttctcctgccgtgagcatgctgagcatctgaatgacgctctgccatttcaccatctctcctagattaatgcgctcacagggactctttttacttctaaagtcctagaagaaagagcagagagggagactgaatcccaagtgaatccaaattctgaacaaggagagcaagtatatgactggagcactggcttggaggacacagatgattctcacctttacttctctccagaacagggaaatgtggtgtttaccagtgcaatagatgggtggggctttgggtaagtctgtttgcatctgattaaatctctttgcagattttatatgcagttgattgtttttagtgaaacttttattttgagataattatagattcacctatagttgtaagagataatgcagagagttctctggtgccctttacccagtaactgcctcctatccatgataacatcttgtagaact

SEQ ID NO: 80980 - DNA, 1950 bp, Homo sapiens
tgattgagcagattcatacactgctctttgacaaactgtagggaagaacttggccaactgctttgttggccctttgaacagctcttactgtcaggcccttaggcattgatttctttcagtttcaatttcctaacctgtaaaaggagaatagtaatatgtatctcatagggatattgtaaggattcaataatatgtgattagcacattaaaagtgagtatcatagtggctggctcccaataagctcttaagtggtaactattagaataataaagtcctttaacattttatatagatgctatttggaatcagtagtcccatcagtgggaaaagttggaatggtagctctggattgagctttcaactcctttagctttgttcagttttttcttagaagctttcagctttcttattctagaacgcctgaggaagaacattgtgtacctggacaactgaaaatgtgtgtttacaaattgtattttaggtaatgaggagtacctgatcaatctgatagactctccaggacacgtggacttttcctcagaagtatcaaccgctgttcgcatttgtgatggatgcatcattgtggtagatgctgtggaaggagtctgtccacaggtaatggattgtgatgagaaaatacttaaatggttaagggtgaggaaagagggggaactgactgactttaggcatttcactgacaatcacaacattggttttatatttcacatttggtaacgttccagtctgtgaaggagttaaatcaccagagttctgaagggatcttagagatgatgactttaatttaacatactttgtttttgtttttgtttgttttgagacagagtcttgctctgtcacccaggctttagtgcagtggcatgatcttggcttactgcaacctccgcctcctgggttcaagtgattttcatgcttcaacctccagagtaactgggattacaggcatgtgccaccatgcctggctaatttctgtacttttaatacagacgggattttgccatgttggccaggctagtcttgaattcctggcctcaagcagtccacctgcctcagcctcccagagtgctgagatacaggtgtgacccaccatgcccggccttatttatccttcttaactgtcagttgcataaaggcaacaatgatttcttatgtgtagttctttgctactccgctgtatacatagtttgtgaatgcctaatgaatacctttgtctgactggcatagtctagagtggttattaatcacgattttctaatgtgctctaattatttcaaatcatgagttttacatttttctttctgtttttatcagacacaggcagttctgcgacaagcttggcttgaaaacatccgtccggttttagtgattaataagattgatcgcttgatagtggaactgaaattcaccccacaagaggcctattctcacctcaagaatattttagaacaggtattttaatttttagtatttaaaaaatttagccacgaagaagagttgtaaggaagttactgagctgggtatgagccgttgctacagaaaagggaacttttccacttcagattcatacgtgttgctgttattctacaagagaggcaatagaaaaagcatgttctcagtagtcttttccatctcttggaatcacccatcatataaagcttggacaataggctctcttgtttaaaactgtatcttggttccaaagtgaagccatattaggattttattacctgtctgtagtattttattacctgtcgttacaggaaattttacccaagcattcattcatttatttattcagcaaatatttcatagatatatgttgaataaatgaattatcaaatgtccattgtgcactagggattgtgaatataagatgaacaggtcagaatccctattttcaaggagctcacagtatagtaggggagacaaag

SEQ ID NO: 80981 - DNA, 1078 bp, Homo sapiens
gcagatgcatgccaccgtgcccggctaatttttgtatttttagtagaggcggggtttcaccatgttggccaggctggtcttgaactcctgaccgcaggtgatccgcccgcctcggtgtcccaaagtgctgggattacagtcgggagccaccgcgcccagccaggtatgctttcttgattgcatagaccagagacttaagctagcttgggttggggtgggatagattattgaaagcatatgtgtgaaatgatattggaaataatattcatgaaaacggaaaaacaggagtcttattggagtgatgtctcataaaaattggagccagatttttattctggatccaagatagctctagagaccgtatcagtaaaagtttatggatccttcctctggaactccactgttgtccttggatttgggtgtctgtttgtatttccactattatcctgtatgtcttttctctgtctcatagcttttgcctactgtcatgtcttcatctttgtacattcaccttgccctgacttcttaccctattatcctgtctgttttcaccttatttctgttgcctactgcttcaatctcttgtgtttctgagcacacaggctcaagagcaggatgcggctctgcttatcttttcatgccagcccatcacagaggttgcacctatggattggctgcgcttgggttggttagtcacctcctaatccaatcagtggtgatcggagtggagtcacaaagtgtcaaacatgtttcttgtgagcatgggattactgcctagaagggaatttgggccgagcagtcatcacacttgacagtgcagagccttatggggatagaagttaggaatgttgactgggacatatcctctcagagcacttgagagatgagatatgtttttatctgtatcttagtactgattctccagaatggggtatttcctgttctgaaggtgggacgtctgaaggggaacctagatgggagaaaaagagggaaacctgatgattgaagaaactccacaggtgacttttatttataccatgccttcccctccttctcacccacttcgaatgccctctta

SEQ ID NO: 80982 - DNA, 1035 bp, Homo sapiens
cagctaacaaatacaaagagtgaaccctaatgtaaactatggactttaattaatcataatgcatcaatattggttcatcagttgtaacaaaggtatcacaccatatgctaatacaagatagatataataggggaaactgtgtgggtgggaggagagagtatgtgggaaccttcagtcaatttttctgtaaacttaaaggtgctctaaaaatataaagttattaatttaaacaattactagcaatatagacaatttttgattctcttgactaggaaacttttttgttttgtttttcattgacattgttgaggaacatttgacacttttgacctggtaatgttcctaatgtggctcactgtactttggacatatagaaagcatagtatatataaataaatatttttgaatgaatgactttaaagaagagtaacacaactgacaaaacaccagcaagatgatcaagaagaaaagagaggaggcagaaatatgtgatacccagaaagaaaaatgctgcagaagttaataaggtaataataggatataatgaacaactctgtgccagtaaacttaaaagtgctaaaatggaaaaatgtctggaaaacataacttgctaaaatggagtcaagaagaaataggaaacttgaattattctatagtcatttaagaaattgaattggctggcaaaaatctttccataaagtaaagacccagatggtttaactctctagttctgccaaacattcaaagaataatttcagtcctacttaaaccatttcaaaatatagcagagaaaaacccaacaatcggcagtattctccaaatcatatgaagatagcataactttgataccaaaagtctgttaaggatagtacaatataggagaattatataccaaccttatgattatggatgcaaaaattatcatcctcattaacaaacaattcagcatagtataaaaagatgattattcatatccaaatcgagtttatcccaaggaattcaagattggtttaacatgtaatttcactatattaa

SEQ ID NO: 80983 - DNA, 1035 bp, Homo sapiens
gggttgacaaatggtggggtaacagaaaggaactggctaccgttcggactatttgtagtcatgtacagaacatgatcaagggtgttacactgggcttccgttacaagatgaggtctgtgtatgctcacttccccatcaacgttgttatccaggagaatgggtctcttgttgaaatccgaaatttcttgggtgaaaaatacatccgcagggttcggatgagaccaggtgttgcttgttcagtatctcaagcccagaaagatgaattaatccttgaaggaaatgacattgagcttgtttcaaattcagcggctttgattcagcaagccacaacagttaaaaacaaggatatcaggaaatttttggatggtatctatgtctctgaaaaaggaactgttcagcaggctgatgaataagatctaagagttacctggctacagaaagaagatgccagatgacacttaagacctacttgtgatatttaaatgatgcaataaaagacctattgatttggaaaaaaaaaaaaaaaagatttttgttcaagcacaatatagctagactagtgtcatatactcaatgaaacaaatatttaccaagcatttattgagtggaagataaaaagcacaaagcataattataaaatattttcccctgccaccataaagaaattgaacaggcttacagaatatagcataagacaacatgaccaaagcaaaaatagtaaggactaaagaggggaggaaggggaaatatcaacatgaactgaatatgacccagaagagccttcatggatggtcagacatgtaaagacaaattgggtagggttaaggggtggagttcagggcacattctatagggaaacagcagctgatacagaagcctgaaaggaaaagcaggcagagcacctggacagggctcttcaggaacgagcacgcacctgtgtgaaaaacaacttaatgaggtcccattcacccaaacattagagaaaccgcataaaaatgcttcttggtaagcaagaagaaggcagtgcctggcttg

SEQ ID NO: 80984 - DNA, 1073 bp, Homo sapiens
gctgtttccctatagaatgtgccctgaactccaccccttaaccctacccaatttgtctttacatgtctgaccatccatgaaggctcttctgggtcatattcagttcatgttgatatttccccttcctcccctctttagtccttactatttttgctttggtcatgttgtcttatgctatattctgtaagcctgttcaatttctttatggtggcaggggaaaatattttataattatgctttgtgctttttatcttccactcaataaatgcttggtaaatatttgtttcattgagtatatgacactagtctagctatattgtgcttgaacaaaaatcttttttttttttttttccaaatcaataggtcttttattgcatcatttaaatatcacaagtaggtcttaagtgtcatctggcatcttctttctgtagccaggtaactcttagatcttattcatcagcctgctgaacagttcctttttcagagacatagataccatccaaaaatttcctgatatccttgtttttaactgttgtggcttgctgaatcaaagccgctgaatttgaaacaagctcaatgtcatttccttcaaggattaattcatctttctgggcttgagatactgaacaagcaacacctggtctcatccgaaccctgcggatgtatttttcacccaagaaatttcggatttcaacaagagacccattctcctggataacaacgttgatggggaagtgagcatacacagacctcatcttgtaacggaagcccagtgtaacacccttgatcatgttctgtacatgactacaaatagtccgaacggtagccagttcctttctgttaccccaccatttgtcaacccggagcctcttttttttctttccaagaaggctgagttctacattgatgtgattgaagtccctccgcagggttcctctggggcccttcacgataactgtgcgtcccttcagagtaatgtcgacattttctggaatgtcgacagtctgattgctgagaatagtcttcattctcgcagtagacgcagcaaagaaagcgaacaaaaatcttaactg

SEQ ID NO: 80985 - DNA, 1030 bp, Homo sapiens
aactttctgcaatacacagtacagctgcctataacaaagaatgtccagcccaggatgtctacgttgccaagattgagaaacggtgttttagagtgattgataggaaggggttgtgaaaacagatacaaatggcatggtacattgggtaaaagtcatagagttgtaaatggggataccacatggtcaggtgtgtgttgaaggaagatcactctggaaaagtgggaggcattgagaaccctgttggctcttaaagggtccttcaggtcgcctctggacccccttgagagtgctgtggctctaggggcctgtgttttcttctggggtccactcacagatctcaccagtaactgctcactgaatccattttctcgttccaggacttcggcagtctgtccaaccttcaggtcactcagcctacagttgggatgaatttcaaaacgcctcggggacctgtttgaattttttctgtagtgctgtattattttcaataaatctgggacaacagccttgcctgtgtcatctttgcagttgtgtgtgggtagaggaaaggcaggagctctcgaggcaacagatcagctggcacttgtctgggattcaggtgctgctgcatctggtttatggggagtgggttcaccagagtttagtaaaggagcaagggcaagcctgaacgtgttgagagtggtctgcagtatgagcctggaaagctgctttggcagctccaccctgcttccctgggtcttcagcccctgctgggtacatacaatttgggccaacttgcccatgttcagaaggtagcaacaggattatcgtgtatcagaggttgactttctttcagtgggagttaggatgaatggtgtctttgtgtccaatgttgagcccaatgcctagaacataggagatctcaacaaatgtgaataaatgtgtatgggaggattgatactgggatgcttcagcctaaccggaggcagagctcaccagctgcaacctgggtagactaccctggactctgagctttatttaggctctctgt

SEQ ID NO: 80986 - DNA, 1738 bp, Homo sapiens
ccggcgcccggcactgtttagccgggccctctccggctcagcgcagccggcggtccccaaccacaccggccggggctcggcgccgcactcttcccagaaggttgcgctggctcgtgagtgatcctgtcctctccacccgcagggccgcgttcgcaccaaaaccgtgaagaaggcggcccgggtcatcatagaaaagtactacacgcgcctgggcaacgacttccacacgaacaagcgcgtgtgcgaggagatcgccattatccccagcaaaaagctccgcaacaagatagcagggtgagtcgggccttcctcggcctccggggctccgcgatctgtttgtgtgctctgccgccctccgactcgggaagagacggtgccttggtggtttcgttagcctgagactccctggtgtcccggagaagggctagagctctgcgtgtgcaggatttctgttgtgaacttaggcctgtgtcatgactggccgcggtgaccctgggtcgaaggtagccaccgtcagacctcttgctttgaagctacgttgcttttagttgtcaacttttttctttcttttttttcttttttttttgagacggaatcttgccctggcgcccaggctagagtgcagtggcgccatctcggctcactgcaacctccgtctcccgggttcaagcgattgtcatgcctcagccttcccagtagctgggattagaggcacgtgctaccacactcggctaatttttgtatttttagtagacaacagggtttcacaatgttgaccaggctggtctcgaacacctgacctcaagcgatccgcccgcctcggcctcccaaattgctgggattacaggcgtgagccacctcgcccggctggatgtcaacttctaatgcttacttcacagttgcagttactgttcgagagatttataggcatatggcctggaagaatagtgccaaagtcaacgtattaattgccaagttatgtgaatttgaaattggaagaaaatgaaggctgtgaagggtcgtgaaactgcggggcggggcggggcgagttgggggtggggcgcttgatcatcatgaaggagagtttgaatagagagtgagaaaccaaggggaaggaatgctcaggccagtggaggttctatgtgtaggaggtcccaggatagtgagtcctcttccttctcactgtggaaaagaactaaagcgggtatttatatatgcacatgtgctcagtaccaggtgggagttgatttgtcttctcactgttctctttggctgtgtgtgctttgtagttatgtcacgcatctgatgaagcgaattcagagaggcccagtaagaggtatctccatcaagctgcaggaggaggagagagaaaggagagacaattatgttcctgaggtaaactttctggatatttgggcttctggctaatcctcaaatgataaagctatgggttcttggcttccaaagggacctcagctgaatctgagacctttaatccatacattccataaccagctgtgggtgcccataggccccctaccagtttcttagcctccattctgctcttctggaaccagttaagtctattccatatttcatgagagcccttaatgttgatttgatgactgctgtcgtggctcgattgtttgcccctaatatagtattctttggtgtaaacacagacttcaagtgttctgaatactgaatgagggcatgggaaggtaaggccagaagaaca

SEQ ID NO: 80987 - DNA, 2751 bp, Homo sapiens
tcctcctttacatctgaacttctggacgactttgatatttgcatctgggctgtacccacaggtgtcagcgacaggcagaaagcagcgaggtggctttctattgaatgttcctgggtgatggaatgtggatctggatgtgtttggcagtgcttctcaaaccttaattacagacacatcacctgaggatcttagattctgattcagtgggtttggggcggaccctgagattccatgtgtccaacaagtatccaagtggtgtcaatgctgctagtcagtatcatcctttgacaggtgttaggggaagtttgggacctcttaggacaccagcagcagtccttccatgcttagtgggtgctttttaaattttgtttaaaaatttgttgcagtgatgccattgatcagatttggagtctctgaatatggttaaactgaggctctcaagtgagagtttgaagttaagtttgaattgttagttaaagcctgagaccaagtatctctctgatcagcctcatctacgaggcttttatggatctggatctttcacagataatctccatagtcagataattgctcagagattagtggcttgcctgacgttacacagcaaccaagagatgggactagactgagaaacccagtcacctctcctcacttaatgggaagaaagcaggatgttgcctagcattagaatttttagtcagtatccttatacattctccacgttagcagccatgtgatacaactactctgtaggaggtgagaagggcaggggaataggagagcagctgtcatggttagaggggataagagaaactagcatggtctctgcacacactacgagcccaacatgtttaagtaaggggacctgtaacaaggatggtgggtttgccatagttaatcaggcttctgtgttggggtgagagcattcctagggaccatttcttctaacccacagaggccatcgggagtctcccacccttctccaaacagaacaagcagctcgtgcaacagctcctgtgtctggtgctgacacaggcatggcatcctcctttttgttcccccaacccaggtctgcttcaaatacttctgccggagctgctggcactggcggcacagcatggagggcctgcgccaccacagccccctgatgcggaaccagaagaaccgagattccagctagaggagctggccttgcccagtggcctgtggcgcccaaagctggcaggtcaggcaagcagcctgcaccaccctgccactggcgaccagggagctggcttcccaaggacaagggaaaattgtagtcacctttgcacttgctgaatctgtctttgtttctgcactaattaatgcacattgagttttgtcaggttttgttttcagggggtgtaccaagggcaaggaccctctggcttaccctccaagcgactctgtagttttcccagattttagttcctcattttgcagatgaaaagcggggaaaaaaaaaaaaaaaaaaaaaactacgtgtccagaaggtattgaggtattgacacggatgcctacacctaggtttatttattaaaagcgcttttttacattccttgcaatactgatggtgatgatgcgcaggtctcattggtttcattcttgcagttgccatacagtgcctttccatttatttaacccccacctgaacggcataaactgagtgttcagctggtgttttttactgtaaacaataaggagactttgctcttcatttaaaccaaaatcatatttcatattttacgctcgagggtttttaccggttcctttttacactccttaaaacagtttttaagtcgtttggaacaagatattttttctttcctggcagcttttaacattatagcaaatttgtgtctgggggactgctggtcactgtttctcacagttgcaaatcaaggcatttgcaaccaagaaaaaaaaaattttttgttttatttgaaactggaccggataaacggtgtttgagcggctgctgtatatagttttaaatggtttattgcacctccttaagttgcacttatgtgggggggtggggttgatagaagtttttaatcacaaagtcacaggacttttttcttttgtaactgagctaaaaagggctgcttttcggtgggggcagatgaaggctcacaggagccctttctcttagagggggcaagtacccttcccttatatctttaatttgaggaatgtatgagataacagttgcagttgactgaaatgccactggaatttgaaaacttgacttttttttctttcctttttttttttttttttttttttaaaaagaaacaaaaaacccacaaaaactacttgcccctcctagggaagctgtgtgccaaagaaccagtgtcataacccctccctcctgctgagctgacgttgcattgttgcatatcccagctactctgtgggttttgtgaagctgtgtgtgaagtctctacctcattgtagtatatgcaggcaagactgcactctcctacagatgtgtggagtaagctgtggtgtagtttttttggcacataataaacacgttgcagcagagttctggttttgtctctgtgtttgaggtctgggagcaaggggctaacgggagggagtaagggggtaatggcacagccacagcttgtttccttggatttctgtgatggagatcctggcccaggataatggtgggaccatgtgggagacctgccctgtgagtacttcttggtcccttccatc

SEQ ID NO: 80988 - DNA, 1125 bp, Homo sapiens
ggtgagttggctggtttatgcccttactctggggtatatgagaggggtttgggcagttactacccagggcaggcctgagacctgaagctgtttgtgctgggtgtgtttagggaagtgagccaaattcctgagaattaacattgaggttagggtttgggagtgggcttggtctttgtacgcccaggaggaagggaactgggactgttgagcctcttcagtgtgtagggtgccttccctcactgtggtatttctttggcattgctcagtagcctgacttcctattttccaaccttttgggaatcctccgaacacttgcctatactgctaattgatagagggctgaggtacagtttgcctagaagaccaggcattaaggtgtgtggttgcctgaatcccagaggcatccagcctgactgtgcatggtgtatgagtctgtcctctagaactcctttctgtacttcaggcccataattctctccaagcctcctttaaaacaggcaaatatcctgcattccaatatcccgcattcctgtgtgtggccaataatgtgcccttcttctatcgcctatcgagcctcctggtaagaagagccacttcatcatcttattttgcctttgtgcaggttcagattgacccctacctagaagattctctgtgtcatatctgcagttctcagcctggtcctttcttctgtcgagatcaggtgggtccgatgtctatgaagtccctgccctctattaaaaattgttggctgggcgcggtggttcacacctgtaatcccagcactttgggatgccaaggtgggcggatcaggaggaccagcctggccaacatggtgaaaccccgtctctattaaaaatacaacaattagcctggcgtggtggcaggcgcctgtaatcccagctacttgggaggctgaggcaggcgaatagcttgaacccaggaggcggaggttgcagtgagtcgagatcacgccactgcacttcagcctgggacagagcgagactccgtgtcaaaaaaaaaaaattgttatgccaagttcatgacattgaatgttggagttctgaggtaccctgtggtgtctgagagcatagaggaggcagcagtaatgtttgctgaaggtca

SEQ ID NO: 80989 - DNA, 1029 bp, Homo sapiens
aaagatccccaggtggttctagtgggtagtgtttgagaaccacttgtcaaagcaagttttgagctcaggaatcagtgcggtggtaaaatcggatttgagagcacacaacttttgtgacattggactagatatttaatatctctgaaactttgtttcctcttctcttctataagatgggaaactaaaatgcctattttagtaaaaaagatcagtggttgccaggggtttagcaggaagggatgaagagacatagcacagaggatttttagggcagtgaaactattctgtatatggtggatacatgtcattatactttggtccaaacccatagaaggtaaaagaaacaccaggattgaactctgatgcaaaccatggactttcggtggggatgatgggtcagtataaaaaaatgttccactctcatgcgggatcctgatagtggggaagtcacgcaagtgtgggggcagagagtatttggagaatccctgtactttctgctcagatttactgtaaaccttaaagcttctctaaaaaaatctatagggtaagaggagaaatgcctattttattgggatggtcacattagatttaaaataaatccatgtaacaaagctggctcttgttctgtgttagagagagggcaggctcatcctctggctgcccacagtgacccacagcttccctaccttctctgcttctttattctctggagcttgtgtagtcttcccaccttagtatgttctaggacttaattaacatgctcctttttcctcccctcctgctttcacaaccagagatggccatatgcatatcacagagcccttccccttcctcctcagtgcccctgtagacaccatcctgtctcccattccctcccatcaccttacagggatttaatctttctttgattcactggctataggctgatgcagttctccttcctctctacttttctttttcctttgtgttcctctccccgccagcaccaacatagccaatatagccaatctttgactcccttcttctttt

SEQ ID NO: 80990 - DNA, 1037 bp, Homo sapiens
ccatctactcttgcaaggtgtttctaggaggtgttccttgggatattacagaaggtgagctgtctctaagacctgctttaagagttgaagggtggggcatgtctttcaggagcatgaaacttggaattgaggccaggggctgaatgccctgcctgagctcagggtattacatgagtgtctgaggggagaggtgcatttcatagacccccatagtgctccttatgtcgggagcttacaccggagatcagcattcgtttctgagttgtttgtcagtggggatgagccagggaggagaatgctggtgattctgtgtttgtgtctttactgggaaagatggttcctcagcttctgccattcttttctgtctctttgcagctggattagttaacaccttccgtgtttttggctctttgagtgtggagtggcctggtaaggatggcaagcatccccggtgtcctcccaaaggtaatatgcctaaaggtaataaagacatggtaggagcttttttttcccttccctagtacataactgcacctaggggtgctgggatgtcacagctgcatgttggtaacatggtgggcactccagggcacagacctgccatctgtcagcactttctcttcaacctaacatgtccctctgtttcttctgagctaatgttccatctgtccagacttacacagcagtgggagttgcctctgaaaccccttccttgtacacttctctctaaacctgaacccaagcagcacctttcctctcaaaataaggcgtttgaaaagctttcccttgcctgcctgtcctgcccagttacgttgttgcctgacctaattctgaagtccctttggagttggcaggaatgaggaccaagcatctgattcctcactggtctgaaatgagatcccttccctgtagaaaggagcaggtgctattttcaccctgccccatcttcattgaactgaactaatggtttaagtaggtgtttaaagcaatacctgccatctttcctgccaccaggaaagcctggctctgctgacctg

SEQ ID NO: 80991 - DNA, 1032 bp, Homo sapiens
ctgtggcctccaccctgtttggcgcaggtctttttttagaatgctttgcagagcctgggcccgttgtgtctgttaggcattttaatgcccagttgttttggtaaaaccccatttaggagaggggtattgaaattgttttatgtggatgtggatggggagagctttaccttaagtaactatctctgggttaagatagggtttcttgaagtactggccttctgctgactcaggtttttccagaaaggtcagcaactaccctgttcccctgggcaaggaagtatggtatcactgtttggtattctatgcctggagaccacggtactttgttttgtgtgttcttgacgccaaccttgggggcctatgaagccagcctcccctgtcctcacttccaccgtatctgagcaaaagatagaagaactcacacaggagatgggcacctgtctgtgggtgatcagtgtttgaccaaggcactgtctttcattggcatcaggttgaagtatagcccttctttggctctcattctctaagctacaatgctctttctgaaatacattataacattgggcccatagaaatgcaggtgtgccccactgggggcttggagagcttggtctgaaagttactatgaaattgagctattaaaagtagcttggatctagtcataatatccacagcttctccaccacctgaaaggcctgtgcttgtagctgtttgtctctgaaatagaaatggtttttcttttccactttccatcccaagcactttagtgataaatattacatgattttgtcgaccagggagggactgcagcctgagcctcagaattcataaggaccagaaccagagttgccccagcagtatgatctggctgtgtaggcaggttagtgtgggtatgttttcctttctgagggttgaggacacacccatccctaatcgtcatgttgcctttggttttggagctgtggtgacagccattgctcttctttccctgggctctgggccttcttggaaagcccacatgagggtactacc

SEQ ID NO: 80992 - DNA, 1047 bp, Homo sapiens
taaccccactgtagttgaggaacatctgtatattaattttgtgggtatcactttttagcgctgttgagtcttccagtacatgaacatggtttatgatttttttttttttttttttttttttttttgagaccgagtctagctctgttgcccaggctggagtgcagtggcacgatcttggctcactgcaacctctccccttcctgggctcaagcaattctcctgcctcagcctcctaagtagctgggactgcaggcgtgtgccactgtgcctggctaatgttttttgtatttttagtagagacaggttttcaccacgttggccagactggtcttgagctcctgacctcaagcgatctgcctgcctcagcctcccaaagtgctgggattacagacttgagccactgcacctggcctcaaatattttctttaatcctcacaaaacacctaaaagatggctactgttgcatctttaaagaagaaaagattctcagaaagacacagtggcagacctggtgagcagagcaaggtctgtcagtcatctaaagctgttgatttttccagcctgccacactaatggttttaacaggtatggcctgcattgagttggagctagtgaagaaatcctacaatggtagtgaaaatctttatctagaagaaacaacagattgaggaatgtctggataaggaggaaggtgaggtctgtggtgggggttgtaggggtgagggtagaattatactgtgtgtagaactccaagctcctggatgcatgtagccatttggtcttaaatgggtttaacagacctgttgctcaggcctggggtctttcagcttggggtgggaagattgtgttagttgtacacatcagtactgttcaaacttttgagatgggaactactttgtcgcccaggctggagtacagtggtgcagtcatggctttcactgctgccttgaactcctgggctcaagcaatcttcccaaagttctgggattataggcatgagccaccacacccgactgctcaaactttttttgcatacatatatattaa

SEQ ID NO: 80993 - DNA, 1041 bp, Homo sapiens
attttttaacctatcatattggcagaacttaaagttgaatagtaccagtgttggtaacagtgttcacaaatgcataggaaatggtacaaaaggaatatctcaaactgttcattcagagaagagagtaggattgaggacaaggaacgctgccgagatgtgaaagtgatcatcttttacttattacttgcatgctattttaaaaaacaaaatggaattttacaatataattgtataaagggcatggtgggggaagggctcgggttttgaatgagatgagtgcttagcttggtcaaattgcttcacctgttttgtgccatggctttaatgcttgtaaaagggatataatgcctgtcttctccatggggttgttttgaggaatgtggtgatagttgtaagttgcctagttcttcctggacttcaaaaataagttttctgctctttttctcccttgaaaagtgagaatgtgatgtttcatttaaattttgaaagtcttattctgcatggtaccacccccatctgctggaatgtccagactttgccgctgaaagcttaactgttggttgtgtcttgatcacagtctgtattacttccactttggagaatgtggtctagtttccaaacgtagatatgttgcatcattttgtctggagaataaatgagtacatttatgggggtagagggaactatgcagagatcagcacttaaggcttctggaattagtactggggggagggtcttcctactgtgaaataaagggcttccgctaaatgccctccaaagtcactcttatttttaatgttttgtggcttatttaaatttatgatcctaatatcattttgtcattgaactcctgatgtcaaatttgaaatctaatatgggcttttatctgcaaaaactactcaagtttatttaggggatgttgtcaccttacccagtttaatagcttgcattttttttcttgttacaatgtgttcactgtaaaaaaaaaaaaaaaaaaaagcaaattaggaaaaaaaaattatgtcatcttactactgagaa

SEQ ID NO: 80994 - DNA, 1061 bp, Homo sapiens
cttgtccagaccttcttgttgtacaaccaaaagactggcagctggtgtttaccttttcccttaaggcccagaggttagcagctttatagataaaggcaatcctaatcataaacctgactatatttgtagaaaactagtagagttagcctacccctttttgccttaaatcctggtgcttgattctcttccttaatagtatcctttgtggaaatttttccacaaattggccaagaatattttggtatttttttcttacagttccgagtacttagctcatagtaaacactcattaagtgttttaatgtataaagaagatacttaagtccttcctactttatctaattcgtaatgtggagagaaagggggtcataaaggagtgtagaaaacctaaatatctttttttttctgtgtctaggaagaagaagcaggaaggataaaagattgctgggacaaccaggaagcacctgctctctccacgtgtagtaatgccaatatctttcgaaggataaatgccatattggataattctctggatttcagtagagtctgcactacacctataaaccgaggaattcatgatcatttgccaggtgatttaggtttgaaaacttgaacgtggtaggcatctgtacagatctgcttctaagtagtgcatgtaagaggtcttccttggaaagcttgtgaagaacaatgttgagttgctggcaatacttgcctttttgtggtttagtttatggattgaatccctctctgggtgaagactgcctttgattaggatgtgtaaacctactttatgatacacagaaaggttggggaaaaaagaaaaggtcacagattacacaagtatttatataaagagatataatgtggatcacatatgttacagattttctggtagccatgttaaaattaagatacagatgaaattaatattttatttaacccaatatattataatatgacaacatttaatatgaaaactattaatgagattttttttattagtactacgacttcaaaatccagtgtggattttacaagcatatctcaacatggacatt

SEQ ID NO: 80995 - DNA, 1053 bp, Homo sapiens
ccacactggaccacttttgataatgcctctctactctcttgtgttctttagaacttcctctttacccccatttccaggcacattctgtccctccaggccaccttggcttggaggacaatgtacatttacagcacgttgtagtctgtgttgtggatgtttacaggatcgggtcttagttctttttctttctttttttttttgagacagggtcttgctctgtcacccatgctggagtgtggtggcacaatctctgctcactgcaacctctgcctcctgggttcaagcattcctcctacctcagcttcctgagtagctgggactacaggcatgtaccaccatacctgtctaatgttttgtattttttgtagaaacagggtttcgccatgttgcccaggctggttttgagctcctgcctgccaaaagttcttttccagacttcaaaactttattttggtttagtctgtgtctaatctgctgccccttggggtgctcactatagagagcaggcagtcggctaatgtttattaggcagtgaagaatgaagcatgtagccttaagataatgcagattgtgctaggcaatggcacgtgcctgtagtctcagctactcaggaggccaaggtgggaggagcacttgagcccaggagtttcaagttcagcctgggcaacacagcgagacctcctctctgcaggttataaatctttgcatcttagccttcatgaagttgccttcctgaaattgagaatcagcttagaaatctacagttgtgaaaagggccttgtgtgtcactggatttaacagttctcaatggcaccactctagagagcttgggaaaacaaccttgtaggattgtgtattttggtcgtcttcacagtttgcagagggtaccaatcttcaagaacttgaggctgacgtgaggctcaagtttgtccctttaaggtcatcctgcagagttggtaaaactgtaaatgctcttggtcattctcatgctcacttggattttagtaggccaaacaaaatgacattgggcctcttcttgttttgttttgatgt

SEQ ID NO: 80996 - DNA, 1018 bp, Homo sapiens
ccagcactttgggaggcccaggcgggcagatcacctgaggtcagaagttcaagaccagcctggccaacaaggtgaattcccgtctctcctaaaaatacaaaaattagccgggcatggtggtgggcgcctataatcgaagctacttgggaggctgaggcaggagaatcgcttaaacccaggaagtggaagttgcagtgagccgagatcagccactgcactccagcctgaacgacagagcgagacttcgtctcaaaaaacaaaacaaaacttggtttcccccctccgaaccgtttgtcttgtaaacaactccctggtctaggctcccatgtgtgggagggaggttgtgccagcctgtgcagcacatcagaggttggagagctgatgcctgtggtgaataatcatggaaccgtttgcagtttgggttaggccataggcgtttgatacaggaatggttctatgtgcttttctttcgctgtagtgcacaaaccagtgcccatgaagtaaaaagtggaggaggaagataaagtagtaagactccaggctcagcaccaaacttaactagtgaccaaatgataatagctgccttaataagcattttcactgagcacaaccattagttttattcttagtctttaaaatgggttgcaaactcaaaccctataggggccagaggtaacataaatgagcaaaggaggaggaaagaaaggtaatggcttctgaactacagagtatgtgcctctttgaaaggagcagccactagctgattgttgctcagcaaaaatgtgggcccagagtcggtggatctttgacttgcttctaaactggctatctctattttgatggatctcctgacttttaaatgtagcattaaaaaaattttaaacactatagaccaaatgtaacatgtctttaatgttggattcaacctgaaggctagtttggaatctgtcttaaaacatccgttttggatttccccgctgttttgcagaaaaggaaacaggctttagaaatcaagtca

SEQ ID NO: 80997 - DNA, 1017 bp, Homo sapiens
gatcacagagaaactcatgctgccagacacctgtcggagtgaccacattgtggtgcagaaagtgactgccactgccaacctgggtcgtgttccttgtgggacatctgatgagtacaggtactaggccaccagtagaggggaaatgatgagcatgggggccctggtttgaaggaggagccccagctgctgatccccttccaaacacagtcacccttagcagctcttcctcaccccttctattcccacctcaggtttgcagggaggacactgactggtggaagcctcgttctgctgaccctggatgcccggccagctggagctgcccagctgactgtcaacagcgagaaaatggtgattggcaccatgctggtaaaggatgtgatacaggctctgacccagtgacttccaaatgctgtgacctgtttggctcccatctatacctccccatgacacctaggctgtcagtctctctcatctttctctctctctctcatcatcctcctcatgccagatagcattcagggtgtcctctctccctctggaggaccaagccctcccctaatgccctccccatggattccttagtgatctgtgcagagagagatggcagccactcccttcagtcctcccagatttctgtagctatttatgtagcaggctcaataaaatgtcttctctctagctgctggctcacctttccttctaggggtttgtcaggaacaactcttgttgaatccccaaggtaaccatctctgggtcaggatgcctaggagtctgcaggcatctctgtggaagagacatctgggctggggtggcaaggcagagctggaagagcaccttggtcctttttatagcctctgcaaaaacaagtcctcttcaatggctggcagacccccttagttcttcttacggtcccttgggaaggaaggactcataacatggggacttccccaaacacaggtgctcagttcaacatatgtcaactactccagttagggggcctggaggccccacctg

SEQ ID NO: 80998 - DNA, 2192 bp, Homo sapiens
agcccagaacaagggcaggtggggagggacagctgggtggaagcgccggtcctaagcagggagaggagacgttctgcctgaaagtgtcggcttaaagaatctgtttctgagcctcctgtgtccccatccccccgtcagctgacccacctcttcctgttcctccagaccaagctgctgacccagtatgtgctgagtctggccaaatatgaccagaactatgatattcgcgaccgggcgcgcttcacccggcagctcatcgtcccttccgagcagggtggggccctcagccgccatgccaagaagctcttcctggcacccaaaccagctccagtcttggagtcatccttcaaaggtgggagctgaaatcaagggtaaccttcctaggggaatggaaaggaactggccagagtctctgccccagaccttcctgaggcccctagccaggcaccaggcttctgtggacagtcctgctccctggctcactccttttgtccctcctgtggcaccaggaattactctttcaccctcccataaccactgccagcatcatctcacctgagggtctgccttcctggccaggatggacttgtgcctcctctcctctcaggctcccttttccatctccctccctgagcagacactaggctttggaatacataccaagatcttaaataccaaggacccaggaaggcagaaagcaaaacaacacacaaaggagaggtgtatatttttataaaggtcctgagaaagcagttgcctgcattctgtgagcttagtcactacagtcagtccaaatcccaggccccagggcttcagccttgcctctgttcctgggcttggcccttaaggcctcttttcccaagacaacggccttgagatgggcctgggagggaagggtcctcccgctgcttctccgggccccaggagtggaagccaggaacctacacagaagagagcctccttcacaaagctcagttcttctgggtatcttttcgttctttttctcttccctggacctcacgaatggggagattctgagggtgggcacagctttgaaattctcccaggaagaaggcaacagtccctttctccccgacaccatcctcactcacaggcctgtgctgccctcctccagcagtgcctcaactctgatccagacttctacacactcatgctctgactgttcatccctccctgctgagtccagagcctgactagacgtgcatgctgagcagacaggtcggcagcatctgtgggcccagagtctcctcctgcccacctctgtaggctgcctttccctggccctcagtccctgctctggcctggccagacagccttttcttccagcatgtgggcctaaaggtgcagtcagggtggaagagccattagggcacacatccatctccttcccctacccacctgggaagtcccaaccagaatcaccacccagccccacctggaaaacagctcccagagctttccctcactgctgctacctgcctgacctctaaacctatccctagaccgggaccacttccagctgggctcactgtcccacctgcttaatgccaaggccacaggctaccaggagctcccagactggccggaggaagccccagacccatctgtgcgcaacgtggaggtcagcggggtggagggttgaagtgtgtgtgtgtgtgtgtgtgtgtgtgtgtgtgtgtgtgtgtgtgtgtgtgtgtgtgttggtgggggcagacagtagggagccctggcagtgccggcccagccctcctaacaccctcccccacacacacaggaagaagatctctcccttattgagactcacgtgggcctgttgggcgaatacactgaggtcccaccttcgtgtgacgtgtgctctctcccctgccctgtctgtgtccctcttcttcccctgtgtgttgtgctcctgggccttcccatactctgtttccaccttggtttggcagtgctcctctgtgagcagcattccctcccctccatggacagtgcccctttcttcctcctctgttattccctttgtgggacagaccaggtagggcctcacaaagaggtggaataaagggtaagggcttgtgcctgcctgccttctccccaaccatgatgaaatgaccctgcaccctacccccatctccaggtacctgaatggaccaagtgctcaaatcgggagaaga

SEQ ID NO: 80999 - DNA, 1329 bp, Homo sapiens
tccaggagattctcctaaaatgaagcataatgtgctgagcttttcaaggtgtcagggacatcaaacaccatgacgatttccacactctcccactcagttaagcaggacagggattggcaaactactgcccataggctgaatttggcctattcctgtttttgtaataaagttttgttggaacacagccctgctcattcatttacaaattacctatggctgcttttgtgctacaacagcagggttaactagttgcaacagactgtattgcccacaaagcctagaatagttattctctggcccttttataaaaagactctgccaatccttgaagcaaaacctctggctaggtggctggggtctacagatttatagcagggatatcccctggagactgtagcatccctgccatgtccactgtgcgtgggagtctttggatggtggcacttatctttttcagtggcttctttgatccattgtggccagagtgagccccagaggctcaaggtgaggtaggcagggccaccaagtgctgtgactgtaatcaggagtcaaaggacagcagcaacatgtggaggcaactgagtctgtataattaaatatgctagccttatcaaaagtaacttccaaaccttaggtcttcaggtggaaggaggagagacactggaccatgtgaccctgagcttgttatcagtgttgtgggcaaagcagattggagagagagaagttagagggggagagagagaagttagagggagaaagagcaccatggggaagcgttcaatcgttgaaaaaatatttgtatacttcctttgttcaggtgggaggaaggagcaagtgggaggaatgtttgaaaagatgaagcagcctgggtggggagccacccaggtaggtgggagtcttgacatgctcagcaatgagccagagtcctaaaccccaggatggtgaggttggcatgttttcataagcctgggcctgtccacatgtcatttcccccaagttgtcactgtgagctacatgtgcatttgttcatttatttaacatatatgtaggtgggagtctgacatgctcagcactgagccagagtcctaaaccccaggatggtgaggttggcatgttttcataagcctgggcctgtccacatgtcatttcccccaagttgttactgtgagctacatgtgcatttgttcatttatttaacatgtaggcctactatttgcctggtactgtgctgcgtcctgaggatatgacaatgagtgagacacatttacaggtctccagatactcacagccaagtaggagaaacaggacaaaaataaacattttaaacac

SEQ ID NO: 81000 - DNA, 1032 bp, Homo sapiens
agcttaagattcctacagatttgaaagagttaaatgttttttctggtgatgaatttttttttttttttttttttttttttttttgagacagggtctccctttgtcagccaggctggagtgcagtggcatgatcttggctcactgcaacctcctccaggttcaagcgactcttctgtctcagcatcctgagtagctgggattacaggtgtgtaccaccacgcccagctaactttttttgtatttttagtagagacggggtttcaccatgttggccaggctggtcttgaactcctgacctcaagcgagctacccatctcagcctcccaaagtgctgggattacaagcatgagccactgcacccagcctgatgaattgtttttgatgtgatatttatttgcttcagcttgttttcctctaaggacttacgcagatttcttaaaataagatgaaaatttaaatagcaggaccctagattgtaattcagtaacttaaattttagtaaatgctgttatcactcttgcttcattgagccatcagacaaccctgtgacatcattcagaaaaggcatgcttattccagtgttacaaatgaatctagagtccagaggagttaaacagcttgccttgggtctcaacaacagaaatcagaagacacctaagatgtctcttggtttctgccccctgcaccgggccatctttccacatataatctcatgacccttgccagatgattgtattataaaaatagtatcacatttagatgagagtcataccactctaacctgtggataaagttgttctgttcattattttgaaagtctattatttggaaagtctacttcttgcatacatttttcctttcttctttttttttgagatagagttttgctcttgttacctaggctggagtgcagtggcgcagtctcagctcatcgcaacctctgcctcctggattcaagcaattctcttgcctcagcctcccgagtagctgggattacaggcatgtgccaccacgcccagctaattttgtatt

SEQ ID NO: 81001 - DNA, 1249 bp, Homo sapiens
cactgaaggcctctgagaagtggcgcttgccccaatatctgaagggtaaatggaagttgagagaaaataaaaagtgaggagtattccgggcagaaggaatagcactgccaaaagtcccctgccttgagggaagttggcaaattaggagcttaaagaaaacctgcggggctggatcgcagagagtgcaggacagtgtggtatgagggaaaatgctggccagacaggcaggggtcagaccatgcaggggcttgtgggctgggtgaaggacttttttttagtcttaaataattgttgataaaaacaccaagtaggaaacaacttaacgtctgtcagtttgttaagttatggtaccttcataaaacagaaaactacgtagctgttaagcatgattcttgatttttttttatgagtggcaagagtttctgatacattgtgcagaatcaacaagatagaaagcagaatgatgatcctggttttgtggtcaaactatccatatgagcctgtctgtctagctagacatagaaacaatatggaagcaagtgtgccaaaatataagaagcagttgcctcaactaggtgagatcatgacttactgtctttttaaaaatggaatacctaaaattttatatcaatgaacatgtattatttttatcataataaaaaagttaataaaatttcttttaaaaaggatattctgcaggtagtatggaggcaataaaaaaaggattagctcatgataaatgtttccctttttaatgaggtgtaattatattttatttttataatccaacaggaatgcagaaagaaatggaacaggatgcgaagagatttggtcaggctgcctgggccacagcaattcccaggttggaaaaacttcagctaatgctagctcgagagactctgcaactcatgagagcgaaagagttgtgtttaaatcacaaaagagctgaaattcagggaaaggtaagacaaagataaacataactttgttttaaaaatacacttttatttttaaaacattttgtataaataaaggatacaagtgcagtttttgttccatggatatattgtgtagtggtgaagtttgggcttttagtgtaatcatcacctgtataatgtaattgtacctattaaatatttctcatcccccctcccaccctcttactcttctgagtctccagtgtgtattattccacactgtgtatacacattacttagctcccacttataagtgagaccatgtggtaaag

SEQ ID NO: 81002 - DNA, 1402 bp, Homo sapiens
cactccagcctgggcaacaagagcgaaactcagtctcaaaaaaaaaaaaaagatgatagtggcaataatacaaatttcatgtgaggataaagtatcataaggcatgaaaagtacttggcattgaggctgaaacctactcaataaatgttagtattatctgtattactgtattattttttacatagatgaaggattttatgtgcatatcgcatattatatattggtacagtgcgtggttaagcacaggtgaaacagttctaatttttcaggtatttgtaggttgctctgcttttgtaggtatgctcggaaatgtgatgagtattaataatgttatggggaaatgtgtttaaacagtcacattaaaacattgttgggacacatcccatttaagaatggcgactgcctatgtgtcctctcatggttggcggattgtttttcatctcttaaagcactctgctgggaacaaattatttccataagcagccaggcaaccctcatcatagactgcggaggagacagtaccattgggccgctccagaactaatattaatgaatgccttacactatagcccaaatgcagtgcttttttcttttaatcttttatgctataccagggtaatattaaaaaccatgtaggtgatttgtattattccaccaggatcagtgcaaagaaaatcatcggttcagattgcaacaggctgaagaaagcataagatactctcgtcagcatcacagtattcagatggtgagtctcctccgaaggaaaatgttctatgtttgtgtagcgtgacatgcaggcctagacttgtggaaactggagttgcgctgccctggacctgcagctgtcagccattagcctccaggtctgcagcctgggcgcagccttggggtggtaatgttggggtacagcctctttctttgctgagacatttttattgtatgccaagacattttttgtaatgttgagcaatttacaaatatacatttgtttaaatatagaaaagagacaagataaaagaagaggagcaaaagaaaaaagaatggatcaaccaagaacgtcaaaaaacactccaacgattgagatcatttaaagatgtaagttctataaacaatcacctcatctacacttctggggaaataactgaagaccaccctaaaaaagatgaaagtatgaagtattaagaacaggtcattcagaacgtgaaacatttaaaaaataccattatttctggtatatcaataaaaaacaacaaaaatagaatatcagtgattcaaaacccatgatacaaaataactgctgtttttgacatcacaacacgcttgggttcctgctctgcactcctcactgagtagtcctaactggcactggtggtttagattggcagggaaaactgaaaactgt

SEQ ID NO: 81003 - DNA, 1006 bp, Homo sapiens
tccagtgtcttaactaactggtacacagcagcctgaggggcctcagttggcacagctgggaggggcgtgagtccctttcagcagctgcagcctgggtctccctctgtggcatggccactgccaggtttcccagccactgccaggttgcccacgggtctgtcatgtgtgctaccttttcagaatgcaaatccaactcctgtgtatgaatgaatgtgcctcactgtgctggcccaggcctgatgggccaagccctgactctgcactggcccctgtacctgccgctcccacccaggttcccaggggtgttccagtgggggacgcaacctgcgggctactcgctgggcatcaggtccagatcccagagacaggtccagtggctgtggcccaggcctccttccccaccacagacaggccaggctcagcatcaaacttcctagggaaagaatttggaattgaaaaagtagcaaaatcacaactttgtgggacttttcttatgcatattttgcagtttggcattgtttgtaattacgtatttataatttcagtattttgagataccagcgagcttaatcaggctaaaataattctcagaatttgctttctaagggctgccaaacacaagaggcctttgaaaaaaggatccttttcaaaagaacgttctcacaataaaaattcctggcccaattgtgtcttctgtgcatcaacgcttcctttcctcctctggaaccttctctccttcctttctcccttttcctgctttttccagccaagccttgaagtcaatccagactttggcttcagggaattcagagccaaggaagtggggacaagtgtctcctattgcccagcttcagagctctccagtcggcctccaaagcactgccagtcttcacctctccctggctttccagcccacacaggaagggcagcccctcagcctggcagacaaaaccctcagagacttggttgcctcccctgggcagcccctgcccctgccacaggtttt

SEQ ID NO: 81004 - DNA, 1029 bp, Homo sapiens
ttataaataatttataatttcagatttgactttattttttactggagttttttgaaattatacttttaaatttccaggtagtttattttgttgttgttttttagcatttcttacaaacttctagttttattgccttgtcaaagagagtatggcctgtacaatttgtgtgcattttggagatcatggatgttttcttgagacctgatttttagttttaatacatatctccaggaaactgaagaagaaagcatattctctgaagggaacaaaattcaatcagatgtattcatttgaccttacaaagtataatattatggacctttaattttaatttacttgattcattaaggctaagaaagatatgttcgtctcctattattgtatttctgtctgtttcttttgtttctaacagtttttgctttgtttctttttgatgttatttggcaaatgatctttttatatttaagggaaaaaatattttcctttaaaggcttgtatacctttgtgaattttacctgattttgttgtaatagtttctgtagaaatacatagttcagtaaaatatttgtgtctgtttttaagtcaacagaaatctttcagaaatcctttgtatcttgacaagatactttggaagttcttgatctccctaagtaggctaatgtccttgcaggctactcctgaaccaaagcataagtggaagtgggggctggggcatattaggcttgggattttttgagtgtgccaatgtttctggttcttgctttggggcaaccccatgcttagggatgtttaggggatgcctgcccttcatctggtcatattctgcctcagtagggcccacacaaaggcaacctatgaggcacttttcttctgtggggactagccttctgagaaggcaggagaatgtagctttatatgcctggctattggggtaaaagctaatctcagagactcattccaccagataagattttggttttttttttctgtagagtcagagtcccgccatgttttccaggctggtcctga

SEQ ID NO: 81005 - DNA, 1031 bp, Homo sapiens
tgtaccttggatacttaggttgtttccaatttttttactgttgtagtcaaggacataatgaagttcttctaacatccttgcgaacttttcagaatattgacttagggtaattttctgaagttatcactggctcaaaagtacgcgcctccctatctgcggctcctttccttctgaggcatacaggacttcaccctccatcccccttgtactcattcagggtcctatgactaattctggccaatgaaatgtgagcacaggtgacacatgaagctccagacagacactgaaatgcccatgagcagttccgcagtgtctgccttcccttccctcagcaaatgctgatgtcccagggacagagcctctgtcaagcctggatccctgagtgactacgtggagcagcccccttctcccttcatgttaccctcacctgccaccctgcatggacgggtagcatgaataaaaaaaataaaccttaggtgttaaacactggggtttcagggttaattggttaactgcagcataacatatcctgttgcaacaataaaaaagaatgcacatttttaggacttgtaatatgtattgcctcaaattgccttccagaaagacagacccaattatactcccacccacagtgtgtgagtgtgtactgcttcctctttaacactggagttaccctggggacagagagctaaaaaaaatatttttttggttaaaatgtaaccctttaaggtgttcagcagtatcattgatttctaagaggtttatttcataaacattgtaaaacaaaattttaagttgcacgtatggctttttaaaaacgtttagacatttaaaaaaacaccttttagtcaagtttatctgttacttttttttttttttttaatggttgctacctatgccgtcatgcttatgcaggtctttccaattcttttttttttttttttttttttttttttttgagacggggtccaccctggcccccaggctggagtgcagtggcgtgatctcagctcactgcaacctgcgcctcc

SEQ ID NO: 81006 - DNA, 1043 bp, Homo sapiens
ctggacagctgggaagaaatcacaggcatttcggggggagagagcagctcagctgacaagccttggccctcatgacagaggtgttccacccagctctgcgtcctgcctttttcagtttctcctagggaagggactgcagccataaacctctcctctctcacagagctgctcagtggggccagcgggcctgtgggtgctgttggcatcctgccctgggagattgcccgtgtgtggcaataatggcttgaatccctggccccacacatctctaaatgccttgagcaggggggaggctttggtgccccctcacccctttgagaaccacctaagaggactactccttctagaaaccttctcccatggacgtggttagactttctccctgctgaatttggattaatgagcaaacaacccgaggaaggagggagatggggtccgaacccaggtgccctgggccccaaggtgaacacgagtcctcctgctctccttcccttcccctcacggagacgcctctctgagctggggagtcttgtttgggatgtggatggaagggaaggctgggcatctggagcaccaaggcacttttagaggagctcccgcaaggtgagtgggggctttggttgagtacatagggcttttggcagacaggaagtggaaagcgtggccagccatctttgtgattcggggtagtctgctgctggcccttccctttccccagagctccagacggctctcaggacagttggtagcagctccctcctggctgcaccaggagaccagagagccgagctggctatgagtcagccccgtggcccagcagcgggataaggggattctcaagccagcctggtctgcccagcagcaggctgggtgtgtggctgcctgggagcagtggacactgggttccaaacaccttccgctggggtcttcagatgacctctgcctttatcaggtgacttatgaatctagaaagagcccgcttgactgacaagagaatgctcaggtgacatgcatagaatagttactgaagccacttgtacatt

SEQ ID NO: 81007 - DNA, 1051 bp, Homo sapiens
aggaggaggtcactgaagtgcctgctgcttcccttctgatgtcttggtcacaggcttgtgtgctggggtagcatgtctctaggcagcttaagccctggcccaggccctcagattggatggagaatggttggttcagctgtagcaggttttgaaggatgactctcgtcactcagttttctagacccttctcccttttgcttggccaggcggcagagagagacaatcaaaacctggaagacaaagtgcgttccttaaagacagacattgaggagagcaaataccgacagcgccacctgaaggtggagttgaagagcttcctggaggtgctggacgggaagattgacgacctgcatgacttccgccgagggctctccaagctgggcaccgataactagggctggccgaggcccaggccccgcccgtgagtcccaagcgtgtgtgcgagaccagatagctctaggacgttcttctgtgtgcattgcttctgtaaatgcaggcgcagtttgtcgtgtttccaaaccagttgtgccgtccactcactccttttcagaatagaaatctcctctcgcttctctggccttgtgaggttgtggacaactggaagattctgactcaggaatccagaactaggtctaccttcaacatttatgcagtcagggcagggatgtttatatctttcataagggctgttgcaaccatatgaactgaaaaaacacgcattttgtaatccaaatattgatattctttacaccaagccatcaggctccttttatcaaatagcattcagagtatttgaatgtccaccagacaccagccccggggggcacagagagaacaacattcctctctgtcaacatcgagaggctttaaaacaactgtttagtggaaactttctgagagatggaaaacaagcttctggtgggtgcattttctggcccggagttgcctgcatccacgctactgccccctgccccccgcccccccagtttgtacggttgcaacagtgttccttttcttggttttaatttctgagcagatgattgtgctgtgg

SEQ ID NO: 81008 - DNA, 1031 bp, Homo sapiens
catgccgagcagacagccggctgctttgcctgtgcctggtcaggaagctctgccatcttctcggctccctgtgccttcccctccatctctccactttgctttcctcacttcctccctcctgtaggcctcagggacagagagtgcttgcggaaggctactgctgggccaccacaggccgcactcatctccaccctccttcctgaccagaacagctctgcctccccttgccccttgcccccatcctttgcatccagagaccctgttcttggtccccctgttgccccacctccagccccctctacagctgtgggagaactttctggagtctccctgtgtcattcagtcaccagtgttgttctggagtagagatgctggctctaggggccacttctttttttcttttttagatcatctgattatatctaatgtgaatgtctccccagcttccttgaaagtaaaaatcacctggagttcttaaaaatggagccccttgggcccttccttggagagccaggttcaaggggggctaggatggggcctgggaacatgtatttttagtaagtgtaccagctaattcctgtcatggagatttagggaacacccgtctaagcatgcccaaaccgagacccaatccctcttttctgatgtagggaataggagggaagatctgaaagtctgggtcccttcccagaaaggccttctctaacccgtgggcccccagcccagcccatttagtgctctgacaatgaggcataatttgattcttcaacaaatgttctgtagttgctgccctttaaattgctccttcctttcacgtatgtaggagaatactgtgtgtggaagtgttttcctttatggtgttgtacttagatgattagcaaaatatggtgctgggctgagagtggcacagctgggtgatccagactgcagactggattatatcacatggatggggtatgagggcttgcactgatatgcacacactccctgtcgtctggcctctcttgacagcagatgcgggaaattacagt

SEQ ID NO: 81009 - DNA, 1138 bp, Homo sapiens
ttctttttgaagacagtcttgctgtgttgcccaggctggagtgcagtggcacaatctcagctcactgcaacctccaccttctgggctcaagtgattctcctgcctcagcctcctgagtagctgggattacaggtgtgtgccaacacgcccagctaatttttgtatttttagtagagacgaggtttcaccatgttggccaggctggtctcaaactcctaagctcagatgatctgcctgcctcggcctccaaaagtgctgggattacaagtgtaagccaccccacctggtcgaaattaaatttcaacatgagttttggaggggacagacaaactaaagcggtccttataaaagaggcctgagagagctgccttgctgcttccatcacatgaggatacagtgagagtatgccatctgtgagtcagaaagtgtgccctcaccagacaccaaatctactggcaccttgactttggacctctcatcagaactgtgagaaataaatttctgttgtttataagctatacgcagcctctcgtattttgtgatagcagcccgtgtggactgggacagtgtgtgtcagtgtcagggagtgggatatatgacatgaagattatagatgggttggacttactggtaatgaaaggttatgacagggagttggagaggcaagagaagagaaggtcaagaactgagcccagctggaagaaccatctatgtgtgtattgaaatcacaaagaatcaagacaagattagtgtaggagagagggactgtgatctagagctaaaatcattgagaaatgagggggagtatcatgggggttggtggttgacagagtctgatgataggagattcagggctggggaattttagggagggggaagagaattatctagaaggggcaatgaggagcctagtggtccagctgtgaaaatgttctgaaggagaattatggggtgccatgaaagcaaataataggtatctaacctggtatggaggggctgggaaggcttccctgaggaagtgacatttgagagggtggtgggttgggctagaggaggtcaaagggaagaaggaactcttaagggttacacagccaaagggaaatttctctgaacagttctgggggctgaatgtggacaa

SEQ ID NO: 81010 - DNA, 1085 bp, Homo sapiens
gtatttttagtagagacggggtttcatcgtgttagccaggatgatctcaatctcctgacctcatgattcgcctgccccggcctcccaaagtgctgggattacaggcatcagccaccatgcccggccacacccagctaattcttttgtatttttagtagagatggggttttaccatgttggcctggctggtcttgaacccttggcctcaaatgatctgcccacctcagcctcccaaagtgctgggccccagccctacctttgtttcctataattgctcaccacagcatgccagtaagcatgcaggtgttatttacttatttataatccgtcttcccccagtagcatcccaaaaggataggaccttatctttttcaccagtgtattccaacacctagcacagtgcctggcaccaaataggcctccagtaaataatttttaattgagttaatgcttgaatgttgtgggcagccttgcttggatgctggcctggaagctgtgataatttttgggttaacttttatatagcttgcttaattgggagttgcaagggccaagagagaaagagatcacatttggatgcagctttcttttaacattaaagcaagccatttagctttcattgtgatgtgggttaattttcgggccgtctgctgtcatttgagtactggagttgtaaattacctttttactctcctgcaaaagactaacagaaaagccagcttgtctactgttgtgacttttagctgattttgtcagtgtttacaaataagatctactgtattactgtttggcttcattttacactcacttattttgttcagccaagattaccttgccatgtacaggtgccacaatcttggttatctaacacctcaggctgccttttggtactctataccgatttactttcttttgatgttcattcattccttctttaattttccattccctctgaatcacaccagactctgtagttccaacaaattatagggctgttctttggggtttgagttgactgcaatagatacagtctttcagatatgttgaggtgagtttgtcttctcttggtcctgtgggtttgttaa

SEQ ID NO: 81011 - DNA, 1070 bp, Homo sapiens
catgaacagcaactgtgggtgattttacccagaggcacccaagttggcaggccgtatttctgtaacatttccagtgagtcctcagtggactgtgaaaaggctgatctttgagcagtgagagcctttgaggttctcagatttcatactttaaaaaaatgtacagggaaaaaggagttggcaaatgtaaggtctcagaatggaagataaaagggatccggtaattttaactctctttctggccctccctccccctggccaacacaaaaccaatccaccgtacttgtgtgatcaaaaacaagtactgaaactctgtggttgagatcaaatagttctgtggaaatgaaaatgtttactcactcataaaaccttaaagaaaatgtcaaaaaataatttttgtttgtggagaagcagggaggagacgcttggggattttgtttaaacacagaatatgtctttcatgtaattttaacatcattcgataaatgtatatattactcacttctcgtagataaaggctggtttgtaactcctacctacctctgccatttttaatagatccatgtcttctattatttatgtgaaaatacaagccatggtcgtaaattgagatgcagctaagggctggggaagcaattcagacaggagggtggagggagccgttttaactgaaaatagaaccaatgtcatcctttctgagagttgtgtaggatggagggggaagaactttttgaaagggcagctagtagaaaaccttgctgcgatcctacagcttcgtcatggctctgctgtgtagacaggactaggatttaagggaaaaaaaaacaaactatctgagtttacctccccccaacttgagatgcttctcctccctcaaatgttcactaccattttccacttctcttctgcgaagtgttctgtgttaagtgtggcctctccagtgagtttgtgttcttactccctaaggcaactatttcatacctattcccctttccagacctctccccttcctaggcacaccccgtggcttccctttcaattgacaagataggcacctttgaccaagggaatgt

SEQ ID NO: 81012 - DNA, 1095 bp, Homo sapiens
cagacagttcagaggcagggacaacagatgggggtggccaagtgacaatcgatccaatcagtggcatggacgatcctggggtaacaactacccgcaacacagacaagaaccttactatccccagcaatatggacattatggttacaaccagcggcctccttacggttactactgatagaaatgttggcagcttttagtaaaagcatttactctgttaccatgagaaaagtttgggtgtcttctgttggtcatagttttacatctgattttacagaatggattattgattttttggaagttgagactttaaaaaaaatagatcttacttgcgaaatgcgatggttgctgggaatacctgaaactgtggattatattgcttgacttctacctcagaatcttctttgtttcatgacttaatagtgctttaagtttggtatattatttgacctctaggaattctttgttttacacagaaataaaaattttaaaatagaaaatgcttttactttgtaaggtaagagagtatccatatgcttagatgtgctcgtttctaaaattctagaggttgatataatcagctcatgaatgcacagctatgctttttgtgatagattgtacataacatcagcagttgaaaggtaaaacaattgcttttttttttttttgcatttgttaagtgactatggtactttgtgattccttaatctatagatgagtcagctccacacttgagtctctttttagagggaaatcagtaataaagctgtaaaataaggaaggaatcattgtcagtttgtgtcttgatctggtggtggttgggataagggtacacatcattttatacaaacactaaagctttttgctaacaacatagcaggtcaaaattcacacataagaaagtttaactctgtactgttcacactttttaatcctgtaaataatgctgcattttgatggttcttacttttttggtatttaatgtgggctgattttacaatgttatattcacttccagatgcatacctctgctgctttctctcctataaatagtgatgctataaacttcctttcacagagatcattctatttcaaatc

SEQ ID NO: 81013 - DNA, 1029 bp, Homo sapiens
ttactatcagactgtacccctgcccctgatctgcttaaaaccaggaagaaataaaaggtacagtttctgcttcataagacagaaaataacatgaaaaaaagcttaaagataatttaagagtgagagcaaataaaatagtgtcaaatagaattaatttcaagtagtctgttgtaataacatatggcattaggtataaggaatcctagcttccagttctgtgcttaaaacatatgtgaccgtgagaaaatcatgtaaacactgagcttattggctcagctgtaaaaatggggacaatacccaccctgccaccctcacagaattataaaaataaataatcaaaggaagaacttgagaatatagagttgtgaccattaaatccctagtaggacacaataggtgctgcataaacatttgttgaatcaacgggagggaagtatttggtaaattgtaaagcgtagtgttgacataaaggatgtagagtaacgggcagaagatgaggtagggcagaagacgttgagaattaaggatttgtgattgtttccttatgttaattcatatgtgaattagcaaaggaaagcaagttatctcattcagaaaataaacacttcaaatgtggaagatggtttgtataaaagttgagctaaaattagtagcatttggccaggctcagtggctcatgctagtaatctcagcactttgggtggccaaggaggtggaccatctgaggtcaggagttcgagaccagcctagccaacatggcaaaaaccccgtctctatgaaaaatacaaaaattagccaagcatggtggtgcagtcccagctactagggaggctgaggctggagaatcgcttgaacctgggaggtggaggttacagtgagccgagattgtgccactgcactccagcctaagtgacagggcaagactccatctcaaaaataaataaatacataaattaaaataaaattactaacatttgccatttggaaattagtagtgaatttagaatgtcaaatgttaattactgaaca

SEQ ID NO: 81014 - DNA, 1027 bp, Homo sapiens
tgcagtggcgcgatctcagctcactgcagcctctgcctcctgggttccagcgattttcctgcctcagtctcctgagtagctgggattacaggcacatgccaccatgcccggctaattttttgtatttttagtacagacggggtttcaccatgttggtcaggctggtcttgaactcctgacctcgtgatctacccaccttggcctcctaaagtgctgggattacaggcgtgagccaccgcgcctggcccatttttgagattttaatgtccagcttttattatagaaattgatgtatgaaggtaaaaaccctggagagttgttagtactaacaaatgtttagtaacaaatggtagtaaggaagaatctaagagatagtctttggttagaccagaagtaaccaagagaaagccatcaggagagcccattatacaacggaggtctgctatctctaatagcattagaatgtgctaaacagtaaagtatgctttttctcttttggtccagggtggtaaatctcgtgaaaaggtggtgaagcttttggcttctacaactccagaagagatcttggagaaattaaaaaaggaagccaaaaaaacataaaagcaagaaatgaggccgggcgcagtggctcatgcctgtaatcccagcactttgggaggccgtggtgggcggatcacctgaggtcaggagttcgagaccagcctgaccaacatggtgaaaccccatctctacgaaaaatacaaaattagccagatgtgatggcgcatgcctgtaatcccagttactcaggaggctgaggcaggagaatcacttgaacctggggggcggaggttgcagtaagccgagatcgcgccgttgcactccagcctgggcaacaagagtgaaactctctccccccgaaaaaaaagaaataaaaaatacatccttgagaaacttttttattgctaatggtgaagaggctgttaaatagaaaaatatactacatgcacagaagaacatgggggacatatatatatgtatatattcg

SEQ ID NO: 81015 - DNA, 1064 bp, Homo sapiens
gttggagtattatgtttcattagatctaaaatgggaggctggatgccatggctcatttgtaaaatggagataataatggtactaatatcttcataaagttattataaggattaaagaagttagtatttgtaaagcctttaacacatttgtgtgtgcttaaaattggtgtatagtaagtgctctgtaaatatttgttaagtaaacattattaaattttaaaaacactcaagatatgtgtcacataagaggtgaacctagtccggggctctcattttcctgttgaggaaaccctgcacaaccttgtacaatctagtaagctgccctgtccatacacttcttcagtgacattgatgaggctgaaggccatctatgactccctgcctggggctcttcacataccaagggcaatttccagttgcctaaatccaggatattccccagggctctgtaagcccatcttggtcggcaagattgggtcaataacttttcttctctggatttatttcctgtaatggtagggccatttttatcatgttcatgttccttaaatgtgattagtttaatcattcatttcttcattcaacagtttttaattgaaaatctgtgtgccaggcaaatgcaaaaactcttttacaaaatgtccttgcttcatgaagaaaaagaactccttaaggataaagtccacactattttcattccagatttgacagcagaggctgtaaatgtagctattgcagcacctccatcagagggagaggctaatgctgagctctgtcggtatctttccaaggtcctagaactcaggaagagtgatgtggttttggataaggtaggtctcgctctcttttttttttttttgagacaaaatcttgctctgtcgcccaagctggagtgcagtggcgtagtcttggctcactgcaacctccacctcctgggttcaagctattctcctgcctcagcttcctgagtagctgggattataggcgcatgccaccatgcctggctaatttttgtatttttaatagagacggagtttcaccatgttggtcaggctggtcttgaac

SEQ ID NO: 81016 - DNA, 1064 bp, Homo sapiens
ttgtgggatccgctgcgcctggcacaaggtaggtgcgccatcgatacgtggaagattcacaagggccaagccgccacgaggctctatatcgacttgatggccacaggcagcgcgtgggactctgcatctgctgcttggctgtgggagcgagaagacacctggccctgtgcactccttgccgcgctctccaattctgagaagtgacaatacctttctttccccgattaggaaagaggtgacacaccttcctatcagctgagcagggtgggccaagacacggtgaggcctcagctccgcagctccacttcctggggctcggcccgttccagaacaaaagagactcgcgcatgttctgcggccacgagactcgctcccgccggccttaaggtgtcgccctctggccagagcggatgcgccgggcggtggggccgctcctgccggctacctgcgcaagcgcagagggctcttccggcgccttcccaggcggggatgctgcggctccgcagcgggctgaggcaccttcgggcaacacccaatactcggggctccgctcggcttctttgcgccgagatgcctaagaaggctggtgcgacgaccaaggccagtagcaggtcccgtggcggcagaggggtgggcctcaggggtacttgttgaagagcgcgggagaagcggggcccgggagtgagtggaggcactgccagcggcttgccgtctctcagttccggggctcaggacagccgccgccacccccagagctgcggcctgctgccgtcgccccgcctcagtaggctgcgctgccgtccacctggtgatttctgagcgctgggcccggcggcagccgagctctccttgggctgcgtgtgctgacctttggcctcctacccgcactcccagtccagcaattcatgttcccgcagcggcatgacctgcgtttccccaggaggctgtattctgctttctcctcccttgctttggctgatcgcaccccttctgtcaagaatacagcactcccatttccaccatctttgtttggccaaccccagtccgtttctcagactcagctc

SEQ ID NO: 81017 - DNA, 2049 bp, Homo sapiens
acaccagcactttgggaggctgaggtgggcagatcgcttgagaccaagagttggagatcagcctggccaacatgatgaaaccctgtctctactaaaaatacaaaaaaattagccaggtgtggtcgcgcacatctgtaatcccagctactcaggaggctgaggcacgaaaattgcttcagcttgggaagtggaggtttcagtgagccgagaccccaacactgcaccccaggctaggcaacagagtgagagagtctgtctcaaaaacacacacacacacacacccaccaacagagtgagagagtctgtctcaaacacacacacacacacaccaccccccacccccccacccccaaggctaggcaacagagtgagagtctgtctcaaaacacacacgcacacattgctaagggctttatattattttctatagtttgctttatttggtttaacttaaatgtaacttgtctcttaaaaattacagatcattgaatatgagaaaaagcaaaccctgggacagaatgataccggctttagttgtgatgggacagctaacacattcagggtcatgttcaaggaacccatagagatcctgcccaatgtgtgctacacagcatgtgcaacactcaaagtaagagtcatgcactatgttccagatggtttcctcttgaatgttgcagaatgtgtgttttagaagctgagagtcactgacagctgagccatttataaagaggggggaaaagaagctgggagctaaaatattccactgccttccgaaaagaagtacttctccccacagctctgttctgaaagaaatagctcttcttaagaagtagccctttgtttcagtaagcagttgaatgtttggcagaaaataaaagttatttttgtaaaatcttttcactattctctaatagctgggctgtacattcagtatttttattcattaattagttttttggtaaaaacttcatttttctctaaatgacagcataaaattttatataggaatgatagtgaaatataatggaacattaatctaattaaaacaccacattaaactgagtgcttattaaatgaaaattactaaggaaccttttgttctcatttagggtccagattcccactatggcacaaaaggattgaagaaagtagtgcatgagacacctgctgcaagcaagactgtttttttcttttttagttcccctggcaataataatggcacttcaatagaagatggacaaattccagaaatcatattttatacataatttagcattataatacatcttggctaaataataccatacaatctagtgtcaaaaacataaatggccacaaaaaagtagtttgagtgttatgaatatttaaaattgtaagataagaaacagtttcttagagcagatagaaaaatgcttatttaaatctttgcatgatttaaaaacagattttccattttcttacaactttaagagaaaagaactgggtttaatggtttaaaaaaaagcacagctttttcaccttcatcttgtataatttcatagattggctgacttagggtctttcaatagtttgggaattgaaagattcttgttatatatagctagtttgggtttgtttttgttttaactattttgaaggttaggtgagatgggcaaataggcttaactattttgaaggttggatgaaaagagatgggtcagtattcctacagaattcttattaactcaaataactaaatttcagaaaattaagaagctgactttatatttggtggtttgaagtatcttgttgttagcatttgtaataatgctaaaaaaggcctaataaaatgcccaagaaaatattcagtgcatttatagagaaggatattttgtagtagtatagtaatgtgttatgtagtacagttttaaagctataaatggaattttgtgtaaattcacaaaaatgtgatataaacaggatctaagactggattccctgtcactaaactgcaccactatacctgtctctctgtgtgggggacactgctgatgattcccaagattgaga

SEQ ID NO: 81018 - DNA, 2069 bp, Homo sapiens
tcaagagatcgagaccatcctggctaacacggtgaaaccccgtctctactaagaatacaaaaaattagccgggcgtggtggtgggcacctgtagtcccagctactcgggaggctgagacaggagaattgcgtgaacccgggaggcggagctggcagtgagccaagaccacgccactgcactccaggctgggtgacagagtgagactccatctcaaaaaaaaagaaaaaatggttaaaatggtacataactttaccacaaaaaaattataatgtaaaagaatttagttataattgagtaaatatcattaaatattttgagtattatgttactattacaatatgttactgtattgtagtaattttatatatcactatatatgttgaatattactgtagtattgtgaataatcccattcataacagtaacataatattaagtagtaggattaaacccagtaagaactataaagtacattagctttatgaagaactggaaaagtttgagtagaatcagactttaataaggacagtgtcttccaaattaacctatgtatgttagagaatttctttcagaagtcacatactattttaaggtagtggagaatggcttggcaaaattctttttttttttttttttttttttgtgatggagtcttgttttgttgcccaggctggagtgcaatggtgagatctgggctcactgcaacctccgcctcctgagttcaagtaattattctccctgcctcagcctcccgagtagctgggattacaggcgtctgccaccatgcctggctagtttttgtatttttaatagagactgggtttcaccatgttggtcaggctggtcatgaactcctgacctcaggtgatctgcccacctccagcctctcaaagtactgggattacaggtgtgagcaaccacacccggctggcaaaattcttaacagttaatttggaagagtatatgtttctcttttaataagagtaatacagatgacaagacaaagtattgtaaagctataggaagttagtgttgtatggaacagactatagatgtcagaaactaacctaacataaatgaacatttagaaaatgatatggccaggtgtactggctcacgcctgtaatcccagcactttgggaggctgaagtgggtggctcacttgagcccaggggtttgagagcagcctgcacaacatggtgaaactccatctctacaaaaaaattcaaaaattcagcatggtggcatgcacctgtaatctcagctacttaagaggctgaggaaggaggctgtgatctcaccactgcactccagcctgggcaacagagcaaaaccctgtctcaaaaacaaaaaagaatatgataaaggtgagggaaggattaaccactgggaaaattaagttagatccttactgatcccatgtacctgtattgatgtaaattaaaattttaacattaaacaaaactgaaaccatgaaagtgctggaacaggtgaatgtttatgtactatgaggatgaggtagacctctctaaacttggcatgtatcataattttgaaaacagataattgaaaagttttaagtacaaaatcaccataaagttaaaagatgagtgacaaatgggaaacttattacagtggatattaccaacaaagcataaataactatcatctctatataatgtgatcttttgaatctacattaaaaagacaaacacatctgtagagaaaaatgagaaaagaacatgagttgggtatttcattagagagaaaatccagtgggcagtaagcatatgagcaaatgttttacctcattaataatcaaataaataggctgggcatggtgagtcacacctgaaatccacgcactttgggaggctgaggcgggtggatctgttgcgctcaggagttccagaccagcctgggcaacatggtgaaacccccatctctacaaaaaaatataaaaattagctgagcatggtagcgtgtgcctgtagtcccagctacttgtgggggctgagttgggaggatcgcttgaacctgggaggttgaggctgcaatgagccgagat

SEQ ID NO: 81019 - DNA, 1081 bp, Homo sapiens
tcctacagaggtggagaaggggaggggcagtgcagtggagtgcaagaaactctggctcttgggcaggttgaatggggcttgaaggccagctctggcacctcttagtggggcagcctcagacaagtcacttaacacttccaaactctgttttctcttttgtggaataaagaaaatagaatatactaggacgaggtgtttgtttgtttgttttgagatagagtttcgctcttgttgcccaggctggagtgcagtggtgcgatcccggctcactgcaacgtccacctcccaggttcaagcgattctcctgcctcaggctcccaggtagctgggattacaggcatgtgccaccacacctggctaattttgtatttttaatagagacggggtttcaccatgttggccaggctggtcccgaactcctgacctcaggtgattcaccagcattggcctcccaaagtgctgggttacaggtgtgacccaccacgcctggctggatgaattgtttttaggacttaagattataatctatgcgaggcgtgtatatgtgtgtatatgtagacatacatacatacacacacacacacacacacacacgtatttcccctaggagcagtggtttagtatttgctaattctgtatattaaatataacttccacagataatgagaattgactgtatattccttctgtttatatggtagttgcctcttgtaaaagtctgaatattaaaattgcactaaaaggctgggcacagtggctcatgcctgtaatccccacactttgggaggccgaggcgggcggatcacctcaggtcgggagctcgagaccagtctgaccaacatggagaaaccccgtctctactaaaaatacaaaattagccaggtgtgggggcacatgcctgtaataccagctacttgggaggctgaggcaggagaattgcttgaacctgggaggtggaggttgtggtgagccaatattgcaccattgcactccagcctgggcaacaagagcaaaactccgtctcaaaaaaaaaaaaaaaaaaaaaagcactaaaaaatctggtttataaacaaaatggaat

SEQ ID NO: 81020 - DNA, 1224 bp, Homo sapiens
aataatacactgcttataatatactgaaggacggggagtaaatcagattcctccccagcacctgcatgtggtgtctgttgagtactggatatttgagagccctaaacactgcccaagttgttaatgaaacattgcttaatcctaagatttcctccctgttagggtagctgtcagatgcttcatttgttcttcagtgtgttctcatttgaagcattactgcctgcatctgggtaacttacaccttataaattgctcttaaattatgcatgccgttggagcctgggaatcttgaagtatgtgccttgtacagggtagaagccaataaatatttggtcatttgatttgactcacagttgtttatttgaaaactcagtattgtgttaatatttatgaaacaatctgctgtgtttttctgatctttatttggttctcagctttaacttcgtactttaacacatctgccagtagaagacctatgtgtttgtctttctaccccatagactagtttgtttcaaatgtacttgttaaaaattggtaattaattaaaaaacattttttatcagttattattattatttttgttttttttggtagagacggggtttcgccatgttgcctaggtaggtctcgaactcctgtgctcaagccatctgcccgcctcagcctcccaaagtgctgggattacaggtgtgaactattatgcctagccccaaaaattggtaattcaagagaagactgggagctgaaagaaagggctggcttcaggagctttttatagctgtcttatattctcaggatgttttttctcctccgggatttgaatatgtgttctggaggaagagatactgtttcttacagccttttgctaaaggaagaagataatttatcatgttgatagaacaaaatgaatttacaccaagggtagtatgatgtgcttttttttttagtaataaagtttatgtgtttatctctgcggaagttattagcataccaagtggagacatgtaggttcaaagtcttctggttttccatcaaatggttgtgtcatattgattgcatttaatttacttatgaaagggcttcgtggtgccatagtttatactcatctgctcagctacaataagagatactaaagtttgatttttaaaaaaaattatgtgtaaccagtttatttttaacatggtattaagcctctcctgtgttcttgggactatgatacctttg

SEQ ID NO: 81021 - DNA, 1608 bp, Homo sapiens
aaaccttttccacatcttcctaagtcaaagcccgcatttatagattctcatagaaccatgtataggtttgcggcacttgtcctgttaagtgtgaatctaatcaagggcaaatggtgataaaggcctcacattgctgctctgttttacaactctagtaatttttacctgacaaaaatacatcaaggcaggcatgtaaagacttctagactgctaccttgtccttcaaacaaaaatttctttttttttttaattaaaaaaaaatttttttaagtctcactttgttggccgggctagagtgcagtgttgcgatctccgctccctgcagcctccacctcccagattcaagtgagtctcctgcctcaacctcccagatagctgggatgacaggcatgagccaccgtgcctggcctaaaacaaaaatttcatagttttctagtttaagaagggaattgagcatgctgttagcattctctctctctcaattaaaatgactattaagaaatttttaaaaaatagtaagtccattacaatgaagagaaaaagagaggttggaagggccaacagagtagaaagggacagagaagttggaagctgattgatggatgaactagagtagatgaatctggagcccagaatccagagctttcaaagccgcagcggagctggagcgcctttcctggcagaaccccaacaaagttcttggctagcagttggaagtaaggagggtggaaatgagaaggtagtgctaaaacatggaaattaatttaaagcctgtgtatagaccatccccttagccagctgtccatgacaatggacaggctttttgagataaattgaacaaactgcctgagaagaactgggactgctgggtatggctttgggaccccagggttaagctctcttccaatggctttgaggggtccctgccctagggctggcttcccactctaatgccaggtgccagtcagcaagcctcccacatacacagagctcccagccaacatttctgttttggagatagtattatcttgaaaacagaccagctgcttagaatagtgaagttggagacggagtttaatcatctgacatataaggaaaagcagaacgtgaatgacagagaccaagagaaacacaacagcggatcctcaaggaaacagacgagaacttttaaaactttggttaatgtcatcttggagacttcagaaagtttttgcgttcataaaaccagcacatggtgctgtggagaaaaaaggaacgatcaagaaagaagcaagcattcttagaaatttaaatgtgattgctgtagagaaaaataggaaggcaccagaagataatggcaaggaaatcttccaaaatgcagagggaaataatgataaaaaatatgagacaacatacagataaatagctaatatttactgaggcaattttttttgtcaggcgttattcaaaatgctttgtgttttaatttatgttaatcctcacaaccacattatgaagtaggtgctcttattctcatctttttagagaggcaggcattgataataagtcacatggctagcaagtgacaaaacaagctcaaacccaagcagtctatttcctcttggcctt

SEQ ID NO: 81022 - DNA, 1361 bp, Homo sapiens
atattggtatatggtcatataattcccctgaatcttttaatgacttctttttacctacaggatgtttaaacactttagcaggtacatgaaacctttgtgatttgatctctctttcttcatctcctctccatccactcagtgtttcaaccctaattactaatggcctttttcttgttttagtgcctgcttctaaggcctccttacctttgtactcctcagtctttctgccagggctccacacttaattactactcttcagataatcttcaggctttacttcctctgtaaaaattccacccacaggcaaaattgcacactggctcatctaattaatctctcacagcatgttttggttatctgttgctgtggaacaaatcactggaatgcgtagtgacttaaacaacttttattatcttttacagttgtgtgggttgactggaatcacttaggtggtttgtcgtctatgtagctgtagtcagatagcaggtggggttggactcatctggaggtttaactcacagtctgggatggctgagccttaagtctcaggtcctcttcaagaggcttcttcagctggtctctccagcagggtagcttgacttcgtggctcatgactccgaggaacacaaaagcaggagctgccaggcatccttaaggtgtaggtctcagactggtgcaatgtcactctgccacaatctgttggttcaaggggctcacacagggacaacccagattcatcatgggacagatctatgtaaggacatgaacacaagaaagtatgatttcttggggccatcattagagattagttattagatatgagtgcctaatatatacttctgttattaggacattactttttaatcatttcagtaccagactatagttgcgtgctgcataatggcattttggtgaacagtggactgcaaataagatggtggacccataagattataatacggtatttttactgtgcattttccatgtttagatacacaatactcaccattgttttaaagttgcctatagtattcagtacagtaacatcctgtactggtttgtagccctgaagcaatagtctataccacatagcttaggtgcgtagtaggctataccattgagatttatgtgagtgcagtctatgatgtttgcatgatgatgaaattgccgaacaatgcctttcttagaatgtatctccatctttaagtaatgcatgactgactgtgtaaggtttttatgggcaaagctatcttacccatatttttatctctagcactattacagtgcctgctatatagtccctcaataaatgtttttgagtaaaatgaacagataagtagtgatacaaagtttcttacaca

SEQ ID NO: 81023 - DNA, 1146 bp, Homo sapiens
aaaataatcaagttatgagagaaggaacattctcagcaagggaacgcattgttttcggcactaagtatctcctgttggaggaacacaagagtgaaccagtgtgccttaagcacagtagagggaagtggtagaaaatgaggtcaaaaagataggccagacaggatggtgcagggctttagagactgagcgaagactttttcagctggtatttgatggaaagcctttggagagttttgaatgagattggggaggcggaggtggtggcaggaggttgtgatctgatttacattttaaaaaaacaaactctttctggcagtggttggagtaaaataggcagcaaggtgatagatgaagaggcttttgcagtagtccaggcaagaggcgatggtgaattgtaccttgtaccagggaggtagcaaaggacatgatgagacatggtcaaattctggatatatttttgaaggtacaaccaagaggacttccaagacatccaagtagtgtcatagagtagacagaaatatgaatttggaggtgagggaacagcttgctgaacataaatttgcaagttaagagtgaatggtatttaaatcgagagatcaagtgagattacctaggaaggcatgtagactgtgaagagaggtacaaggatgagctctggaatcttcaaatatgtagagatgtagcagagaaaaagcataaaatgaaactgagaagcagctgtcagtggaattagaagagaaagaaggagcattatattctgaaagtcaagtcaaaacatttcaagaaagaagaagtgggaaatgtcaactatggaaagtggaaagtggtcagttatgctcaatgctattgagagtcaggtataatgaagactttgagttgatttttaatcttgacaaggtggaagctatcgataaccctgccaagagtgatttcagctgattagagtaggttaggcagaaaatgggaagtgaggagctggagacagtataaacagtcctctcaggagttttgttgcaaaggggaacagagaatgacgtgatggctggaaggggcacgaggtaagtgttcttcagtattcagtcctcagctctcatcctttctcccatcaaccaaagtgagagctttacgcactcattcccccacatg

SEQ ID NO: 81024 - DNA, 1108 bp, Homo sapiens
tttggcattactagcttttaatcacagccatcctgttagggaggcgtaagaattgtttaccccaatttcacaaatgggactgaggcccagaagagtcaagtatcttgcccaaggtaacaaacagctaactcacactgaagaccatgtctgtttcattatactaagatggttttaaatagctgcctgagtagaacgtgttgttattaaaatggcagagtcttgggtagtactgaagcaaaaacaggcaggtcagtgggacagaattagatacaaaggttcacagttgaatcagaaagatgaacaagaaaatgaatgtaaagttcacacaactagaaacaaataataagattccattgacgaatggataaaggacaggatagataacttagagaaagaaaaaatacaactaattaacgaatgttttacctggctggtaattaggaagtgcaaattaaaagacagtggtattttttccttccattaatcccaccaaaaaatttaaaggtaacatctgaacagcattttctgacaaagatggtggtaaaaacccttttggaaaacagtttggtgctatagattttctttccacacgtaagaagcattcaagtattgcaaattgcatacaaaaatatttacagctttatttatagtagtgaggaagtagtcagctgtagggaatggttaaacagtggtaggttcacttgatgagatataatgcagtcactaaatatgacggatagcacttgaaactgcaccatggttacaacgtgaaaagacatggaacaaacatatacctagagaccgggataaaaggaaacataccaaaatgctaagcaaagtcacctggagtagtgagatgaaagtacctttttttcttctttattctttgtttctgatattttctgtaatttagttcagttacatttataaaggggggggacctcaaaagctaaaatccaggtcattttagtttaaagttcaccaggaggattgggtatagttcatttggattttctagactagaagtagttttcaaaatgatctgtgggccgtctgcattataatcttctggggtgcttatgaaatgtgtagatctcatcctcattat

SEQ ID NO: 81025 - DNA, 1079 bp, Homo sapiens
tcaggccctaccccagacctactgagtcagaatacccagggcactgagccagggggtgggtgcccgtaggcccggcagcacccagcctgcagaagctccacctccgggagcgctgagctaggaccagctccccacgcccctgccctggggctgccgggagtccagtcctgttacacctcccgcggccgcgcacagcggcaacccgggcgtgcgggggcgcgcgcggtcagggaggggcctgcggaggcgcgaggcccccggaagcgcctttcccggaaggcagggaggcagcgccggcctccggaggcggcctgggcgatggcggcggagttttgtccataacgtgggcaaccgcgcagctggaggatggcctcactcgggcctgccgcagctggggagcaggcgtcgggggctgaggcggagccgggccccgcggggccgccgccgccgccctcaccgtcctctctggggcccctgctccccctgcagcgggaacctctctacaactggcaggcgaccaaggcgtcgctgaaggagcgcttcgccttcctcttcaactcggagctgctgagcgatgtgcgcttcgtactgggcaagggtcgcggcgccgccgccgctgggggcccgcagcgcatccccgcccaccgcttcgtgctggcggccggcagcgccgtctttgacgccatgttcaacggcggcatggccaccacgtcggccgagatcgagctgccggacgtggagcccgcagccttcctggcgctgctgaggtgagcggcagcgcgggccgggccgggccgggccgggccgggccgggccgggctgggagatccccggggcccggcctacccggactcccggatgaccttgggctgggctcttctgacccgcccggggcctcagtttcctcccgagccgttgatgctccggagggtcgaaatcgaaatctgtgaaccaggacggctcagtcgccaactaaacgttagtgtcttcattaggcaagcgtgcgttttaccattgaaaggcgtttcgcattccaattatggattgtcgctcagacttcagaattagacaagtggcaa

SEQ ID NO: 81026 - DNA, 1154 bp, Homo sapiens
cattgaacaatttggcagtcaagttatcagggattcctgtttttttagaaggatcttgagggagtgagtatggtgtttatggctatatttagtgtgcaaatatgttaactcctgacacactatgagaactccaaaaatgtacttggaaattacaagtacattattaatgtatgcaggaaatcaggatatataggtagatagatagatagatagatatagatatagggagatagatatatacaaacatatatagatacctatctagatgtattttttgagacaggatctcactctgttgcccaggctggcttgcagtggtacagccatagctcactgcagccttgatctcctgggctcaagcagattactgtagataggacatgcctgttaatacacatctagtattttaaattgacctttttaatttggcctcattaaaaatattgtctggcccatagcaaaattttagatgacctgagatggggaggtatcctaaatattacttgtgttagatatgcttttggtaacttctttctctttctctcttttaaatagggaagtatggaacacgaatttgccctgcttttttcttaagcataccatatacttgtcttcctgtctgggctggtttcagaatctataatcagccatcagaaaattataattacccctcaaaggtgattttattaagctttgatgtaccctgttctcaaactcatagggttctttcgcatccactggccactgaattgaaccatgcctctgtggactggagcatttggggcatccaaacagtgcgactgttttgattatgtagcattagcttacgtattaattaatgtaggcaagaaggtctgtttctgtctgaatacatctgcttctgttggcaaggccatactttggggagcttcctgtgccagtggtcacactggctctaactatcagattctgcattagtgtgtcaagtgaagtccatagtgtgtggttcatctaggattgttaatggcctggacgttgaacacctgggttcctctgtgacacctatgcatttactaccccaagaggacactggagggatactgctcctcaaggtagtctacacagccatacaatcttgactccagagatccaggcccatagagactggctacagg

SEQ ID NO: 81027 - DNA, 1043 bp, Homo sapiens
ccagtctgcattcactgttttgaattttttaatatgcacaggccatattctcttttgaatagtttcatttcatgctcactactgttggcactaaattgtaattttttacacttataattattttatatgtcaaacaatattgagatggatgatcaagtttattcacaaatgattttgaatatatttctttaaacaaactgtttctcaagaatttccattttccttcaaaaaaaatttacacaataccatatagctcacacatacagtgcagagcaagaatgtacatattcttaagtactcacgtatgagaagagagtgaaatgggacaaaatatcagtaccagtataacaaaagttagtaatttagaaaggaggaacatgaagtaatatttttattccactttttcttctgcctttgtttttatgaagaactctggtttgtagatacaacgataggccaagagctgaggaagaactccatatgctatgtttaatgctaaaaaaaggatttttgcttcttcagggactctgtagacataagcagttctagcatgaagagatgcaccaatgtgagaaaactgagcctgttgcatttaaaaaaaaaaaattgagtaagcatgaaacgtgttcagttggatgcatgatgagttctgaatggttcattcaggctacgtttctgtgccctcaaaaccagtctcacctgcaggcaaaataccttcaaacaatccagagtctttaatgtcagagtctttcattaaatttagtccttgattaaatttagggccattcttgatatgactgttcaaataaagtagatattatttagtgtagttttatcatgccagttgtgttttttaaccatcaagtgccccttaccgaacattagtggctcaatctaatagaaaaatctgaataaaatctcaaatttttttctgatttgcgttctggagatcctgcatacagactcagttgtggttcacaaattgcgttccaataaaaatgaagaaagcgcagagttttaaaaaacaaatatttttagcataa

SEQ ID NO: 81028 - DNA, 1027 bp, Homo sapiens
actcaattttttttttttaaatgcaacaggctcagttttctcacattggtgcatctcttcatgctagaactgcttatgtctacagagtccctgaagaagcaaaaatcctttttttagcattaaacatagcatatggagttcttcctcagctcttggcctatcgttgtatctacaaaccagagttcttcataaaaacaaaggcagaagaaaaagtggaataaaaatattacttcatgttcctcctttctaaattactaacttttgttatactggtactgatattttgtcccatttcactctcttctcatacgtgagtacttaagaatatgtacattcttgctctgcactgtatgtgtgagctatatggtattgtgtaaattttttttgaaggaaaatggaaattcttgagaaacagtttgtttaaagaaatatattcaaaatcatttgtgaataaacttgatcatccatctcaatattgtttgacatataaaataattataagtgtaaaaaattacaatttagtgccaacagtagtgagcatgaaatgaaactattcaaaagagaatatggcctgtgcatattaaaaaattcaaaacagtgaatgcagactggaggagtaacttttgcaaataagatgaatatgcttcattattaaactcaatataaaaggcaaatcatcagaatatttttaaatgttgtttgaaaaatgttttcccaaggaaagtttattatttgctgctgtttcaagaaaattacttttactaaatttttttgtgtgaatttaaacagctaaatagggatcagtaactttatctctatccttaatgaacatttgttttattggtggctggaaatatttctattgtatttctgtgtatatttttaataaaattatttttggcctcttataaagacaaatcttattaaatttgaaacatttcatatatacacataaaacgcttttaaagaaaatttgtgagttgtatattccaattcaaaatgccatctacattccccttatgtttca

SEQ ID NO: 81029 - DNA, 1072 bp, Homo sapiens
atggatccttgaagaccaaagattggtacaggtttcactataattggtctgtcacatgattgaatacctggataaattacttctatttaaattctggtgtttagtgactgaatacacttaggaaactctaaaaacaagtacctagagtttattagattatcagcatttattttggcagtatataaaatcttacccaactggcatacaggcagaattgtgtgaatgcagcattgtttcctgtgtacctaatgaaaaacatgtgattgccttggatggggataaagtttgcaaatgacgacaaagtaattagaatttttcttgtcagactttatcttccattgtaattacttttttaagctgaatttcttttagcattttggacttcatttaaacacctacttgaattgattttacttaatttgtgattgcctgctgagcttccacctaatgtgttgtgcaaccctaaattatctaagctacctaatgttgcctaggcatttaatagtgtggatatgtggcttttaaatgccattattttattgcttgttacaaagaccaaaagtaatggggctccacctgggtggacttaaaatttaaagcagagaaagggtaaagacacacttagcttactaatgtttatctattttaaattaagggatcatttcctttgctttccttgaagattacaacttcatgatcatttaatagccttttggctggtcacaatggctcatacctataatcccaacactttgagtggctgagacaagtggatctcttgagcccaggagtttgagaccagcctgggcaacatagtgagacctcatctccacaaataataaaattagccaggagtgattgctcacacctgtagtccagctacttgggaggctgaggtggaaggattgcatgagcccaggagtccaggcgagtactgagccatgatcatgccacggccctccagcctgggaaacagagtgagaccctgtctcaaaaggggggaaaaaaaagaatagctttttatttttaatatcaatgaaataacctagcataatggttctcaaactgttac

SEQ ID NO: 81030 - DNA, 1044 bp, Homo sapiens
cacaatatcgttaacagtaataatacttattattacttataggttaagttcatattttttaaagtcttaatttttggaatattttctgcctgcttcttgtgagatttgactagatggatggtcattgttcttaacttccgaagagattttctagaatagaagtgtcagcttagacatttaccttgttgtttgcttgcatctacattactaatattatttttgtgtaggaatctttcttttttttagccacctgttcatttggtgagagctagttcagttagaagtagatattccataatcctgctcaaccgggcacacaccaaatggcagtaaatcacagtatactcaacgtgaataaacataaccatctgaataagaatactattaatagtgtcaacttgcatataaaatactagtaaaatttactttttagctaaaagagtaagaaactgaaatcaaaattctgttttcttcccataccccacccaaaccttccgctgagatgtgagcactctgcttatgttaccccctactctaaaaggtcagaaaacaatgtaaacgaaaagcctcaaaattattgtgctttaactaaagcacttttttacacttaaaaactttatatgagaattatcaaatattgctagtagagtgtattgatagttacttaagaaaactgacttaatctacatatgcttaccttgtgacctagcagtctcttctaggcatatacccaagagaaatgagtgtttatattcaccaaaatactgtacaagaatgctcatacataacaactttcttcatgatagaacaggaaacaacccaaatgtccatcagcaggagaatgagtaaacaaatttgtagtatattcacatagtggagtactatttgacaataaaaaggaataaattactgatacagtggtcactggtttgtagtgggtagaaaggagttattgaataggagaaggcactggaaatgttccctgtcttgatctggatggtgttacatggatgtgtacatatgtaaaaatgtatcaagctgtac

SEQ ID NO: 81031 - DNA, 1037 bp, Homo sapiens
ttcttgtgcctttccacctccatatttgttttaggtagaatctcaaaccttattcttggcctcctgctacagtccacaatagctctctcttcctacataacaaggttgtcgttgggctctttttctagaaagcgtctgcatgtaatacatagcattcacaatttttattaagctctttgaggaagacacacaacactgccatgtgtgctttgtgttttagaagaaatcctttttatttttatttttgtatggttggcagttgattgcttgaaataagaaatcttgtgaaaaggagggtcaaggcattctagagattatattggtattctttaggaacggaaacagtcatggagaaaattggcataaatatagtgtgagctctaaaatgttgtattgtagtcaagtgaagatagcaagatcaagaaaaaaaaatacacccattcacaaaaggaagtgacatcacgagtggccagactgaaatttagtgaagttgaagtaatggatggacataatcactttttaaatatttggtttggcatgattgtcaaatggaaagaacactaggccaggaattgggggacctggtgtctggttcaggctctgttatggactaatcatttcaactgtctgcatatccattgctgcaactataaaatcatctctaggatcctttccaacactaacaacctcagatatcaagaggaaaaaacagtcttattcaggttccagtagactgaaaatagcttcgcatctgaactgtagattgtccttaagataaggcaaagtttttaaggtagaataactggttattttttatgctgtaatacagtattgcttagagaggcaagatttgtgactttaggagtccctgaatatatttgtgacttcagaaaatccccgaatctgtttgccaagtaagaaatgtatagctttagggccatatgtgtataaacacagtcaaagccaattaaaggttaccgttactagttggtcatttcctagtaccataatggctttttaaaatcttccctttgaaa

SEQ ID NO: 81032 - DNA, 1234 bp, Homo sapiens
tttgaaatttctctcccactatgtatggcttgaggaagactcttgtgaagtatgctaaatatgccactgctatcactttcacatttgcacactctaagaagaatggagtgtttgggaatgcttattcttaagaaaagcgatttccatctcccatacatattattataggattgtaataaaggacttttgcttaagttatattctgctgttgcgttggaaagttctaaataattaagtggtaggtttctccttataaatctggctcttctttctaaaccctcaagcttcaagaaaactgaggagctttttaaaaattactttttattgctggtgacatctataatatgggtcctactttgaggtgggggaggggatcttttttgtttgttttgctttaaatgtgtgtatttgatcccagctcagctttacatttaaacattttaaaagtgcatgcactcccaattgtgtggaatgccaggaaacgagttcattctgcgaggaatgagctttcagctctgtcctttgtgacagattccagagcgtctctaccttaaggcaggcgggtcaccgggccgcttcagtgacccccccctaacctgtaccaggctgccggcaagcactcctgtcagctctgtttactctggcaagactgatggcatccaggtggatttcccaacccccgtgcctcctcattctccgcccccacttctcctctccagcccacgaccacggctgcatttgccaatggaatagttaggcagtgagttgctgtgcaaaactcccatctgtgaaagcggcttttctcctgagttaaatcacttgctttgcatttaatgtgtgtagggcctccatctgattccctcctatccccatccccaccctgaagtgtcctctgagctttaggaaaatgtgtcctggtgcttgttactgctcctgcatttccctagatgaagtcactcgcctgggagggctgtgctgttaggcagataatcctgttaagcatctggagggcctggtcaggagatgttcagctcaagaatgtcagaagtagatagaatggtgctggaggtgggctccaggggcagtgctgagggtaaacaggctgcttccctgctggacatcagccttgggtctgccagcttcccattgccagcgacaagctgctgaccataaggaatcgtgattagtggatgactgttacatgttaagctagcccctcggatgtggcactaag

SEQ ID NO: 81033 - DNA, 1657 bp, Homo sapiens
ctgacctgcagctcagggggtgaggctggtactggagctacagatttttggtgatttccagcctaagcggagatttaaaaatgtatgtgtagacaaaagtgagaaaaggcacagcgagttaaaggcagactctagacagcacccccatttagggacaatgtttagcccagtaattgttgagcagtgaccactcaataaatatttattgaatagatgaaattttggggtggcacaacacaggaaagaaagaactcgtagatgacaggagagagaagaccatcatggaagggggacatttaaaggcaggagcaatcaacaagtgcttcagtgagctaggtattgtggagtgtcctcagctggtacagccaggaggccgagtgctgctgtgagcagagcagagcagagcagtgccagagtaatcgctggctgtacttgttacattggcttccttagcactggcaggaaatgaacctcctcttttgaaaacttttcctttattgggtatggacttcacaggggcaaatctcaaagataagcaaatctcagagataacgtaagcccttgggtgatttaagttggtttctgacagtaaccagaatgaatggttgaaatccttggaagttattggcactggagaaatattttgctagtcatgggtagtttggtttaactacctgtaatcagtacattaaaaatgaaatgaacagaacgtcttatttagtctttttttttttttttttcgcatgagcggaaataatttatgactttacctgaaaggagaggcatcacagattctctctgggcttcatagccatgttttgtggttaaaagtactcagtagatatgttttaatatgttctagaagtctttctaaaaaatcttgcaatgcaacaatttggtggagaaatcagaccggtttaatataatatgagggagctcaataataaaaaatgccagatgtttttctcagacaacattttaacagcaggttttaattcatacagaacttacctggggcaggggaagggagccccagatgatgtcaatggctaaaataatttccagggatctaggtctggctcagccactgaccagctctgtaaccttgggaacataacttaacccatctggaccttggtttctatctgtatgatgactcagggaatttagaagctatgtttctgttataaaaatgattgtggcaatggtttcacaactctgtgaatatgctgaaaaccactgaattgtacactttaagagaattgtatggtatgtgaaatatatctcaataaagtgatacgaatatgtctctgtgtctctgggtgtgtgtgtatgtatacatctcagtgctgaaattcttaagtaagttaagcatttcagagtaagacaaagatgataaagtggaccttttacagagaagggatccaggaccatggcaaactgagatagttttctgaaagataagcgaggtaaaattagctataacccggttaactgttccttttttcctgataccttccctatctctgggaaaaaacccctactttacagagaatgaagactcgtaaaccctggggattatgcatcattttggcagcacatggagaccaacaggaaagaggaagaaatatgctaaaatgagaagaatataagttaa

SEQ ID NO: 81034 - DNA, 1019 bp, Homo sapiens
cagaaaatatattaaagctaaaacattcttgctccttttcacatagattgcttgataaactaattgataaatccttttttttaaagtcagggtgtgaagatagatgtttaaaatggattgattttgattttttaaaatatcttaaggatataatacaatccatatatttcttaccactgaggactttttgttctataaagtaaatgtaactcatggtatcacttggaatttgatttaaaaatgcatttgaaagcagggatttttttccctattgctttagtttaatttttcagctttattaacaaacggaatgtaaattaatttcccaaagttaagtgtgtgtgtgggtatctcatgtgtatttggggaagctattactggcatgctttgcccagaagatagaactgtcagtaaacaactgacacactgttcggctaaatagtgaacatattctggagaatctttagcagcaaaatgtggacagttagattttgcttttcaacagaaacctgggaaagtgttgagctgaggggagagtctgagagaagtactattgatgagatcagggaggcattgtttccagttctaactattctagttctttgaaatgctttcccaatgggaattccttcccaatttccagggtcatcccaatgtttttaccacacacagcaccagcagccagtggccttcctgagccaggtgttgttccttctgacttccaaatccagtggataatggtgtcttttccccgtccctggctacatcttcctcagacagtaatgctactaagtactttgcctgttcaaatcatccatccgtggtagaggctgctgatatttcaggctggataacttgagtcctccctagtgaatctgatatccgagtcaaatcttctcatccttgtccacctttctttcttctgggccacaaatcaaaactctggagggtcttgtgagctcatatgtagtgcttcagtgcttctccagtgcaacagtggaagacacacctggctagtc

SEQ ID NO: 81035 - DNA, 1004 bp, Homo sapiens
agttttcaaccactgtttctttgagtgctttaccagtcctgccttcttttcccttctcttattggaacgctgatgacatgaatgttaggtcctttgttatggtccctcatgtccctgcagctttgttctttgtcttatttttttcctgcagtttattttctctctgttgttcagattgggtaattttcattgttctatcttccagttcacattttttttctctgtttctgcattctgtgggtgagatataggctaatttttaatttcagttattttatttttcagttctaaaatttccatttagctcttcttcatatgttccatttctttgctaagactttctatttttcactgcttctagcatcttcacagtggcttcttggcttctttagaatctttgtcagataattttaatggttctgtgatcttggtgttggcatctactgattgtcttttctcattcaactagaaatcttcctgggtcttggcatgattattgttttattaaaatctgggcatttggggctatgatattatgagactctggatcttaattacattgtctggttttgcttgttttctttgacattgctctggtaggggacatggggggcactgccttgttacttccaggtgggggaagtctcctctcagacttcactgacactcaaggtggggtctcattattgctgagggggagcgagagttccggccattaggcctccactgataacaaagcactcctacccttctctggttgggaggggtatgagtgccttgttactgctctgcacttggcctcaactgacaccatggcgggggcagcctcattaccaccaggtagttctgactctccactaggcatcctctgacatcaccccagtggggaggagcaagggcacctcatttctgctgatggaggcgaaagttcaggctccccacatgctgtccactaccaccaaaggtgggtgggggggtgggtgggtgttgttactgccttatgg

SEQ ID NO: 81036 - DNA, 1017 bp, Homo sapiens
ctgttctttgcctagatcctcttgatttttttggagggaggatgctaaaaatccagattttatatgaaatgtcctacttttgaaatattggcaattaatttaattttttaaaaagctgtgcaggccaaagaaatgtgtgtgattaattattatgatccactgccaaatggctggcactttttttttttcagagtcttaggtaagcgtatattgcttggatagttcatctgcaggttgcctttttctcagtttttgaatagtggaaggatgttacctgctcacccatagcttggccagtatttgctcaggagctgcatatggtctctgtagagataactcctggctttttgtctgaggatgttcctgtaaaccttattgggaggcagattgggtagtaatgaactgagcgcttgcccatgtgctgttgtgttaatccgttgaaggagcttggctggcagaatgtgagagctctggcatgatcggggataaggacagaaagctgtcaagtcatgatacagatttgacgatgctgggtgggcagagcagcagaaggcaggctttgaaatgggtgggcagcctcacaagtgggctgagcaaaggctggcaagaaatgaggtggagggagtgctttgcttgtagtgacctatttaggaatcttttgagaacaggatgcaagaataggtattctctcgaatgttataaggcagatataatccccttcttggtggtctcattgagccttagctcaatgtaaaagtgatgcatcttaaaacctattttaataaattttatataaatataactatatataaaaaactataattttatataaaaattcgttttaaaaaagttaactaggctgggcacagtggctcacgcctgtaatccaagcactttgggaggccaaggcaggcagatcacatgaggccaggagttcgagaccagcttcgccaacatagtaaaaccctgtctctactaaaaatataaaaaattaaccgggcggggtgttgcgtgcct

SEQ ID NO: 81037 - DNA, 2110 bp, Homo sapiens
tactcatgtgcaagtatttgcatcatattttcaattatttggggtatataccctgagtggaattgctgggttattcttaaatgttttaatcttgaagaatttttaaccggtttacctgttttttttttttttttatctttcttgttccttcttgttcttttcctgcaatgacatcaatttgataacatgactagttcagtcgtcccatcttttggcttggcctgattgtttcctcttgttcttcttcagtatgttcctctgtgccttgcatgtcttataatttgggtaccatgtttttattttctctgcagtctcttttttccgtctgtttactgtttgatatatttgcctcttctgtttggtatgtggactattttgggggaatgtgcccttattttctgttgtgaacccaaagaagtttctatactttcctgcaataaatctatgtgcaagaatgtttttgctcttttttttgaggaacggtttctgtcctcttgtgcttcaaattctggtcataggcatcagactgttgtgtttctccttccttatctgtgaatagacctagtgttggcacacagatgtgatacactggccatttgcagtgtaccactgaccctggcacaatgccttctcatatctgaggccaggggctgagctggtggcaccaccaatgggacattcctagtctgtggccccatcccaggaagctctttttggctgacatagtttttctcttctctcactatccatttttttttctttctttttttaattttcttttctttttcttttctttttttttttttcctgagacggagtcttgctctgtcgcctggctggagtgcagtggcgcgatctcagctcactgcaaccttcgcctcctgggttcaagtgattcccctgcctcagcctcccgagtagctgggattacaggcacatgccaccaagcccgtctaatttttttttgtattttagtagagatgggtttcaccatgttggccaatatggtctcgatctcctgacctcgtgatccgcctgcctcggcctcccagagtgctgggattacaggtgtgagccactgtgcccagcctcttctctcactatccgtttctgacaaatgaaaaaaatggatgtgggtcctgcagaacctgaggccagctctaaccagtctttcatggatgcatacacctgcctgcaggcgctgctcccaggtgaggaggttgcatgcctcagaatgcagttagcctgggcatctgtgcaccaggctgagttcttgcctaggagctgcagatgtgtgatgaatgcagaactaaagttattgaggagaccaagagacttgacctgggagtgcttatgtggtttggatgggattccttgaggcttttgtggaggagcagtccgtggagtcagggtgtccgtgggtcactgttagcccacatggtgctctttgtatgagttagaaaaatacgcctcttcctcgacacactttactttcatgcgggggaaaactctcctatcctgaattggttagagctggtgatttgacagccgcctgctggaaaattgtatgataagtacacaaatctgcttcaggagggtgtgctcccttccatgtggcacagttgtcaccccctgcccagctgcctctgcagccactttgggttttgtggctgatgttcactagccactgactatacatctgaatctcttcctgtcagtagaagatccttctgatttgggcatatggtcaactttttatttttcataactcttgctacccctttcctccatttttattagttttcatggggacttaagtgagcatccaggcaccgttgctgatctgtctccctgacccagaagaccatgttggcttttggacaaagatcctggatagttctgaagctatgatgctgtgcatcagggttgaatgggggtcctgagagtccagcattgcttgtgctagcagctcatagcagcttaacttgtgtagcagaatgggtgccttgtaatagatagccatctgcttttcagtttatggaaggcttcgtttcttctgacggcattctgacgggcaggtgttacatcttttgtgactcccaggttatga

SEQ ID NO: 81038 - DNA, 1262 bp, Homo sapiens
tcattgatctgcttttcctaatcatgtcagtgaatacctacacgtgaagaaaactcaagctgcaccataaagctaaaggaagaaggtaaaaaccacctcaaatttccgtgatacaggaaaaactgctgtgaccctccacttctccatcctggtcccatttcctgtttccaccctcatccagtttgcttttccagaatctttactgcttcctttgatgggggtaacgactctccctaaccaccccacctcccgtgggaactgttaccccatccatagccagcatttgacagcccaagggcaggtttatgtatttgcaaacgacattattctcctataactaaaaatgtaaagatcctttcgtattaaatagtccagtgtccctagggcacagtgcttttggatttcagcctgcttctgctttgtgatcttgggaaagtcactaacccctctgggcctctatctctatttaaaaggaagaggctgaaccaaaatgccctttccaggtgaaagcaagtggggaagttagacctatttagggaatagagaacagcctgtgggacaggtttgtgcttattgttggtgcagtttagtaggaattgtcagaagccgatagatagatagatagatagatagatagatagatagatagatagatagataatagatagatagataatagatagatgattgatagatgatagatagatgacagatagatgatagattataaattgatgtttgatagatcaatagatagataaaagggaaccaaatactgtctctgtggcctgggcatttttgccaggcagggggaatcacatcgttggtgacagagttgtatggcccacagaggccagctaagagattgggagaaggttgttgaccttgtgtgggaaccaacctcagggggatggatgaggttggggccccttaggggtctccgctcttggcgtctggactccccttctctgtgggtctaagctggcttctttctgctgtgggattgtgttaacactgcccctttagtgattttgcgttttttttttttttttttccgctgaccctcattagcagaggttttgctcttacacactgcattgtcccagtgacttcttatatgccagtcactggtgggtaaatgccagagggacactgagggctcatcaggaggactcagcctcctctcagagaggaagccaaggtggccagattacaatttgttttttctggtaaatgtcatgggtaggaaatgttatttgtga

SEQ ID NO: 81039 - DNA, 1038 bp, Homo sapiens
gagtgatgattgacaaagacctaaggtctaatgtctaatgtgtgctggggagagtccgagaatcctgtgggtacagagaaaagtaagacattagaagtccttatgtgtgttttggagacagagtccctaagctcacctggtcagtaagtgtctcttgcatgagtgaattggacagtgcggactccattctgcaaaaagcttgattggaggcaagtggaaaggaccttggaaaattaaccaaaatgcaatgaagctctttcctaaataccaatggctaaagaacttcaacatgtcagtgttgtatgaaatacttcattggactgaattgtcctctgaatttaatgttagcattccctcaagagtcttggctttctttttttgcctgcactgtctgcattacagtgcagtaaggcagacttttcttgtgaagtggtatggataagatttagaggatctgaacacctctctgctttggaattcgtggtagctaaagtgtaaatagattcacacatctgacattcaaagtcagaaattcacgtggtcttgcactgttctggtgtgcaagttggtttcagaaggggcttggtgtttgaaaggtgctgtaaggagtggaagaatcgatgccatcttcagatgtttgttccaagtcacaagcaaaccctgcttcaaatctgctggcaaggcctttgagtcacacagagcctgacttgttcactttgtgtttgtccagcttccatggcatgtggaagaagttggtcggcttgggaatatgctgaatcaagcaacataaccaaccaatgagagggggcttaagcttctttcaagccgggcaaacctttagttgttagaagcccatacttcctatgtggtggtataggaaggacacagacttacctgtaggtttcttgccaaaaaatagaattgcgatctgatcaatcttccaactatttatagaaagtacaggccaggcttggtggctcacgcctgtaaccccagcactttgggaggcctaggccggcagatcacgaggtcaggaga

SEQ ID NO: 81040 - DNA, 1066 bp, Homo sapiens
gagggaactgaggcacaaaataatatacctaaagtgaaaaataagtattgcagctgggattccagtcctggaaacttgatttcacatttgtgttcccaactagaacaatgtataattagtgattctgtgctactgtctttggcaatttcctagggaaaaaaagtaatcctgaaataaagttgctgagtcagcactggatattttaaggacttttgttatgcatcgccaagttatgttccagataatttctccctcaaatagtgtaagaaaaggcgcatttccccatgtctttattaacactaggctgaatatagtattttaaaatcactattttaattgtcatttctttaattgtgagatgaaatgttacattcttatccaccttttaattcttttatgaatcactgtttatttccattgtggtgtttgtcttttactggtttctaagaactctttatacattttacatatgattgtcgaattgctgcaaataattttcctgttagtcatttgaaatttaaataggtttttctttttacgtttttattgtggaatctgacataccttggaacagtgcatagaatataaatgtacagcttatcaaatgattatgaagttaacaactgtacaaccaccagttgaagcaatggaatcttgccagtttcccagaagttccctgtgtgttccttcctgatacaatctatgcccaactttctagaagaagccacaattgtggtagccagcttcacagatggcccccagtgattctctccttctggtcttcatacccacccaggattgttccaaggtgggccagtgcgaccaatagaatatacagaaacagtgcgatgttgtattccagattgggttataaaagactgtggctcccatcttgggcttgctcactctctcatggatgaatcactctgggggaagccagttgccatgtcttgacgacactcaggcagccctgtggagaggccccggtatccaggaactgaggccctccttccaaaagcccttagagaactgaggcctgccaacaaccatgtgggtgagctgggag

SEQ ID NO: 81041 - DNA, 1086 bp, Homo sapiens
tttcccaaaagaaagctggccactcagatgttctcactcataggtgggaattgaacaatgagaacacttggacacagggtggggaacatcacacaccagggtctgttgtggggtggggagaggggggcgggatagcattaggagatatacctaatgtaaatgacaagttaatggttgcagcacaccaacatggcacatgtatacatatgtaacaaagctgcacgttgtgcacatgtaccctagaacttaaagtataataataataaaaaaaagaaagttggccaatcggaagaacggattaaataaaggaatgctgtaggtcctgggacccccatgatggtgccttaggcttttccctttgcagaaagtaccacctctggcaagtgacctgcaggactacaggcagaagtagggctggcagagtgcctggtgtgcagtcacagaaccctccagctccagatgtaaacttttggctttcttcaaagtgttcgctggttcttaacaaaatgagaaaaaataagaacaaataaggaaaaaaagtaaatttccttcaaatctgaatttacgtgacgtcagatattatgttcttcctataattttagtattaaaagttcctttttaaaatgaaaacagcagcaatagttcaaaaggttgtgtcctttcctggggaaatgaaaaaagttgaaaacactttgtatacggtaataataataatcactattactactactacgggtatttactgcttatgaaatctaaaagtctagaaactcctatttctcttgggctctacagcatctcagtcagctgctttgtctccaggatcacatttccaattttctctcttttctctctcccagtgtaccgcgcacctgctggttccctcacccagtacatcttggctcccaggaagccacacccttgacatttaccatgcttcctgggcatttcctgctaccatccccaccctggacagggctaggatggtatcaggacttagtgctgcacaagctttcaggataccgggtaagaggggagtttgacacttggaacaatactggacctaaaaggagccaggccttggat

SEQ ID NO: 81042 - DNA, 1036 bp, Homo sapiens
tctatctataggcataaatggtagtgcttggcagtttaggatccattcacacagaaactgcatttgaggcaggtgtttgtgagcaccttttgaccccttgacatttaagcaaaggagaagtgggttcctcttattcgcagctgtcataggtcagacttctgcttgttgggcgtgtcaggctgggaaattcccctcaccgccaagatgtccatgtcctaatccctaggacctgtgagtgataacttatatgagaaggcaatgcgaggatggaagcaagagattggagtgatgtgaaggagagatcagggtccaaggaatgcacatgacctctagaagctagaaaaggcaaggacacggatcctctctcctagagcctccagaaggaaccaaccctgccagccccttgattttagccctggaagactgattttagacttctgacctctagagctgtgagaaaataagtctgtattgttttgctactaagtttttggtaattttttatagcagccagaggaagcaaatctactgggtgagtggattctatgcccgagttcataagtgagagtgaggccaaggcatgagttctggattattgtcattagcatttcaaagaattgtcctctggctcaaatcagcggtgttcacactttgcttaattgcctgtgtcttattttgttctccagctttgatcacatgtatgacaaatggaatcggaatgaattgcagaactagcaggtcgagtgcttgacatcacctcacagagatgtcatggatgctttgggaagtgctttgcttgacagtgcctggatttatgtagcaagatattttgtcctggggtaaagggagcccatgcaggtggggggggaggggaagggaatgggagctgatgcctaggcaggtttctcaaacctgtgtgaattaaggacccctctccataagggacttttttggtgtattgacttaaatttagttttattatattgctacttaaatctgtataaacataaaactaagtgttaatttatgcttatag

SEQ ID NO: 81043 - DNA, 1739 bp, Homo sapiens
taaaattacaaacctaataaaattcaaattaacatcactgagttaatgtcatggataacgttttgctgattttaaattgatgttctcaatgtgttttcacacacactcgtgaagttatggaacattatctttgtttctgctggacttgtttaattcactgtaaaaatatcgttatgttgaaagaaacatatacatcacagtaataaattgatttatctagaacagttttcagactctaatgcaaatattcagttggtttcattcctggaaaaataaaaaacagaccaagataaatcatagtatttagtgatgtacacttaggggattaaagtcagtgtagtaataggctatgagaggaggggggagggatacatggggggcttctggattactggcaaggctcaatttcatgatgagcatgcctttcttgagtctctctttttctgtgaacataaaacataagtgtactgactgttggatttttataaagtgaacactaatgttaccccatcaaggacaagaactaggacattgctagcatcccagaagctcccatgtacccttttatagttacatactcctctttcccagcaaaataacgactatagtatgttttgtggcaatcacttattgcttttatctatagttttacaacctaagtaggtgtattaggccattcttgcattgctataaagaaatacctgagactgggtaatttataagaaaagagatttaattggctcatggttctgcaggctgtacaggaagcatggtgctggcatttgcttgggttctagggaggcttcgggaagataacaatcacagtggaaggcgaaggagcagcaggcacgtcacatggcaaagcagaacaagggtgggggaaggtgccatacacttttaaatgaccagatctcatgaaaactcactatgaccaagacagcaccaagtcatgaggggtgtgcctcatgatcaaacacctcccaccaggccccatttgcagcattggggattacaattgaacatgagatttgggtggggacaaatatccaaactgtatcaggaggcattcctaaatactgtgaattgaattttgcctatttttgaacttctaaaattagggccatatcgtatcttttgtgtttgactctttcagtcaacatttttttttttaaagatacatccatgttgttctgtatgactgtagttcatttttatggcagtatagaataccattgtataactataccatacttttttgagctattttcctgttggtagacttctggggtcttttcagtttttggctattacaaatattgctgctatgaacatacttatacatgtctcctagaagacttgtatctaaaaatagaattgatgtgtcatctggtgttcactgctagatgatgacacattgttttccatgtgactttctttcttttctttttcttttcttttctttttttttttttttttgagatggagtctggctctgtcgcccagtctggagtgcagtggcataatctctgctcactgcaaactccatctcccaggttcaagcagttcttctgtctcagccacccgagtagctgggattacaggcctccactaccatgcctggctaatttttgtattttttagtagagatgggatttcaccatgttggccaggctggtcttgaactcctgacctcaggtaatccacctgcctcaccctcccaaagtgctggaattacaggc

SEQ ID NO: 81044 - DNA, 1059 bp, Homo sapiens
atcagcaaagtccactctctttagagtgtgggtacagtcttcagcctggggacaaatgccccagttgcctgttgcttagttgataatattaatggctaatatttaatgagacttaacagtgtcagatactgttctaaatactttccatacagtaatacttacaaggcagatactgttataatccacattttgtagataaggaattggaagcacagagaagttcacagttgcagtggagcagagatttccaatcaaggtgctttaactaaagaatttgcctttgggtatagagatggcgtgtggggatgggggtggaggggctctgttgatccttattgctttccaccatacagttattttattaagtcccctgatgattccccaggctcactctgttctttttatttttacattgtttagacttggaatttctctgtatcaacttttatcttgggagcagttttctactatgcatatattggttggctttatcctcagctctctaatcccatctgctctctgtcttctaggaatttctcaccatttatgatctgtcactggcaccctttcttgtttttcagccctgttatagatgttatggatatgcctctctctctatagatatatctatatagatatatgtagagaggaatgtggtacacagagaagatgtgtgtatttggtccgccatcttgattcaatttctgtaatatttattatatgtgttttatcgatttacttcctggaagtgagattaattaattttttatcgtgctgctataatgattaaattttgaagtagcatttagcgtgcagggagtacagtcacaatgtaatagcccctgggatttttgttctcttgagtataggttattagactctgtatggctttgttgtgattctgctaaacagagacttccagatgcggattgtcagacatgaacattatttctactattcaaacagatagggacgaagtggtccagcattgcttgttaaacttccttctagaagaataaatcaggataaatgcaatcaatgtaaatattaaacacattg

SEQ ID NO: 81045 - DNA, 1064 bp, Homo sapiens
ttagatatttagccttctagcagcctctttgtgctggtttcttatcatctgccttgtgtattcagcttaggaaatgtcaaaagcctcaagaggaaattgaacatagcttgtcaggtttgcttctttatgtttccctttttcccagaaatttggcctcttatatcctggtttccttggttacagtgtattccaatttttctcttacacaacctagtaagactgctgcaagttccaggctggtgttttctgctcagactttatgtcctatgttgcaagacagaacatttcctaaagagaacagtcagctgtagatgtatcactcccctcaatgcatttcccttcctccagattttggcccctcagattgtggctgtcttggttgctccgatgacctcaagatctctttaaacttggaaatttgaaaaaattttagacttacagaaaaggaagttgcaaaactagtacagagagttcacatatacccttcactcgtctttccctaatgttaacaacttacatattacctttactattgatacttaaaattgtgttgccatgttctccaagctgataacaacagagcatgactgccaactggttgaaaggagaaaaaggaacctttcaaaagggtgacatttttggcacagggcttctcaaaatgtgttccttagaacaccagtccttggagattttcctattagacaacgtccacagcccagtaattgtaggaaatgccacatcttacatatatgtgcccctttggaaatccacagtgcccattaccattttattttatttattttttttgagatggagtcttgctctgtcacccaggctggagtgcagtggtgtgatttcaactcaccgcacctccacctcctgggttcaagtgattcttgtgcctcagcctcccgagtagctgggattacaggtgtgcaccaccatgcctggctaatttttgtatttttactagagatggggtttcaccatgttggccaggctggtctcaaactcctgacctcaagtgatctgcctgctgtggccttccaaagtgctgagattac

SEQ ID NO: 81046 - DNA, 1669 bp, Homo sapiens
cccgcatgaacctactcccagtgccgtgggctctcaaagtccattctgtgcatcactgaagtgactaccacttagttcatttacagtaatttgtctctagtactattattttttaatggttcttattgttcttttcttgttttttaattgaatgtttgtgtgttgactctttgggtgaactgtgtgttccttgatgacaagtatctctcttgtctatgtcctacagcacttaccatgtgttttacacatagtaggtgcataataaatatctgttgactgcatgagaaatgtatgtcttcctgtgcctttagatatggttaccccttccaacaattttcttaaaggagttagttcaaaaaatccaacaagttgaatccaagtttttttgtttctgtttttaataatttaggtaaaaaactgtgacaagaaatcattgtacaatgcaattatttatgtttatttctgcagctatttagtgaaaaaataagtggtgctgaaggaactaaactagacgatgaatttcttgacatggaaagggtaagagcattttaatatgtaaattgattagaaactgactttcattgtgatatgagatatactgctattgtaaaggatattcgagtggaaatctaggatgtttaaatataggtgtggattatgcaatctacaaggcagtactttcccacgtcccagcccaaatcagatcctccccctgtagccacatgcagtttgggcaggtcgagtaatgagatcgatgtggctaactggtaccctctagtggccagaagtcagaatgtgcaaaagatgggcaatcttggcagttactgcaaggccaaagtaattggtagtatatgttttggagaatcaaaatgtatttctgggacaagattttttgaaatgcagaatgatttatttaccgtgtggaagacttgggctctgctcccatgtgttgcaggagctgcatagcaagtaacttttatcctggttctgcctgtagaaccagagtgtgaacttggataagtgaattcatctttttgaactgatacagagatgacaagtgtgccctgcttgtctcacatggattttgtgagaattatgcaaacattaacgtatttgaaataacttacaaaaaatatgacgggcttgagacagaaatgattgtaacatgctccaaagaaaaatggtatcatctctgtcccttaacatgtttcccagtcagctgtgtggagttgctcaggtggaggcagaactagaaccaccagtattaacaacatactgtttctttgctcattgtctgggccctttaaacatagccttgttttaataattagaccccccaccccagaggagagagggaggaaatgaagcaaggcatccaccctcaggtgtaacatcaaggctgcagatacagtaggtagcagagatgtcagcaggtgctggggaaggaagtccagccccaggctgcgcactgcctgggagagtatctccccaggataccttggctctggccagctcatcttccagggagttctctgttttctggatgagaactattaaatgtctagaaatgttaatgccttgagggagaaaagcttattttgtttttgcttttgaaagaaaacttaatttctgaaccttaaaaccatggaaacatgttcacaccattgac

SEQ ID NO: 81047 - DNA, 2202 bp, Homo sapiens
tttaaatgggagtttagaatattatgccacttttgtcaaacttcacatactctatgtcttttcatgttcagtttttaagtttttacggagtcagaattttggtctttttatttatgacatttgaatttcaggtcctggttagaagtttcttcccactccagtatttcaaaatactgttgtctgtatgttagtcgttttatagtctgatttttttaggttgatatttttaatcatgtatatagtatgaagactcactttactatcagcttgccaaattttaacaaaaaaaagaaaaaattgaaattatgatgggatttgaatgaattttgcatgttaatttgggaagaatgcatatctttacaaaattgagttttcccatctaagaatgtggtttttcaaataggtgttgtgaatttctcataatagttattcttcattattgcatttttattgcttttatgaatgagatctttttcttttgggctactgatggtataaataaagctattgcaacttgcattttaactttattgtttattcccatattaactctctggttaactaacaaccagaaagtccaggaatggttttgcagaaggaaagattcagtcttaaccagaaagggttaactttcagggaacgtttggggaaaactttgatgttaacatcttctgaccatagcacaaatgaatgtgtttattgtattataatataatactaatgattatgattcttttagtgttgattactgaggcagttgctaatatgaatcattactgtggcatccttatataagtatagaaattcaagttcacctagcagataaggagagtttggttcatatctagtgttagttttgagagacttccaagtatatctaataatctagtggagcataataacttttccagattttctaaatattaccttaatattcattttaatgtttaaagggaaagtaaagttctccaacatcacttgaaggaaatgatgttccaaaaatcagaaagtgagaaaatatcacctctcccaaaaatgttgaaaacgttcatttggattaaaatcatcataatcgtgttagaagaattaaattaatgaaaattcctcctctatttgctcttttgtgattttattgagtttgtcatttactaactttttttaaattttgcttttaagaaaatagatgttaccaataaagttgttgcagaaattctttcaaaaaccactgaatatcttcagccaaatccaggtaaagttgaaatattctcttgttcatttgctgtcacagactctaataacccatgtttacttggtgtttagttgacataatgtagaaacaatgtcgtctgtgtcccaataatgaaattcagtttttaaagctgagtctccagtgaccaaaggtagttgcattcggtcctactgatgagaaagagaacagctatttttgtgaatttcagttgacatcatccgaatggagtgctggtcatagcaacaagagagcactgagcaaaggttttatgagttgcttcagaaagccactaaacatttggcaaatattttcttccttatttcctctttataatttttttaaaaattctgcccttgtgtactatatacataaaggtatatgttaatttgaaaaagctttctctttgtggcttaaatgctggagaaacaagatgtggtgaatacgaaaggctgcttaaatccagtgtcacatcagcttctccactgaaggtctgggtttctaggtccccaagcagcatctattgatgagattttcccaggttgtaaattataggaaccaatagagggcgcccaagctttgagttctgtggatttctaaagccacctttcctttttaggaatttattatctgcgtagagttcctgtgattcccttgactgtaggaatcagcacaaacctaaccatttgaaaattgagaaagtaaaaatttaagaatataaattttatcaggtgtatccaggcaggtctaaagttctttacaattgtattgatgataatagctttgaaaaccataaaaatatatcttctcctccctggccacatcagtgattgaaatcagccacacaaatttcttttcctgatatatcagtcaacaaatatttaatatgtgctttctctgcactagaggatttcggggtgctggagtacactatgaaatcagacagatacttcacc

SEQ ID NO: 81048 - DNA, 1021 bp, Homo sapiens
gtttggttaacctggttagaaattatctggacattaagaaggctgaagtgagggatcgtataaagaacgttggaaaataatatctgagcatggctactgcatcattacattccataaagacactcattcattctatcaccgatctgtccattcattcattcattccacaaatattcctggagcacctgaagtgaggggagcctccatcaggtgctgaggtgctcccaacagcagtgtaaggtgggttcctgccctctggaatctaggccgagaaaaagcaatgaccattttaatagaaataattttttgtgccaggttttgaatgtagcacctctctgagggactccattctctttttttagcatcacctgaaaaagctggaaggccgccgcctggattacgattataaaaagaaacgagtaggtaagataccagacgaagaagtcagacaagcggtagaaaaatttgaagagtcaaaggagttggctgaaagaagcatgtttaactttttagaaaatgatgtaagtatttaaaccaaataggagattttaatgtaaatgaatgaaacattgaatatatgactatgatcggcatgttgaaaaactctaaagcaggagtgtccaatcttttggcttccctgggccacacataaaatacactaatactaataatagctgatgagcttaaaaaaaaaatcataattttttttttttttgagacgctgtctcgctctgtcaccaggctggagtgcagtgtctcggctcactacaacctccgtctccttggttcaagtgattctcatgcctcagccttctgagtagctaggattacagccacgcaccaccacactcggctaatttttgtatttttagtagagatagggtttcaccatgttggccaggagggtctcgatctcctgatctcatgatctgcctgcctgggcctctcaaagtgctgggattaaaggtgtgagccaccacccccgtccaatctcataatgttttaagaaagtttatgagtt

SEQ ID NO: 81049 - DNA, 1043 bp, Homo sapiens
cccaggtttatagctgaggagactcagagatgattgtttaggcttcagaagcccatcttactctcttcttggggtcaacagcagttagatcagagggaatcacctgatccttttccatgtcagtgtgtctgtgccatagccaggtggtctgaccatcctctcctgttgaccagacaagctagagaaaaatctcctgctggtcactccttggacctgacatgccaatgccgatactgcctggtgcttggggataaacagagaatgtgactagttgggagaaagacaaaatgccaatacatggttgatggggcatacattgaacccttggccctgtgtttggcccatctccaacaaccaggccagagctggtggccttgtagcccatgggactctggtttcctgctccctgtgagtcacaacccgcacgtccaaccttggtcactcaacctcttgttgccatgttgcttcctttcctggtggggaagtcctgcatgaggagctgtgcttcgggatggctggggagggctggatttcctggcagaaactaaagatggctgggacctgttctaatcgccatgtcaaacacagtgggtctttgggtgctgctgcctgatggattggacggtgtttctacctgatctggtacctgctggagacaaggtgcacaaactgtcaaatgagtggctgcaagggaagcctggtggcaggcagcagaggccctgacacttcctccagacacaagtgggacatgcttctgttactgtggtgggaagtttggggatgtcagtcacagccattcaccctttgggttctgaccaatggaggaagtgacaaaaaagccggattggaatcaagggacatctctttaactgatgagaatgcttgaaaattgtaaaatacagacctcctggtcaactgtgctgaaggacatggcctgggcctaaagtcctgttggcactttcccctccttgcaccttcggtggatgacagccagctctaggggagagcccgcctgtcttaccacccagatacagcctgagacg

SEQ ID NO: 81050 - DNA, 1051 bp, Homo sapiens
ggtctccagatgtagtacttcctagggttttctggccaacaggccatttgcagggatttccagggtgtggttgttcactgtcctcacctctgcattctcccaactgagaaacaaacccagggagccacatgagatcacatgccagccccttgctcagagagcagggctctctagaaagccatgttggaaggggcagcttgggcctgggcccacagtagaagtccagtgagctattcctggcctgaagtctagaccttggagcccctgcagagagagcgggtgcagagaccacaaagccagatgacacacgatcttgtggccacttcacaaacccactttcttgagaaatccggagcccagagccaggcccctactgcctttccttgcagtgtctaggtaccctggttattagggccaagtgggtgccactcccgtaatctcaccagttagatgaatcaccaaaggaaggggaggtagagagacatgacatgctaactctaacattcctaagcagaagttttatctattttctcatctatttttggcagaactgggaatgggagaatgaagaagagtctccttcggccccacactgtagcctttggttgtcttgtgaatgggagctggattagagacattgagcatctcttcacatcttgcctgaggctgagcagtgtcgttattctataggcagtgatgcaagccaggaggtgttttggttctccaactttccagggatccaagaggggcagtcccatgactgatttctcaccaggccaagttgggcttggcagggtcctgagaagtaaccagggcagccctcctcttggaggaaagtgtgggaaagtcagcagactggttaccagccttcattgccgtatcttgggaacactatatcacccataggcttgttaacacactgtcacctcttctgtctttgcagagaagtttattcctcattattcctcacaacttactagtagcaaatgtaggtctttgacattagcagaaatcagagatattccatagaagatgcctatttcagtccagt

SEQ ID NO: 81051 - DNA, 1397 bp, Homo sapiens
ccatggtccccagcacacagctcaatgctcatgacctgggggacagctggaagcttcaattttctgaaatcaagaggaaaataatctatcgtagcacacctggtctttactgtcaacaagagacttacagcctagtagccagcccttcaggacttgtactgagcacctgctaggtgcaagcattgggcagtgctgccattgtttcccaaggtttaagggttttcaggattcatttccttcccaaagtcagccacccaatgagcagttacgaatgcatctctagattacatcaccttgtgttttagccacgacagggaggatagctggtaatccccttgcccccttcctgttccccaaccccaaatatgtttcaagaaatattaatttagctatctttcactatttctttaaaaattataaaatgcaagcattttttaaagtgggtaataagacagggcaaataaattttactaaaggcagagaggcatagcatagattttgccaagcacaccactctagcactgtaaggaagaaaaattgtttctgtaacaaattctactacgatcgtgctaggccatggccctggacttatttaaaagtacgtgtaaaagccaaagagatgaaatttaagaaatccttaggatttagtaggggccaggctgtctttgttttgtttattgggtttttggaaatttaaggctaggcttgttgcttttccagccacagagcatggtaaagtaaatgaaacccgacaggatttcattgttcggatgctgatcacagcttggcacacatggaattcaatgtgtctcttacatgcatattgagcccgtgtttaaaatagtataagtgagtaagaaaaatttaagtacaggcaactaaagaatgatttgcaactacaaatgaaagtagcttggatctttgaaggctaagtccatggttggttaggcagggtgagattgcataaatgaatcagcaggcagactttgccctaaagctgagtagaaaatgaagtatggaaatgatgcataggctttggggaagcctgggaagtgtaggattgattttgatttgtgtctttgtccagctctagagttgattggattcttgctgggggaggcccatcacctcaaccctctggagcttgcctctggggctttcagaaataagcttaattaatctctttcctgtagcagcccctcagacacgtgggggagcaggaaagctctcaggccttccttagattgcttttcctcaaattatacagccccatatcatccaggtttttccttatgagacacagctctaaaaaattcattgtaagttagtcattaatttcatgaatgtcttgatttgtgggaaacagagatgccagtgtctttatagttcattccctt

SEQ ID NO: 81052 - DNA, 1029 bp, Homo sapiens
cagttcacatgttgctccctggccccctttcttatctgtttcatttacagttcttaactgtttaatgtacttaatgtcttgatttggcttagctagaaagtgcgtgttgagacacttgacaaagtaggcagttcttttgctaaatgttggcttcgtttgtaactggaagagctttatctctctgttttcagatccatgagctttatagcatagaaaatctgctgagaaaaatcatcatctaattggaaaaacaggcattttattgagttaaatcaaattcataatcacaaataaatttgaacatgtttttccagcatttatagctccataccatgacctgtatgattattatacagagctcctacatgaaattaaatgaaatggaccaaggcagacactggtcttccctgcaaagctaggtctttgctgctggtctcctctctctctggacattacacaggctcgggcctccatggaataattttgcacttctgctgcaggtagaacaagtcagccagttggctgtgttcatagaggcagcattagactatcacagacagtccacagagattctgcaggagctgcagagcaagctacagatgcggtaagcacctccacgtttcttacaagccaagggctgcggaggtaacatctattgaaatccatctgtctgtctctccatctctccatctcccccttcccctgcctcattctgttttgaattttctttcactggctttcatggttggatgtgggatgggactgagataataagtactggctttggccagtaggatagaactgggaaaagggacctggcagcttttctcctttttcttttcattaaatcccttttttttgtgacccgtgtttagggcaactaaccaagttgctctcccacctgggacatcaacccctacagaactaccctggcttcattgctgatttgatgagagtttaactccccattcacaaagggatggaaaacatccagagctatggaaaaaagtgagatgctgtatggaaaat

SEQ ID NO: 81053 - DNA, 1215 bp, Homo sapiens
ttctcgtgtattttctaatccccacaaagaaactgtaagctcccagagagaaggaggtgggcctgtgattcctctgtcgctcccttagggctccaggtggagctgactggctgcttttgggagatgggctgggcacgacttctctgcctgggagtattgaaaagatagactctgggctcatggggttggcgcaggcagctgggagagctgaggcagccagagaccacaaacggcaccgtgagctgggtggagctggccttgtgggaaggaagcaaggcctgctgttaagggtctctctgagcttttccacatttccaatttcccatggataatccatcatgttcatctgtactttttgtctccatatcatgtggacaggttctaacattcccatggaccagccctgctgtcgtggtctctatgactttgagccagaaaaccaaggagaattaggatttaaagaaggggacatcattacattaaccaatcaaatagatgaaaactggtatgaaggaatgatacacggagaatcgggattcttccccattaattacgtggaagtgatcgtgcctttacctcagtaaatgtgtaacacaaactctggacatactttcgtaactgaaatgaattcacaccagtgtgctctcagtgcggtgttctgtgacatcctttgctctctgaccaacttaatgacttttgtatgtgtgctctctttataatgtattttatatcactttaatttgtataaatgattttcttgtccttgctacatgaaaatattttcttttttgcttcctgtcctaaaagtcattggttaaatgtatttgcttcctgtggctaaaaataagtctcacccattgcagttatgtcaacgaatggcctatattcctcagctgcaatgaaatggtaacatttgaaactaagaaatgctaaatattttgtttctcgacattcctgatgacgtctggtcttttcttttcattgtattttaagcttacctgtgaatagcccaataaacatgacacactgtgttggcaaaaggccttggttatttttaatgttgaattgttgatttttaagcacagtcttccagctgcaaactcacaccccatggccaaccgaagtgtcacagcgcagatgcttagatgatgcctcctgatgggagccttcgctttccacctgattcaaacatgacacgaatcctccttccagctg

SEQ ID NO: 81054 - DNA, 1075 bp, Homo sapiens
attcctacaatatttttggcttttaccaaccctattatataatgagtaaacaatatcttttttggaatttttcatccaaaatattccctagctagagctttacttaggaaaatatgatttcctaagagatccttaagcctgataatttgaaccaaacaacacaaagtgcatactgcttctttggaagtgttttcatagctttccttttagtgttttccttttccctttaaaaaaaaagaacttttattgggtgttttattgtgcaaactatacatgtttgtcatataacattagaaattatagatgatcataaaagaagaaagtaaaaagtgtttgtaattccatcacaattagaaaacagaggtgagcacaaaataaggactcacatgtaacctatcatacggaagaaggtgatagggatacatgaggtgcttccagcttccagcagggttggtatgttcagtggaaagtctatcccagctctcctaaccaaggtacaaattgctcctgtttcagggtctccttcccctgggccccttgtgtctgttgctcttgacaaccaaaggttgccattgcctcaccacagcccttgtccctctcacctgatgctcattgatttgtgagctacttgagggccagatccacattgtattcacagggcactgagcacagagccttgaacttagcaagctcttggtatagtttgtgtgagaaaatgaacgaatgcatgtgagttcatgaacatcagtcagaaatgcgaattcctcatgaaagaagctagataaaatgaaatacttttgaaaagcagaagtgtagctctacttgcaatatagagggggaaaaaagtaaaagacttcatagagatatcgaaagaatgttgtggtcaagcagatcacagcagcagatgtatttgatccaagaggcgaaatgctaactgtgagtgatgatagctgggctgctgtatttgactggattcctggtcgtgaaaggaagtggagcatcagtggggaaaacacacagatgtccataaagaaaatgcaggctttgtctggggtaagacagaaagcgcttctgc

SEQ ID NO: 81055 - DNA, 1050 bp, Homo sapiens
ggtctcacaactggtgagtggtcaagatggttctgacctcagagttcatgtgcttaaccaccctcccaaagtgtcttccaaggacggcgagatgagcatgaggcgagaggtgcaccgaggcttagagtggtgggacagggaacaaagatagcacagaaatggagtcagaggggagcaaaggctgcctcagccaacccaccccttgtttccccttggcagagcccagccagctccatggttcctaacccagggtgcacatcaggagcacttggggaacttgtcccatgttctaatcctcaggccccaccctagaattttgaggggtaaatctgggcaattgcaggttgccaaacttcccaggtggccactggtgcatgcctttggttaacgcctctgcttttcagtgtctgatgccccactacagagtcagaaggcagatgactgttttatcctcaccagcctcctgatttcttagaggcagtattataaagggcagaaaatgagagttacactatgatgctcgagaacatctggacagatatttgttattagatgctgtgtgacatagtcccatctcctgcatgctgttccaaagctagccctgccaataagcacagaggcatacattattggtcagtctgcctgttaccatggtcttttgaggtaaaggcagtttaggccagtaaataaacatacgtcaggttgggagcagatgtttctgcataggagctaagggctgaagatactcatttgcagattgagcaatcagagactttagtaatgtggcctaacagctcaaggcatgctggtcagttttcagtttgcagccgattgttctcaacaaggcaaagctctgctgtgttccttccttcttttgtaaaaaatttgctgttaatttcctacatttgctttttctacttttgcttactggcatactgcatttttctcacccccatttgcaaagtagtgtatagacagtcctccagctgcagaatcagtgttgctacccattgacttttccttttttcgccttccaaaatcccccactgc

SEQ ID NO: 81056 - DNA, 1028 bp, Homo sapiens
ggtttttggggacttcctctttgtctcttggctcctaactgttctcaagcctgattcgtcagctcccttctactctgtcagttccctgacagtctttcagtaagtcccttttacttaagttagccagattagttcttaagcttttaaccaagaatgctttctggtggaacagagcctctctcacccttgtggtttggccaatggagaaaggactctcttgggggagcaaccttgaacttggctgtgtttccaggcttgcttcgatgtagcaggctggtcttagggtactggcttggctaccagggcccttctcagtaggatcattatgccatgaattggtcttaaatgtgactttctctctgtctcatgtaggatagttgacactggcaaggaccagcttcccagaatcagacacagaggagacagcttctttaggactctccagtgacaagctagtgccagttctgtggtcaagggttgacatgggttaggaacagaggtaaataaacgcttgagctgctggaaagttccatctgtgcatccccagcctcccctgcatcttttcctttttgtgtaaatttccattcctggtaaggatggacacatggagaaacccatcttttttaatacaatgtcatcccaaaaaaaatcacttggaggggtggtggcccagaattctgcatccaggggcttagtgcagacttctcaggctggcctggaggtggtgctatttgcatgtggtcagtctgggataataaagatgctaccagggtattggataagaatcactagctgaacttcactttgcatctctgtaattggattcaagaggttaattagtgaaaaacaggtgaatttcacataatctttggagtggtgcagaggactttctaacacaaaactcacaggctataaaaagataagattaacaaatttgactgcaaaaaaatttcaaatttctatatttaataaaccagcagaaaacaaacagcaaactgagaaagagtagcaactgctgtgacaaaggg

SEQ ID NO: 81057 - DNA, 1045 bp, Homo sapiens
agcggagtttggcaacaggatgtaggtttgattagggtagtgagaggctaggggcaggagagcagccaggaagctcccttgtcttcaggtgtgcagtgatgggggtctgccccagatggggcacgtgtgagaaagaactgatagtcaccatggctagcactttccaagctctttctgcaagccaggaaatatgcttagcatctaatatggaaaactcatgtaatcttcaccaccctggaagataagcaggattatcatcaccagagatcccttaagatcatgtgcctttgtaccaggcagaaccaagatttgaacttatgtgtgtgaggacatagcccatgtttttaagcgttgtcatatgtatgattctaagagacacttcctagtgggtgttggaagttggggatgcagatggaattaagacagtgactacagagcatctggcctggaggattcagaggactgggaagagaagagaaggaaactgaaggggatttggggcagagactatcacaaactccagggactgggtgaatgagtagagctgtcctctggagaaagggactgacgccgaaggtctgcagtgacccagccctgccctgggcaccttcatgcttgtctcactaagaatcctgtgagtggctggcattgtcatttcacagataggaaatataagtgcaggaaactcacatggctgttgagtggtggagccaggattcaaacccagacctgtctctttctgcatggagatctcagttttgcttgaagcaaagtgcttgattttctttggccctgaaaaaataactgcattttattccttctattaaaataagcaaacctgtctccctattttacagctgtagctgtcgttgcttcccttccggtggaggtgaccagtttgtaatgaacttctggatctccagtcagatactatggaggagagagtgatggagggctgaggagaggcctcaggttgttatttggttggggaggcacagagcagaggttcaggtctcagcaggtgtcagaggtgattacagccctt

SEQ ID NO: 81058 - DNA, 1058 bp, Homo sapiens
ttcaccgtttttctgaaattcgaatttaaccgggcggtcctgtattatttctggccttggagcattcattgcccctctcttgggctgcaaacacctggccctaaaacgggcgatcatttggtcctcaggtcctgcttggagctgacagcgggaaagtcccgatttcaggtcacttttcccggagctttcgcggagaaaacccgtaacccacccatgccgggccgcagctcagcctgttaaccccgcccctaacgggaggccctgcccacatctcgcgagagccgcgcggcccccgaaggctcgcaggcggaagtgagacgccggaagcggtcgttgccatggatcctggggacgactggctggtggaatccttgcgcttgtaaatcgtacggggctgggacatgggagctgggcctggagcttgcctggcgggcggatgggtgtgggtggaggcacgttggggatcctggtgcagagtgggccagctgtggcctcggggctcgccaccgtggaggactccgcctgggcctaggcccccatctctaggaaatggctccttcctgcgtgcgcgcgttgtgagattactagtaagagccgcgcttgtgaagacgcagtgcccagttagtttgcgccagcctctgagttcagctcagaacacagatgatctcattgattcctcacgtcaaccttgggaaatctgggtaccctgggacgtccacacatgaggaccgaggctcagggacatcaagggactggcctggtcccagaaacagggagtaaaatgggaagtaaactcagtcccacgtctgcctgactccagagtttgggccactgaaccatgcggctgccatcttggagttctttgagctgtgaagtgctgtgcatcgtgtgattctgtgtcccttttgtgcaggtaccaggatttctatgcattcgacctgtcaggagccactcgagtccttgaatggattgatgacaaaggtggtatacctttctagccctgaaggagagggaatctcactcctgagctgggtttcaggagctaagcctagagggac

SEQ ID NO: 81059 - DNA, 1067 bp, Homo sapiens
tctctacctgttcaggaaaagctgagggagcaggctttgccaccacccagacacctttgtggctccttggtgaggtggaagcaccaagaggaggaaggttaagtgtcttcccgctacaagaacggaaacgtgggagagatgaggaacttttcctctgaggtaggatcctggctgcttgacttccttgtgcctggacacctcctttccaggtcacttcatgggcaagaagagtctggagccttccagcccatccccattggggacagctccccacacctccctgagggaccagcgactgcagctgagtcatgatctgctcggaatcctcctgctaaagaaggctctgggcgtgagcctcagccgccccgcaccccaaatccaggtgagccgggcccctgctccaatgtcaggagggcccagctggggccatccccggatcctgcatgggaggaattaccacccagtactgtattagggtgtgactgtctgactaggacattatgggtgtggaccccagaaagccaggtttccaggcttttccctcttgaggcagagctcaaaggaggaacagtccaaagaaaggaagctgaccttcccagtagaccccatggggcaagaagtagggaaagaagttcccctgactcatcacccagtctaaagtaacagactgggatcatcagccttttggagcaggacctttctcccccagtctacacagtcttgtcccacccatgctgttccctgctgcattagtcaagtccacctttgctgtgtcctgtgtatgcttgtggccggaatgggaccctgaggcccagagagggaaagagaagtcagcagccaagacagagtctggaccttgttcacctggactggagctcttcccattctctcatctgcctcagtatccagtggtagggtttagcaacttcagtacatttgacgttctaggctgaatcactgtttcttgtgagggctgacgtgtgcatcatgggatgtttggcagcatccctggtctctacatactagatgccagtagcatctttcccccccatcaagttgtgacaact

SEQ ID NO: 81060 - DNA, 1056 bp, Homo sapiens
taagcaaacataaatgtattcttctggagcacagtgttttcctctgctcattatatgataccacttatccagaagttctttccaagaaagtccagacagctcctggggagaacaaagtgccaggtgtgagagggcaggtcctacagaattgttgcttccggccacagagtacttatgctaaaacatgtaaaagtattaaaattagggcagtgtggttattaccattttacagttgaagaaagtgaggttcagccgggtcacagcttgtacatggactcctgggtgcagtgcagtcctgggtgcagtgctctttccactttcttgacccagaggtctgcttcctgcccataagccaggccctccagctggatgcccgttcctcagaagcggccctttgtcccaccctccatcattctgcattcccattctgagcacctactgtgtgccagaacatttccagactgtgatgctggctgtgagagggcagagagcaaggtgaacacgggtcagattcccccaaagggcggaggtgatggggattagtttatggaagtcctttggtgcctagcacttggctggacactgtaaaaatgcctctgttagcctgggaaacctagcgacatccagtctcttggaaagaaaaaaaaaaaaagccaggcatgaaggcgtgtgcctgtggtcccagcttctggggaggctgaggcttgagcccagccctggaggttgagtttgcagtgagccgtgatcgcgccaccgcactccaacctgcgcgatactgccagatcctgtctcagaaaaaaaaaaaaaaaaaaaaaaaaaagcctgttacccgggaggagagctcctcgcccgacctctaccctcatgaagagaggctcagagggctgaagtgcctatttggccgaaagccgtggcagagtggcaaggcagggccaggggaagcggctccgccgccggggccgggcccctgtttggccggtgcccggtccttagcctgaaggtggcgggcttccgccagaagcccctggcggaagcggtgcccgcgtgcgggccaga

SEQ ID NO: 81061 - DNA, 2236 bp, Homo sapiens
aaaatttcattcacaaccagttgtgtaaaagtattatttttcctcctttgctgagtgtttccacttgtattatgtcatcttatttctgtttatctgagtcttaccgtcttcacaagttctgctgtcactcagcatttgcaccctcacactgtttgtttaaatttgtggatatggcctcgaggtccttggcagattgtaagctcctccaggacaggagccccatttcatagacactgttctgtctttcctcagtagcctgaaacagcatctattaaatgttcagtacgatcatgcattgtagtcagaggcagtagcttcagttagcattgttgttgagctgttatttggaggcagagcatatgaatcattaaagtgatctgtactttcctgttatttagtaagtacattttcttggtcttgccaaatttgaatctgaaaactttctctctccatggttccatttaaacagcatgtacccttcccagatttttaactgttaatcctgcttccttcttttttgtgtgtgtccttaggcttaggctgttgtgtcttctttcttgatgggagaagtattggcatgtatcatttttcttaaggaatcacaggcttccttcttagagacccagggcttggaatagagaaattctctgttatcctgagtacatttcttagtatttgcataagccttttaccaagtctagctaacctctcagaacgtggcatggaggctgatttcagaatctgagggctgggcctcttcttatgacattttccactgttaaacttcagagatgacccagctggttctagctaggtaaatggatgtctaccttcatcaagcagctctttcactcaggatggcctgttcaggttgttttgtagccaggtatatcttcaccactactgtctcttgctagaacagtaagtaatacaaggtaggctttcagaagtaaaatagcaaatatgacccttcacacacaactatggtgggtgtgaagccaccatagttattgccattcaattagcaaataaaacctctctggatatagaaagaatgctgtgtaaccaaaaagcattatcaaaactagaatgcgcagggcttaccaaaaaatggtgaagatgttgccttccatgtgtcattctaggtcctaaggatttttccagctgcactctcaccagacatcacattcttgcaccctggacgttggtcttacggtacagacattctgtctttgtttatgctggtcactctgcctggagtgcctggtcacttccctacctactgaaagctttctcattcatttagcagacatttattgagcatctgctctgtgccagattttgggctaggccctggggataccaagatgatggataagactatgtccctcctggtcagtaccttaacaggggcaatggacattaacagatttttccacataggatcttaagtataattatattcttcccacaatcacaaaaaaataagtaaataaataaaaataagtgcaatgatagagatgctcagggagctccagagaggagtgtttcttactccggatggagcttctgagcccatgtcatgcttcctgctctgcactgtcccgtactttgttcgtgctcctctcgaacattgccctcagagtggtttgccttatgtgtgtctctctcccccaccagagggtcggctcctggagggcattaagacagagtcagtctctgattcatcctttgatatctgctagtccctattgcagtgctttgcatattttaaacttatttatactctcttgttcataaagatacctccagtactatgtgatgaaatagaaaataattgaagaattcaggttgagagaaatgtgggaggagaaaaggatgaaatcagaggtgaggaggccgggcacagtggctcacgcctgtaatcccagcactttgggaggttgaggcaggcagaacacttgaggtcaggagttcaagaccatcctgggcaacatagtgaaatgccgtttctactaaaaatacaaaaattagccaggcgtagtagccatcacttgtaatcccagctacttgggaggctgaggcaggagaatcttttgaacctgggaggcggaagttgcagtgagccaagatcgcaccactgcactccagtgtgggcgacagagcaagagtccatctcaaaaaaaaaaaagaaaaagaaagtaaagaaagaaatcagaggtgaggttagtaccta

SEQ ID NO: 81062 - DNA, 1096 bp, Homo sapiens
ctgtaatcccagcactttgggaggctgaggcaggcagatcacctgaggtcaggagttcgagaacagcctggtcaatatgacaaaaccctgtctttactaaaaatacaaaaaaattagccaggaatggtggtacacacctgtaatcccagctactggggaggctgaggcacgagaattgcttgaatatgataggtggaggttgctgctgcactccagcctgggtgacaaagtgagactgtctcaaaaaaaaaaaaaaaagaaaattatttaaagaaatgtgatattttgcttagtattggaaacttttaaatggattatagttaaaagatgaaagaataattgggtagtttagcgatatattcacaaagaccaatttgttaattaactcttagaacctctgaacttttcaacgcttctctgacttgtggttctgtgtttattttctagtatgcagttctctttttgctgggtttattcgtgctggttcatcgtgagtaagaagcctgccttgctgttcctgggaagatgccatagttttcgttactggatgtttggagtagatactggtctgtgattggtggaatggagaacacacgtgttggtgcttctgggtagcactggtttgcattagtttatgtttccatgccagagtttgtgtgggcgggcgcatgtgcaccacagagtgcactcgaggggactttcagtcacaggatttcataattgtcattgtcacactttcaaatttttgtacatcagtgaatttttttatattaaaaggttgagccaaagcccccagtgtttgtattttgaagccaagcttcacttctaaagtgcctacagagacttgtaaatgaaaatgcagctctgcacgagtttgaaaccgtcatacctccttctattaggaatggcatatactgaggtggtcgtaagtcttaacttctaaaattttaaataaaagactttgcacattgaaccccttatccctgaattgtgtttgtcgggaaagcttctgaaatttgccttccttggctggttcttagtacccctgggggatataaaggcttggtgtgaacagtccttcagctaagaaggttgc

SEQ ID NO: 81063 - DNA, 1012 bp, Homo sapiens
gcttcctgagtagctgggattacagcttcctgagtagctgggattagccatgcccagctaattttttgtattttcagtagaaacagggtttcaccatgttagccaggcggtctcgaactcctgacatcaggtgatctgcccgcctcggcctcccaaagtgctgggattacagatgtgagccactgcactccgcctcctttatgcattaaaaaaaaaaaaaatttttttttttttgagacagagtttcactcttgttgcccatgcaacagcatgatcacggcaacccccacctcccaggttcaaacaattctcctgcctcagcctcccaattagctgggattacaggcatgtgccaccatgcccacctaattttttgtatttttagtagagatggagtttcaccatgttggccaggctggtctctctctttttttttaacagctgcacactaaaaaaattttatgttgaggcctaaggctctaaattaaaataatttaaaaaaacttttattgagatataattcacatatattagaatataaaattcaccatcttaaagagtacaattcagtgggtttcagtatattcacaagattgtgcaaccatcaccactatctaattccagaacatttctatcaccccaaaaataaaactcagtactcattagcagtcactccccatcctctacttcctgtagcctcggacagccactaatctgctttctgtctttgtgcatttccctattctggacttttcatataagcagaatcatacaatgcgtagtcttttgtgtccagcttctttcacctagcataatgtttttaaggcttattcatgtcgtagcatgtaataaaaacaattttagaaaatgaaactaatactgaaccaattaagtattaataaaggtgatttctttctaaactcaggaagttgaaaaattcaagagcacccattagttaagaaggaatagaaagcagcaggtgaaaagggtgaaagattggcagaggatcggg

SEQ ID NO: 81064 - DNA, 1011 bp, Homo sapiens
tgccaagcctgtttcatttatactcctgctagtacaactgagtgttcctttatctgggccttcttttttttttcttttcttttttttgaggcagagtcttgctcttttgcccaggctggagagtcttgctctgttgcccaggctggagtgcagtggagcaatctcagcttattgcaacctctgcctctcaggttcaaatgattctcatgtctcagccacccaagtagttgggattacaggtgtgtgccacaattcctggctaattttttatatttttagtagagatgggttttcgccatgttggccaggctggtctggaacccctggcttcaagtgacctgcctaccatggtctcctaaagtgctgggaccacaggcatgagccaccacatctggcctgggtcttgattcttaagtgtttattacagctctgtctgctcactctggcccattggttgggtaaaagatgcatcatcctacgaaaggttaggggagctttcactcaacttgtcttctggacaatttttgaaaaaattctgggctgggtgcggtggctaacgcctgcaatcccagcactttgggcggctgaggcgggcggatcacaaggtcaggagatcgagaccatcctggctaacacagtgaaactccgtctctactaaaaatacaaaaaaattagctgggcgtggtggcgggtgcctgtagtcccagtgactctggaggctgaggcaggagaatggcatgaacccgggaggtggagcttgcagtgagccgagatcacgccactgcactccagcctgagtgacagagcggcactctgtctaaaaaaaaaaaaaaaagaaaaagaaaagaaaaaattccacactatttaatgctatttttaaaatcccaacatagaaactatagaccattttgagctgttacttaaaaaaatgtaatagtctagtactctctgcattaaggaagtttctgtagaaaaaaaaaacctaagacatgaacagcagaagcacagaat

SEQ ID NO: 81065 - DNA, 2097 bp, Homo sapiens
gagtagctgggactacaggcacccaccaccatgcccagcttatttttgtatttttagtaaagacagggtttcgccatgttggccaggctggtctcgaacttctgacctcaggtgatccgcccaccttggcctcccaaagtgctgggattacaggcgtgagccaccgcgcctggccgtctcttgtttaatctgtaggttacttccctaactttctttgttccttgcaagtcattagttggagaaactgggttattctgtagtttcccatagtctgtatcttgccaattatatcctgtgagatagtttattgtgttcctttgttctttgtgtttccagaaaattggtagtgtgtatttattttaatataaaaatgagattgtactgtacatgctattttgtattcttttcttcacttaataaaatttgtacaatcttgtcattcttctataccattattttaatgtttacataatatttgagctccttaatattggatctttagtttgtttttagtcgtttatgaacaacacagctattaacattcttgtagctccataaataattatttcgacactagaatggtgaaaagataccccagtgccacaaacatgtttggttaacaagaacagattttgtgctttaaatgccatgaaggtatttgatgacttgggtttcctttactcttttaaggcaaaatgggcatatcaagtttttgaccaaaggagataataatgcggttgatgaccgaggcctctataaacaaggacaacattggctagagaaaaaagatgttgtggggagagccagggggtaagtatagaggggagcatctcaaactttttatatcacttgaagtgtggccctctcaatcatattatttgatcatacacagttgaatatagagatttggttctggttccaccaaatcacccttgtgtcctttgaaaattttgcttcttaaaaagtgtctaaaatttcaggtatactactccaaaggtgaggaactgggtggggtgcaataaaagaatagaatactagtgatgagatggtgaattggatgtgacaattttaaaaaatgtgttcacttatttggttcactcaagaaatagtgggcaccttccatgtgctcttacgtccacactatgctagcctctgggggtctagagcactattaatcctgcctcatgaaagttacatttctttttttttttttcttttttttgagatggagtcttgctctgtcacccaggctggagtgcaatagcgcgatctcagctcactgcagcctccgcctcctgagttcaagcgattctcctgcctcagcctcccgagtagctgggattacaggcgcccgccaccatgcccggctaattttttttttttttagtagagatggcgttatatttatatttcttaagaagtactaagtcaataactcaaaagtgttcatccaaattagttttatcatgttaatttaatccataatatttctagtcttgaaattgatgaggttgaatgaaattaaaaagttatattaagcctgtttgtttcagattttatcaggagaacagttcagtggaggacaggaattgtaagttgttggtattaaggaagtatggcattgttgctcccttaatgtaattaatagtattaacaataactcacgtttattagggcttattgtgtaccagagactcattctaagtgctttacaagtattaccacattttaacctcagaacaaccctaatattcccattctacagatgaggaaacataaatgagttaggttatgtatctaagattatactgatggtcgtaagtggctggctgcatagtccaccttaccatcatacaaaaattactagcgtaacatttctgaaatggatagttgctaattctcactagttagatgccacatggcacttttgccactgtcagaacctctgctccttttgacctagaacagactgtatggatacagagttattacaccagtaagcaggtctgagatacgcagttcccatagagaaggaagtatgagttgctaagtgaaagcttcctcagttacagcacgagagatgctcagtttggggcc

SEQ ID NO: 81066 - DNA, 1166 bp, Homo sapiens
ttctttatagataaaaaggggttcataaattagtgcaaatatcttaggaccttttcagcacttggcgtaggatggaagaggtaagaggtaagaagatactctgtagaagttagtcttacttgttaccatggaattgaatcttttcctggcttcggaaattcttaggcaaaaatctctgcttattccttggttttctttttttctctttttaaaataagtaaattgataacacaagctttatctctgtagctggctgttccttgacttgatgagccatttttccttctaaatgagttgaacatataaggtcatcttggctgttatctttataaatggcagaggaagatgatccagttctcatttgcatatctgaatatgtttagtgttttcagatgaagtgagaataagggcattgttttaaagttcattcttttatattctgtttgtcatttgaaattttaaaaggttaaggaattagtaacactgaccttttcaagatttaagcttctttgactagtgatacttgaaatggaactagttagtgaaggttaataactaaaaaaaaatcctttggcgtaactttttagtctgaggaaaccatattttgagaacaatacacatttctgttgatatagttgttagggtattgagtatactcccaaagtgatattttttattttgttgaatatctaattttgaaagtacatttaatctcatactttctttttgctgttatattcttctttcccttccagtggcagcatggaacctgcatttcatagaggagatcttctctttctaacaaatcgagttgaagatcccatacgagtgggagaaattgttgtttttaggatagaaggaagagagattcctatagttcaccgagtcttgaagattcatgaaaagtatgtgcaaagtatagcatctttgtttctaagtgcttttgtttaagtgtttgtggtatttagttttgatagcctaaagattgtaaaacagtgaggaacctctaggccttcttccagtccatttttatgaatgctggaaagtttagtgaacattttgaaaactgtaaataattatttattagttcatttctttccctgaaggtttttccagaggtttttctttgttcccttttacttcccaacctgtcagtgactctgtat

SEQ ID NO: 81067 - DNA, 1049 bp, Homo sapiens
agcgcaggagacttgctcgaccagagaacctacggtcagacgacacatccactgccacacccatacccaagccgggacgcggaaccgcttctacccgcccacaccggagaggttgctcgcgattggccgggcgggcacagaggcccgccttccgaaggtggcagagcagcctccccaactaagcctgggtcgccgcctcggtgaagggccgcggggccgagcgcgggaagtggcgtccagtcggtttttggcaggcgagagccagagcgtgagaaccctcccacggcgaggccaagccctgagactggactagcaaggtcgtgagtctctctgtcagctctccgcagcgaaggggcgcggggggcggggaccgtgcccgaccgtgccagctcccgccccggaagcggaagtgcaagcactgcggggtcctgtccagtgtgagcccgacccgagctccagtagttccgcccgctggtcatcgcgccctttcccctgccggtgtcctgctcgccgtccccgccatgctgtctctagactttttggacgatgtgcggcggatgaacaagcggcaggtgagcttgtccgtcctctttttctcctggctcttcttgtcccttcgaggctgctgctgcggggcccggcggaccccagggttctggtgtgagggtctgagctggtctgatacccgggtcattcgctttctttggagactgtggccagaggccgccttgtccgcctcattatttttaaccccgaactgattcagggcctaccgggggcggggcgggaagcggtgtcttcacgttccattcctcccactgaggcaggggagcaaatggaaaccgtacgcgcttgaagtgggagttggggttgcttattgttttagtcattttaaggcggcggactcttgatttctccagtcggagcgactccaggtggtttcgggagagacgaggtttagccggtttctggggcgctcaggaaggcgattggaggccccacaaaaaccgttttgctgctttcagctccttgcaaccctttagtagagc

SEQ ID NO: 81068 - DNA, 1036 bp, Homo sapiens
aagatatttatggggttcgaaagaaaaaaatattagggctgggcatgatggctcatgcctgtaattccagctacttgggaggccgaggctggtggatcacctgaggtcaggagtatgggaccagcctggccaacatggtgaaaccccatctctactaaaagtacaggcgtggtggcacgcctgtagtcccagctacttgggtggctgaagcatgagaatcacttgaacccaggaggtggaggttgcagtgagctgagattgcaccactgcactccagtctgggcaacagagtgagaatctgtctcaaaagaaaaagaaaaatatattaggactctggaaaggaatttggaaatgaatctttgaagtgtagatgggactttagcaaatagagatgggctgagtaaggagactgtcccaggcagaaggaacagtacaaccaagaacccacagtgggaaatagatggagtgttcagaggggagcaccaagaaatccatttggctggagcacaggactggtgtagaagaaaagtaggggaatcaatgtggaaaggtaaggtaggaaatggggtttcatggactaaaataaaaggaaaaataatgactatatcaaaaatggtcctgaatgccaagctgaaccctgtgtcttttgcatgtcaggaagaaccactgaggcttgaacagtgcaggtaataaatttgcaaataaattgtcctgtaacttcttactcaatgaggtttgaggtctcaacccatcagtcctaatatttggacatctaattgactcagagcaatgagttaggggcagcagtctttgcattacagctgtttacagactgaaagttgggccttgcttctctggctattaatgactacaatttctattcaccagcacagtttcagagcgagaacaaattagcaaagagtaaaatggaaaggaaaaagaaatgtgcaccttaaactagtactttgaaaacttttttgactgcaatcctccataagaaatgtattttacacctcaacccagaacatacgcatgc

SEQ ID NO: 81069 - DNA, 1050 bp, Homo sapiens
ggggaaagggagaggggagattagtctggagactagggccaaattagagcaatggggccttgggggcagaatgcctccctccttagtttggtttgtatctccagtgtaattaggaacctttgaagggtttaagggaatgacatgatatttacattttaaaaggtgtctagcccctgtgcagggaatggacttttgagataagcaggtaaggcaaggctttctgggttgagtggcttaactacctgatctgtttggaaaagcctcaagcagtctgggggagatcctttgcctctgtgagtctgcttcatccagcttttaggaagggaaggcaaaaatgaattaacatttatggagtacctgccaggtgggagaaccaattttaaagacttctgcatacattattgtatttaacttagtcctctctacaccctaagaaaaagaggttatcatacccattttacaaagaaataaatgcagaggggatagatgacttattcaaagccacatttgtaacatagcctggattcaaagcacgtctgcctgaattcagagcccactggctctggagccagaccactgaagtttgcattttgctcctgtcacttgctaaccaatgatcttgagttatttagcctctcttgtgcctcagtttgctcacattttaagtgcagataaaactccctcatacagttgttgtacagattaagtcatgtaaacagttgagcactgggttcaaatattagttgcttttattattttaaaaatttttattactttttttttttttttaaactggagacaagctggatgcggtggctcatgtctgtaatcccagcactgtgggacactgaggcgggtggatcacctaaggtcaggagttcgaggccatcctggccaacatggcgaaaccctgtctctactaaaaatataaaaattagctgggcatggtggcacgcgcctgtagtcccagcttctcaggaggctgaggcaggagaattgctttaacctgggaggtgaaggttgcagtgagctaagattgagccactgcac

SEQ ID NO: 81070 - DNA, 1102 bp, Homo sapiens
caggggttttgaggcagagttggaatttgagccaagtctttaaggattggggagattccccccccccccaccctgccatttaaaaagtaatatgtgcttagtttagaaaatttgggaacaatcaggaagaaattctggtaattcttcctaatgatagacagttgagatggataggcagaggggagtgatccttttaaaatgtcagtctgatagaatttgaggataagtggttaaaaaaaaaaagaaccacctacaacaaataaaatattggtctgagcacatcattcttctactccaaatcctcctgtactctttcgtcttagagtcaaagtcaaagacctagcaatggcctgccatcatctgcttcccagccatatctcctactccttctgcttcagggcctttctcttccttcttgttcatccctccgcctaaaacctcttctcccccatattctcatggcttgctctctcacttcagaactgagaatatattcactcttctgatgtcatatgaggagccctggttgagaaagagaataagtatgacttttatgaatctgtctctgtatgtctgtctccttccagtggattatcagctctacatgggcaggaatttcatttgttctgttcactgtggtgtccactgtggtatccacagtgactagaacaaggcctggcacacagtaatggtgctcaatattattgaatgaatgaaagtacatgcgtgcatgtctgcggtgtgtgtgtggtgtagagatagggtagcaaagggcagtgtagctagcagctggagtaggagagaaggagtgtggttgggtggaagagaggaggatgaagaggatgctctcagtaggaacggagttcagagacatggtccagtctgttccagtctctataccccatctcttactggtgctgttcagcagggaggcagtgagttggtgctgcaagaccagtgaggggcagctgctgaaaaacacagtagccctggtcttaggcctagattatggaggtttttgaaagcctggcccagggcttggacctaatatggtaggctacaggaagaagtttttttttttttaggacagagtttccctctt

SEQ ID NO: 81071 - DNA, 1729 bp, Homo sapiens
ataagagatggtgaaaagtgttatggagaaaaatgaagcaggcttggtggatgaggggtttggtggggaggaaggtcttctattttaaattgagaagtcagagaaatctcatggattaaatggcctttgagcggaggtctgaaggaagtgagagagggagccacgcagatatctgagaaaagagcaatcagattggagaaaagagcaagtgcaaaagcccttcaggctggggagggtttaaggaacccatgggggaaggtacggattttggggatcctatggtggctccacctctgtaatttctggtttaattggtctgagctggggttaggcattaggatcgctccaggtctaagaagcactggtctgagggttaaataagccttatcccctgtatttggtggagagatttgaagggtaactgtgagtaggagacttcagctgctctgatgggaagggcaagcaagggccccctgaccttgccaggaataacaggaatcttccacagtaataaaaactcttcagtttatgtcccttttcttatttgattacctcacctctctgggcctcagtttccttgcttgtagagtaagtggtttaaatttaatggttttctagaatctctttggctccgatagtcctgaatctttctagtgttggaagaagctctaatctagaacagtgttctagagcaatgttgtctaatcttggtcttataacactctaagttgtgtcatcattatggcaagggctgtggtgaatgtctcaataccaaattgaaggaaaatttgtgccctattcagtagcaccttgggaagatgagtgtgttgggaaacttgaaatgtgaaaactgacctgctggtttggagtccaaagtacaggggcagcttggtccttgggggcaggcaggagcctgagtgccagtcttagttcactcactggtgagttccttgtgcagtgtgaagagtgtgttataaactgtaagattcctacacatccaagcatgcgtgtgtgattagggtgacctgggagaagcagccagcctggaagtgaagcctgacactcaggtttgttagccattctgcatccaaactgcatgattgcgcatgtgagagagactgtctggataacccaacagaaactggtggccagaggaaccaaggttaatctggagtaaataacctagtatactcattggagcacctcccaatttatttactattggacagcagacctaagacaccccttggcccctgatctctaacttttgtcctcatttggacagcacagtgtctgcttgttagtttatgttttgaaatgtgaaagcccaaataagaaaaggaaaaacttcaggaaagttttctctagtttctttctgtagaattgagataattagtttctttcccttcccttctacatttttacattaatattgtctgtattactatttagaatccaaactaaatgttggtctgtcaaaactggacaaaaatgaagtcaagcgagggaatgcaggattagagtgagaatgggcagaacgagaaattcagggaatgagtccttttattaggtaacttgtgggtatatgtagttgatgggccgttaaccagtgtttctcaacgctagtcaattaaatctgaatcttagaggggtagtggccaagtattagtagcttccaaagttctcaaggtgattctcatgtttggctacagttagggatcacctagtt

SEQ ID NO: 81072 - DNA, 1159 bp, Homo sapiens
tgtgctctgaagcaccagcctgtaatagagggaggggagcagacgtggagctgggaaaagttttgtctttgactacatttgtggcctgcttgaatttacatttggggatttttctcagggtcttacttacacttggattattattattagtttttttaaactatctttccttactctaacacttaccttcagacccacttaaaaaaaattttgtttttcttctttccttaggtggtgtttggactctagaccatgtgcctaggtagaagtttttcctttctccgcagctctgctcccctagcaacgctcgccacacccttgttttgagatcctctctaaggtatgatgtctaggctgacctgaactggccttgaaaagccaagagtttgaacatgagatttttttgttccctggattttgttttgttttgttttgtttttttttgatgataaaatacatataacaaaagttaccatttttaagtgtgcagctcagtggcattaaatacattcacagttgtacaagcatcaccactgtccatctccagaacctgatatcatctcatactaaaactctgtacctattaaacagtaactccctctctctctcctgctaacccctggcaaccaattctacttcttgtctctatgaatttgcctactctagggacctcatgtaagtggaatcattcagtatttgtctgttgtagcatgtgtcagaatttccttcctttttaaagttgaatgatattccattgtgtgtatataccacattttgtttatcctttcatctgttgatagatacttgggttacttccacctttgagtgttatgaataatcctgctatgaacatgggtgtacaagtatcttgtgtcctcccgctcttaattcttttgagtatatacccagaagtggaattgctggatcatatggtaattctgtttaattttttaaggaactgccaactgctttctatagcagctgcaccattttacattcctaccagcgatgcacaaggaatctgatttctccacatcctcactagcacttgttattattgttttttttttttttttttttttgagacagagtcttgctctgttgccagactggagtgcagtgatgtgatcttggctcactgaaacctccacctcccggg

SEQ ID NO: 81073 - DNA, 1108 bp, Homo sapiens
caatactctggctgctgtgttgggaatgactagtagaggcaagggtggaagcaagaagatcagttggcaggcttttgtgggaacacaggagagagatgatggtagaggtggtgagaaatggctggacttgaatatattttgaaggttgagttgacaggatgtgcttgtggattggatgaagggtgtgaaagaaagagaggtttaggcctaagcagctggaagaatggcattgtcatttactgaaatgcggaaggctgtaggaggaaatcaagagctagattttagacatagtagatctgaggtgcctattagatatccaagtagagatccaaatctagaaataacaataatttagtgaatgtctactgaggggcttataaaatagcaggaaagagaacactttactgaaatgttcagtaaactacagtacaggtagaaaattatgatgtgaggaagaataaataaagcaaaagggagcaaaagggagagtgaggtgacttctgtaggaattctgtgcccttgatgagcctcagtggtgcccacagatgtttccagtggattatgtatgtgtaggtgctcaagagcagggtctgggccttcagctttgtgccctcagtgccagtcataagtcttagcatttggtgactgttcccctctctgagcctcagttctccatgtataaaaaatgaagagtttggactagaccggtgcagtggaatcacctgggaagctttaaaaaaaaaacaaccaaaaagcaggaatccatcctagacatattgaatcagaattttcatggtggagcctgtgtatctgtatttttaagtcattccccatgttactcttttgcagtctgtccagcagcggccttcagacaggcatttggaagcccctggaccagatagtttccaagggccccttcagctttaacatcttatgagtcttgttagaatgttcgcagtataattctgtccttgaaatctttggttggcgtggaaaaggcatggcagggggagaggagaagctgcctttgggtgaaggacaccttgcacagggcaagcaggggcaggtacatcagccagggggttgaagagacatccaggaatggctc

SEQ ID NO: 81074 - DNA, 1592 bp, Homo sapiens
ggaggccatccagacacccagtgaggagaatgagagtcccctcaaacctccaggcatatgtatggatgaaagtgtgtccttgtctcactcaggatcagcccccgatgtgccggccgtgagtgtcattgtcaagaacaccagccgccaggagtcatttgaagcggagaaagaccacattactcccagtctcctacacaatggattccggggctcagatctgcctccagatccccacaactgtgggaaatttgattctacttttatgaatggagacagtgccaggagtttccctggcaaactggagcctcccaagtcagagccattacccaccttcaaccagttcagtccaatctccagcccagaacctgaggatcccatcaaagataacggatttgggataaagcccaaacactctgacagttatttcccaccccctcttgggtgcggggctgtgggaggcccagtcctggaggctctggctaagtttccggttccagagctgcatatgtttgatcatttttgtaagaaagaacccaagccagaacccctgcccttggggagccagcaggaacacgagcaaagtgggcagaacacagtggaacctcacaaggatccggatgccactcgattcttcggggaagctttggagttcaacagccatcctagcaacagtattggagagtccaaggggcttgcccgggagcttggtacctgctcatcagtcccccctaggcagcgtctaaagccagctcattccaagctgtcctcttgtgtggcagccttggtggccttgcaggccaaaagagtggctagtgtcactaaggaggatcagcctggccacacaaaggatctctcagggcccactaaagagagttctaaaggtagccccaaaatgcccaagtcaccaaagagtccccggagccctctggaggccactagaaaaagtatcaagccatcggacagccctcgtagcatctgcagtgacagcagcagcaaaggctcaccgtctgtggctgccagctccccaccagcaattcccaaagtgagaatcaaaaccattaagacatcatcaggggaaatcaaacggactgtcacaaggatcctgccagatcctgatgatccaagtaagtcccctgttgggtcacctctagggagcgccattgcagaggcccccagcgagatgccaggggatgaggtgcctgtggaagagcactttcctgaggcaggcacaaattcagggagcccccagggggccaggaaaggggacgagagcatgacaaaggccagtgactcgtcatctcccagctgcagttctgggccccgggtcccaaagggggctgccccaggctcacagacaggcaagaagcaacagagcacagcactgcaggcatccaccctggcccctgccaacctcctgcccaaagccgtgcacttggccaacctgaacctcgtcccccacagtgttgctgcatcagtgacagccaagtcttcagtgcaaagacggagccagccacagcttacacaaatgtcggtgcccctggtccaccaggtgaaaaaggctgccccactgattgtagaggtcttcaacaagg

SEQ ID NO: 81075 - DNA, 1029 bp, Homo sapiens
gggcctctccagacgcggcgctactgcagacaccagggccgccaagggagcggactcggagccggccctggggcgggcacatgggccccggcgccccccggcgtctccaagccgcgctgcccgggtcgggccaggccaggggagggacagcagcaggtgacgacggcccggccaccggctataaataggggcgcgcgtcagccgcgggcgggagcggcggcggcgggcaggggcccgggggccggggcctggaggacaggcgaggcagcggcgagtgcggggccggcggtcggggagggcggtgccatggggtcgcggagggcccccagccggggctggggcgcgggtgggcggtcgggggcggggggcgacggtgaggacgacggccccgtgtggatccccagcccagccagccggagctacctgctcagcgtgcggcccgagaccaggtaagtggcaccaaggggcagggcggcgtcgggccggcgatgccctgggatcagtccctgtgagggcggcctggcccctggaggcctgggctgggcctgcgccctcgagccctctcagccccaaggcccagggcctggggacatggccgggctggaatggctttcatagccccttgtgacccctcctgatccatgcgcctcaggcctctggcaattcgaggctcaagagaggacaaaggctccactttggagtgatttcatggggtctgaaggctttccttatctcccctgccccctaccctgctactccctggcttgggattccacagctagcgataaggaaagccagagtggctgaaattcctccctggcaggaagggagggggagagcactggtggggacagggagagggtgctggggggctgcccagagtaggagctgcttagctcagggtggggaggttctccaggaagaaataaacctttgtaaataaggttcctctactgggccgaggacttgggtcctccccaggacctgagtgggggctggtgagatagggggtgggatgaggtactgtct

SEQ ID NO: 81076 - DNA, 1031 bp, Homo sapiens
aaaacaggcatcgaggacattcaggaaaagtcctgggcacttcctcgtgaattggctgagtcctactgaccttggagttgggaaagttcaaatgtaaccggaaccggtttctgcataaaactcgtcaaatggtgtcacatgtctggggcagggctgaggactgatgttagtgactgagtcagactcaacaaggcccctggctgccaggaaagaatacccctttttcttactcctggctctacagataaaccagaatgaaatttggacatttattccagtccttagagaagctgactcccttgtgggagcctcacatttgtcacagtgacttgtctgggctttgcctcctgtgtttggcctttgtcaataccagtggaacaaacagaagaggcggaaccagggtccttcttggagacagcagcaatgaaggaagggaggaaagagtgccttgaaaaccaggcagaatggggagggcaggggatctgggcttttaggaaaagggctggagaatggacatagtgctgctgcctggctgagcagttgtatgatagataaatgttaattgtacacctcatgagcacaaagcttgtgccagcctgagagctagaggcaggatagaagtggctggcttaagtccctttggacctaaatgggaatgttcttaaaaggagtctctttcatcaagtatctggagggggcaggacagcaggagtgggagaaagctttggactttgggctgtgttttgcccctgcagagttttttactgctcctgctggctagccacagacccctagaggttctgagagacaaggacagccagatttatcaggcatctggaaaagcctttggccaaagtggggagaatgtgactggggctgcagtggggagtggaggaggcgaggcagttcctgcttctctagtaaggcctgacctgtgttggagggagccaccgtactgtctgctgtccctcagaacagcctcactgcctgtgggggtggggagagctccctagagatagggagaaagacag

SEQ ID NO: 81077 - DNA, 1788 bp, Homo sapiens
ttttttcttctattctgcttatgtatgaattcccattttgtgagatgaaggtggcacgaagaactctttaaagcttttctgccccaatgtttgatgcctctcattcagctccccctcagaggcagtaaatggggagctcccctgcctgggtgacagccctgagcctagctgtggcccagccagcagggcacaggcaggtctcccaccttctgaagaccaggtgcctccattagttcagggtttctcctgacctgactaacaatgtaagggcgaggcctagagagggcagggcggttggtccaggagcagcagagctgggggaggggtcctctgtcccagctcacttcttgaccaacatgcaggtggaacttgtcattttcctctctgaattagaaagctaactctccccctctccttcccagggaagaagtccagacccaaagaagaagaaatctcccaatcctgaaagagagggacaaatgaaatttatggtcaggaaaggatggagttggccagtgccttggaaccatgggaggttctgcccacgcggcctccagaggatttttaaagctctgagcagaggcagctgcactctagcacgctcctttccatcttttctggagcagcagctccctctcgggggcagcacccttcctgcttgaaaaatgcctttctctcccctgacctctctccctcccccaggtcccccactgtactttcctcctctttctttttcttcctctctctctctctcccttctatagaacagcagttaaatacccatcgtctgtgcagcactgcactaggagccacagaagctacaagaactaggtttgaaggctggatgggcaggatttagttgagcagtaggagggaggaaggactttccaaacagggaggacaaaagggaaggctcaggggtcaggaaggactgttcatgctgataagggacaggcctggctgtggtggcgccggagcattgggaagtagagggaatctggttgcagcgggagtgtgagtagatcagggagggccctaccaacccagttaaggagtggagactcagcgtcctctacactgggggactgcagcattttgttagagaagtgggttatatgaggggttaaggagagggggctgaggtggtcatcaaatgtggagccatgagggtctagactgtagtgcaacaacaagagcagagaggaagggagaaacaagggccaagaattgtgcggactggatttggggttggagaagaagtagtccaagatggcaggttttgagcttaggagtttgggagaatgctggaggtatctaccaacccaggagcccggggttaggggtgaagccaggttttagggaaaaggatgggtttggtgttgtggttataaagagatgggatcctcatagagctttcttatggttagagacatagaccgtgagcaccattgaacaggctgggctgctgggaaggaagggagagctcttctcatgatagggacagccgaagggagtgtggatggggtgacctctgacatctctcaaggagctgggatccaggtccccactggagatttttgtatcaggaaaggaggagggagagggaacagttggctcatagtaagtgggctagactccactaaggggcggtcctgtgtgggtcctcatcctagtgccctacacagtggcctttcctagctgccccaggcaagagagatgattggggcctcaggcagaatgggccttgtgtggaccatggagctgggtgcctcccagctcctgctgaat

SEQ ID NO: 81078 - DNA, 1053 bp, Homo sapiens
ggggcctgaaaacttggctgtttactgtagggtgacctaggtagccactgttgggaactgccaagtaagtttctttagttccttcctcttgaacttgctaggtttcctagcgaaaggttttctgggagttatgcagatcagagggttgggtgggctctcagcataagacatttattttatgatatatggttattacatttttctatttttcatagaatagtcatgccctcagttatgctggcttactctcagggcagatttttacatttccaaataataaacttcatctttggctgtggtggggaaggagcagtcatccagtgagatagaatggttgaagggttccaaagatttattttttaagcatctttgaacctttcctccttcctctttctcccagttccagaggtaccaaattgccaattcttaggccctttggggattttctggtgtcgaaaggatagttctcagttttctccactgctagcttagggttgagctgtcttgagtctgctaagtcagtttccacttgtccatctgctttctaactttcaaaattttgttgctcctattactctccttgcctgttcacttcatctttgtgcttttacatatgttgattaaaaagtcttttcagggcagtttagtgagtttgagggagggtatgaagatagatggcatgttcattctgcctttttacctagaagcctactctttttctgcctggcaaattccttctcatctttcaaggggcttgccctctgggaggtcatctccagtgtttccaggagagctcttgctccatcctccaccacatagtttttttgtttacacatctctctctctccaacaagatcgtgacatctacaagcacagggcatacacctgacacatcatgcctctccagagctggcacaaagatgctcagtacatatcaaatgaccacagtgaagcttgactgtgctgatgacaaaaccagtaccttttccacttgccatattgcctgttcatttcagccacagctttggtaccttggtaacagcggctgcagtg

SEQ ID NO: 81079 - DNA, 1014 bp, Homo sapiens
tgggaatggttgggacaaggctgcaagtttccaagctgggttcttgagtcaggtctgctggctgtgaaacagaggccacagggtgtgaaggggctgagggaaggccacaggctcaagtgccgccatgggctgtcctggccagggccagaagtgtgtgcacacctgcctgtggacatgcacaaatgcacagctgggagtgaaggacccggagccctcctgcttttatgcattttaggatatagttcacattattcagggctcaaggcaatgtgttctcccaaataaatttgcttccaaagctcattgtggctatgaagccctaagctgtcgggttggcccccactgtgtagaggcagcaccagagggtggcatggaggctgaggccccagccctggggctgtggggtccattcagctcctccctccttgccccacccctgccctcttgcccaagcatttgactggactcagatgccctggagactgaggctgtgctgggcaggtcatggggcagggaggctctgagctgggtccttgtagggatgagatcatctcacaggatggtgaggacacctgtgctggctctggtcacacacacagtgatgtaaccagggggtttagctcacagtggaaacatggggctcgctttacagccagggctgcccagagtttgttcctggccgacgctgctgcagcctcgcctcccctgctccctgctcctgtacacagttccccagcatgccctttgcttgtcaccctccccctctcatgttggggttcccttgtcaggcatgcccttcccatccaccttgtgtgttcaccctacttactcatttacttatcgtcccacagatttcttttaagtaattaccacaccacagtgtcaggcactgtcttaggtggtggggatatagcagtgaacaagatacagtttctacccacatgggacctaagtctagcaggagagataggcaaggaaatagtcaatgacagtattgtgattagtgctgtgaag

SEQ ID NO: 81080 - DNA, 1126 bp, Homo sapiens
ctatccaaggcaattagtgccacaggagaaggactgctctgggagccctggggagaggacagtctccttcatatggtaggggtgaggggtggaataacccatgagcaaggtctttcaggaaaggcaggatttcttcaggaagaggtggaaagggccagagctgggtctgggtgctagatattccccagtccagattctgagatcagagattagggtgagtgggcatggatggggctttgggcatttgtcacatgtctttgcctcccaacttccagcaggcctgagaaaccaggaggcaagattcccatcagagcagttgtagatgaggtccgaggagactgggatgccagactggaaagagatctgaatgtccatgtagttaaatccttgcttttgtccctctgttttcaggtcctggaatgccagacaaccacggctcctaccatgtcggccagcagcagctctgatgtagcctccattggggttagcacttccggaagtcaaggtatcattgaacccatggatatggaaacccaggaggatgggagaacatctgctaaccagagaactggaagcaagaagaatgtgcaggcagatgggaagatacaagtggatggaaggaccaggggagatggaacacagacagcccagaggacacgtgcagataggaagacgcaggtggatgctgggacacaagaaagcaagaggccacagtcagacaggagtgcacagaagggcatgatgacacagggaagggcagagacacagctagaaacaacacaggcaggtgagaagatacaggaagacaggaaggcccaggcagataagggcacacaggaagacagaaggatgcagggagagaaggggatgcagggagagaaggggacgcagtcagaggggagcgcgcccacagccatggaaggtcagtctgagcaagaggtggcaaccagcctcggcccaccatccagaacccccaaactcccacctacagcgggtcctagagctcctctgaatattgaatgttttgtacagaccccagaagggtcttgtttcccaaaaaaacctggttgcctgcccagatctgaggaggcagtagtaacagcctccaggaaccatgagcaaactg

SEQ ID NO: 81081 - DNA, 1050 bp, Homo sapiens
agctcttggccctggaatcgcgctgcttccccaaagctctcagagctggggttcacagcagcctctgagagtggggtccaaggacgcttaggaccacagtctgcccccatgccatggccctcacgagtagggtctccactctgcagcgcaggggatgaggggccggcggccttggccatcgtgcaggcctcccccgtagactgcggtgtgtatcggtgcaccatccacaatgagcacggctcggcctccaccgacttctgcctcagccctgagggtgagtgtgccccgcggcccggggtctcagcctggcctggctcctggtgggtgggcagcagtcatctttgagagaaggcactctcttggcacagcagcctgaaggcactgctttcttctttttctgtatctagtgttgtcaggattcatctccagagaagaaggtgaaggtatggttcccccctggggaaggcggggtggtcctacccctgccatctgcagggaggaccctctttaagggcttggaatctggtcccaatccacatactgctcctctttgcctcttagtttaggatatggcttgggagatgatggaggaggactgctgtatcagaagattatgggggaagaagtgaccaagggggccactgcacaggagttagttcacccttgtgccctttgcccatgtcagagtctttgatccagggcagaaccggccaccagggcatgtcttatcctgccagctcctacccagggtttctcacagtgctctgtggaccctggtattagattcacacagggaacctgctagaaatgcagtttcctggtccctgctgcactgcagacatctttaatgacctaggagggacctaggaatattgcgttttcagcaggccccctggtgatcatgaaataccttcaaagtttgatacacatttgaagggctcaaatagggatgggcacgtactgctcctacaagagacaggctaaggcttgggactgtgaaggcagccagtgataaaaagatgtttggagctgtatttgctaacaaatgca

SEQ ID NO: 81082 - DNA, 1054 bp, Homo sapiens
gtgggcagatcacgaggtcaggagttcgagactagcctggccaacacggtgaaacgccatctctactaaaaatacaaaaattagccgggcgtggtggtgcacacctgtaaccccagctactctggaggctgagggaggagaattgcttaaacccaggaggcggaggttacagtgagccaagattgtaccgctgcactccagcctgggcaacagagcaagactctgtcttggaaaaaaaaataaagcaagaaagaaaatcacccctggccccagcagccagggacagtcaattcattgccattttggtgtatttctttctaatcttttcatgcgccattttggagtttgtttccccactgcccctagttttggttcttctctacctgcaatgttgtgggccctttcccacttcactgtgaggccttgatgaccatcattttcaatgacagcctgacgacgcttagccggtctcccattgttagatgtctgagttggttctgatttccctgcttggtaaatgacacagtgatagggggaaacgtgtcatatttctctgtggaaaagaacagagaagcaaagggtttggggtcccagtgaagataaaacttcaggaagggagaatcccaggggctgacattgctctgccatcttgctgggagtggttttcacagcgtggctcccagaaggagactgagggtcaaacggtggctgtcatagaggcagatttcctgagaaggagttctcaaactgcaggactggatgtgatgggttggcttgcagtggtgagttccccgtcacagtaagcattcaaagagagagcctagagagggagtaccttcctacgctagtacatacctacactaaggtggaattggtttagctcttaaatccatttcatttcaactcttaggttctagagctttgtctgaaagcattacaaattcctccactaagggggaaacctcagctaacggggattagtggtcaacagtgacagcctaaaaaggaagaaagaaccttgaacttggagccaaaagatgtgataggctctaat

SEQ ID NO: 81083 - DNA, 1069 bp, Homo sapiens
gccttcatttctggagttcctatcaccagcatgccctctccatctccctgccgcctgccctgctcccatctcagttctcattttccccagcagctttggcttccaggacctgcgatgcaccctgcccttgtggctgctggggccctacaccctcacccctacctgccaggtccaacttctttcctagctggggctgaccctgacctagggcagtgggagggtggagccctggccagcagttattcagctcagccccagtgagccaggtcctgtttctgttctgccacagactttggttccagtgggcagcagccttgctccttgtgagccccacaggctgacctgggtccccatcctcagggcctgtgtccttcccttagctccacagagtggaggcttggcctgactcctgtagctccagctaggctcttgccttctctctgcagccctccctcagtccttgctacctgctccagctgcccttgggctgtgggcagggtgccctgttgatatggacaacacagtcctctcccaggattggccctccgccccttccctgcccatatgttggcctcagctccactagctgggtcatggaacagcccaaggactgcccttgacccccttctctggactccctgcacgctcattctgtggccagtggccttccctagaagactgcaggccacttgaatatagggctcacactgtacccttctgtcttagtcagttttggctgataacaaaataccataaatgggatagcttataaacaacagaaatgtatttctcacagctcttgaggctgggaagtccaaaatcaaggtgctagaagatgctgtgcctggtgagagccagtttctcataggtggcaccttctccctgtgtcctcacatggcagaagaggctaatgagatccctggggcctcttgcataaggacactaatcccattcatgtgggctttactctcatgaccttatcacctcccaaagaccccccctcctaataccttcaccttgggggctaggatttcagcatatgaactttgaggagacatgaacattcaga

SEQ ID NO: 81084 - DNA, 1302 bp, Homo sapiens
ccttttttttttttttttttttttaaagacagttttttgctcttgttgcccaggctggagtgtaatggtgcgatctcagcttaccacaacctccgcctcccgggtcgaagcaattcgcatgccttagcctcccgagtagctgggattacaggcttgcaccaccatgcccggctaattttttttttgtatatttagtagagatggggtttctccatattggtcaggctggttttgaactcctgatctcaggtgatctgcccacctcggcctcccagagtgctgggattacaggtgtgagccaccgcgcccggccttggattggttcttaaataggagaaggttcatgatgtgaggacacagggtgaggcagacatcccagagtaaccttaaaggacagaatattttaaaaaattttaaaaaaaagaacagagggataagtacttaggacatgagtaagccctcagtcttacccaagcttagtggcttcatcctggtttctcagtacactgaggcagtaggaggtgatggattctgcagttcttagagtgcaaactattcatattaataatagccaccatttcttggatgccctctgtgttgcaagcaccatgttagatgctttaaagatgttatctcatttaatcctttcaaccctgtgaggtggcaggtatcatttccctttagcagataagacaccagaggttagaaacttgtccgaggtcatacatttaagctgagattcaaatccactggtcctggctctcacctgttaggttgttgctctctgttaactagctatgttcattgcatttcccattctttggtcttctgctaagctacagatttcacaggacaactgggttttaagcaggcatcttgaatctgcattatcaggattttgttaagtttcgacttactgtggaagttggttacagctctaccttaggttcctgtgtttgaggaagttgaagtcatcttcagccctgtgccagttaactcctgaagctagatattttgtgacgccctctgaatctgccctctttgctgtctgaaatgagttgggagggcatcccttgggagtttttttcctttcccctttctcctgctcaggtttcaggcagcctgccctaccaagagttccccaggagctggttctttccattgccctttgcctagagtgctgttcccccaccagtgctgcatgtacctatcttctcaggagttagtcaaggcccagctgaaagcttccttgagcccttggctggcttgcactcttttctctgctcttgggacctgctcctg

SEQ ID NO: 81085 - DNA, 1030 bp, Homo sapiens
attatctctatattactataggacttttttttgttttttgttttgaaacagggtcttgctgtgtcacccagactggagtatagtggcatgatcacagcttgagctcctgggctcaaatgatcctctcacctcagccccctgagtagctgggactgctgccatgcaccaccacatctggctaatgttttaatttttttgtagagaaaggttctcactatattgcccaggctggtcttgaactcccggactcaagcaatcttcctgccttggcctcccaaagtgttgggattacaagtatgtgccactgtgcccagctgttattacaggaacttttaatattttgagttaaatattccaggccattttagaatttgaatagcttgtcaaatttgttgattttatagcacctccgtcttgaaaaatatgccccctggtgttcctaaaagaacattttgagagaattatatggtatttagtaaggcaattagaaatcaccaagtatttagggactattgcttaagaagctaatttgcacaatcagaattcattagcccaggacacagacaccttatacacctgtggtgacaaatgaaaactgtgaaagtccaatctgattcattcctctcagaatatggaggacaggagagtggggacaacctcagcattaggactgccctctctcgttttgtttcaaaaagagtttaagtaacttaaaaaatacatataataagtttaaaaaaaaaaggaaattgggccaagggaacatggcgagaactgaccaattaagtcaggagtgaggtcagtatgtggaaacacatgccacaggggcatgcatgattgccatggggctgggtcacacgttcggctctgagcttccacagcctcaccaaatacgaaaacagttgcagaattctggagatttaaaaatggcaaatgactcaggagaagtacagtttctgagctcagacctaaagaaattattctctcaggaaggggaacatcacactctggggactgttgtgaggtgggg

SEQ ID NO: 81086 - DNA, 1051 bp, Homo sapiens
atttagtttatacaaagttcaaaatcaggcagaactatggtgttggcagttaggacagggctcacctttgaggaaggggaggggtagtgatttggagaaggcttgagggcttttgaatgttctatttttgacctaggtggtaattatatgggtgagttcactttgtgataattaaccaagctgcacacttagggtttatattcttttctgtaagtatgttaaccttcaataaaaatgtccatcaaaaaaactttcagtgtttattatacttgagccacatgttcatatgcacctgtcccttctggtcttagggacttagcatgtgctttagcctcagtctcaaacagtttgacttcctttttgcaaaataatactcatcattttggaaaccttatctgataagctgcttccctctcttccttacacacagaagggagtgtgtagtttccctgttatatcctctgtgggcaccatgtcctgaaccacagctaggagttcacatgtctgtatgtatttgattgcctctcctgatgtttaaacttgaggacgctgggcctatttatgccagtcattatgtctctagggaccactacagtgcctacactcattggtatttgtcaaatgaatgaactgacttcaaagggaacagtctttttttctgtcacccatttcaacttttaattagggttagtaggaggttggagcccctgtgaggttgcatggaacatttttgagataatagtgactttaatagccttaaagtatgacctgtaggaaaactcagctgaaggaggggagcagttattggctaatcagtgtcccttaacctagttctgtgtttcccccagtcgtgttcctgagagtgaagtttatatatgatgacttcatttgttctggcttttctcatgacaatcctaaggtcaagtctattttaagtctgagaaatatgtcctggaagttagtttcagagtccctatttcctttttctctcctttgtattgaaatcttggctgtcctccccattccctccttccaaactgttcttagaaac

SEQ ID NO: 81087 - DNA, 1035 bp, Homo sapiens
atacatatgtaactaacctgcacattgtgcacatgtaccctaaaacttaaagtataataataatagaataaaaaaaaaagaagaaaataatggttttaacatacagtattgttagactccgaaaagtagattagggctttctttttaagaatttatttggaaattaattttgatgatttataaatgattatataatacccagttatacaatttacccttgggaacaaagaaggaaatataatattatattggcttgtataatcaccctcttactttggaaacaaaagagtgggagtgggagaattttggagaacctgatccactgttaactctaataatcgtttcctgaagaacagccccatccacagttaaacagaaatctggggatattaaatggagctttgtactcttgtcacttttttctttcttcatcaatttctagttgcttagaattaagggctacactaaatgaccctgcatttgttggtgagaacaggggaagcagagagatgttttgtaagggatggaaggtagtatttacatacaaaattcacagatttggaccttagcaactttgatcctgatgggcttgatagagaaattacaaggttaaaagggctttgagatgtggtggaaagaacagagacttcctataccctgcctctaccactgtgcacttttaacaagttattatcttctctgagcatcacttttcttatctgcaaaatgggaataatgaattctatcttttagagtttttgagattaactgagataatgtgataaatgatacttttcttaaggcagtgaggtagaaaagcaacaaatttttattagctctttcttcctctccttcaatttaatctattatatgtgtttgccagaataaaggaattgtgtttaaaggattgtctgtaattactcaacttagtattttgaaatattttattgtggagaatttataacatgtacaaaagtagaattatgttgtatttgttgcataacaaattaccccaaagtttactggcttaaaaca

SEQ ID NO: 81088 - DNA, 1035 bp, Homo sapiens
agttttacgttttgcagatactttctccaacttcgtggcttactttttcattcctttacatgggtcttttgatgacccaaagttcttaattttgaaatctaacttatcagtcttttcctttatgattagtgcttttcgtatctggttaagaaatctttgcctcaatgaaagcaaaaatagaaaaatgaaattgcatcaaactaaaaagcttctgtactcggcaaaggaaacaattagcagcatggagagacaagctgcagactgggagaaaagatttgcaaatcacacatcagataaggggccaatatccaaaatatataagaaccgcaaactactaataacaagaaaacacgtaacttaaaaaatggccaaaggacctgaatagacatttctcagaagatatacagatggctaacagataaatggaaaaaaatgctcaacacctctaatcatcagagaaatgcaaattaaaccataatgaaatatatcacctcatacctttggattggctgttatcaaaaaggtgaaagataaggctgaggccggtggctcacacctgtaatcccagcactttgggagactgaggcaggcagatcacctgaggttaggagtttgagaccagcctgaccaacatggagaaaccccgtctctactaaagatacaaaattagccaggcgtggtggttcatgcctgtaatcctagctacttgggaggctgaggcaggagaattgcttgaactcgggaggcagaggttgcagtgagccgagattgtgccattgcactccagccttagtaacaagagcgaaactccatctcaagaaaaaaaaaaaaaagaaaagagtgggtacagtggctcatgcctataagcccatcactttgggaggctgagacgggaggatcgcttgagctcaggagttccagaccagcctgagcaacctagtaagacctcatttctatagaacacaaagtaaaaattagctaggaatagtggcacatgcctgtagtcccagctacttgggaatctgaggtgggagg

SEQ ID NO: 81089 - DNA, 1047 bp, Homo sapiens
gcctctcaaagtgttgagattacaagcatgagccaccatgcccagccaagagatggttttaacagtacagcctcaggttgaggacagcattcagaaggtccgatggtttaatacaagaaggaggctggggttaacaatttactctttgttgcagatttttttcagatagctttcagtctcaaaactcactttctacccaaagctatgacagagatagcatgtttagcttccctacctggtcaaggatgccttctttgttctagaaccaaagtaggggctttatgaatggttgtgcatccacttccagtagtaatggctatacattatggagcacttaactgtgtggcgggtactgcacagagtgcttcatatctgttactcatttaatcttcacaatcactattttccaagtgaagcttagcaaagtgaagaaactcacagtttttcagaaagggtcacagttcaaaccccatatctgtctaacctccagaatacgggttatgggaactgtgggtgattctagataattcgattgtgtggattgtcattctcattgtaatctccttaaatctcattaaagctcattagccaacccaataaaacctaggctggcctttgcagtcaggatgctagtagtgatcaggtatgcaggcaaacagctgtagaacctccagacaaggctctctgtctgaatatacagtgtgttacagaaacatgattgacaaatgtaaatattcctgaaatagattcatctgagagagaggcatgctgctaatttgttaatcaattgatttggtatccatatcacccatgcctgctgaattcagtttttctttagaagggagttaaataaatagcactgagttctcaacctttggctccctgctccctggggcagcctgtagaccccccttttcattctgacagatgaataggcaagtgatcagttttgtcttttgggagggtggagggaagaggtagattctagtctggcctccatgattttatacctcagattgccacattggatttgaggatcctcagatc

SEQ ID NO: 81090 - DNA, 1050 bp, Homo sapiens
catactatcccttcaggctttccatgtacaaccagtgaccatctgtttctctctctggacaaagagaaataatgtgatcaaagggacacagcctggaaagagtcaggagataccagttcttaggtgtggaagagtctaaatccagacacttgtggaccacctattactgtaagacaagtgcagtgctagatactaggagtacaaagaacctaatcctgtcccttgggtagcaggagaggaaaatgcaaataacaacatggtccagtcagttttaatagaaaaaagtatctaacacgtaaatactttggatccaatcatatttaagtccaatttagttcttaccttatgagcaaggtaagctcattaactccattttattgatgaagaagctgacactcagagaagtatggtcaaatagttggtaagcagtagttgcaggaatgggacccagttctgtctgaatttaattcctgtgatcttttcatgctctattaggaaaagtctaaaataacctggccgtaatctgtatctagctggaaaaagatcaagaaactggaaaacagcatttatccttctgacagatctttactgaacatccactatgtgccaaatggtctcctaggcattgaggattcaatagacagcaagacagacaatatctctgattaacaacagggaaagatgtgatggagagtaactgaatcagagtcaaggaaggcccctctgaggcagcaatgcaggaggtgagatctgaatgacaggaagtagccaaccatgcaagaggtggaggaaggagtaccaggcagaggaacagctagtgcacaggacctacagtggaaataaggtgggacactggaggaaacaaagaggaagaaggtcaagagatgaggttacagctaagcaggggccatacaaagaaggtcatgagatgaagttacagctaagcaggggtcatacgatgcagagttttctaaggcaggacaagacatttgaattttattctaaatttcatgaaaagccgcttaaaggttttatacaaagaagtgacat

SEQ ID NO: 81091 - DNA, 1074 bp, Homo sapiens
cagaaaacaaccaattgatgaacaatgagatcacatggacacaggaaggggaatatcacactctggggactgtggtggggaggggggaggggggagggatagcattgggagatatacctaatgctagatgacgagttagtgggtgcagcgcaccagcatggcacatgtatacatatgtaactaacctgcacaatgtgcacatgtaccctaaaacttaaagtataattaaaaaaaaaaaaaagaaaacaaccaattgaaattcagcgaagttatccatgctccccgcacatgaacatgtttcattcactattacatttaaaaatatatgagaagtgctgacagaaatgtgtgctcttagttctttgcatgtatggtctttgtgtagttgagtaaactcggaagaaataagccttaggagggtttctgatagctttgcagtctgtttcacaggctgcccatctcctccttaccactgttgccccattttcagtctgcttctgaagggatggagcacgggtgctcctgaaccagattgggagtgggaatagcagggagagagagggaaggaggctggctggataaggaagacgctatggatacaggcctcgcttgctccaggccaggactgacgtgattggggcagccagccactgtcctgggcagaggcacagatgctacctcttgcacctggtgactgtgtcacttaactgataggctttgaagtgtcacattttggtctactttaaatctttcttcttttaatcaaagcaattttttttttaacttggaggaattacataaaatcttgagtcaaacatttcaatacattatttataggattaagtattctaataatttcaccaagatattagcattcaccatctgagaacttacccagttaactttctttcagctaaaataaatattaatgtgttttaattcttttagtttcaagataaaatgcttaactaaatctttgttgagttctgccagtgggtttcttagcaaaaaagtaggcatatggccaggtgcagtggctcacacctgcaatcccagcactttgggaggccacag

SEQ ID NO: 81092 - DNA, 1049 bp, Homo sapiens
gtttcagttggtctggggaggggcctgcatgctggtgttttttcaaattgcagataattctaatatgcagctgagagttgagaaccactgggagaggcctagcaaagatgggctcaggtcctagccgtgggtgtgatatgctttggagaaagtgaggttaagttagcttagaagtctaggatttgtagtcccagcccctttcgtggaagaaggttaagggagaggagactaaccgctgtttaagcagagggaataagcttgctttctgaggatccctggacctgattcttcaccctccatgccctgtgggatccttgggacagaaacaaaagttggcaaggggcaggaaagatgagatgtttagataaagagaacagtgtttaaacacgcatagcaaaacaaaagttttgagggagggggcaaacaggagcaagatgctgtacatttggtcacatgctagttttttttaccttgatttctgcctttggggtaaaaaagtttggtggatacataacattcagaccaattaaaaagtctgattgcatgcatgggaatccatttgtggaaatggataaatacacattccctccacagccctcacatcccctccacagccctcacatcccagaatcttacctgcggaggaactgaggacccctgtctatctcaaggccccgattccatgtctcctggagtggcacaagcactatgtcaagaaatctcttttccctgtccctgcccaatcagaagtgggttcctgtccagtgtttttgggtgttcccatggggtcttggctgatggaggtgtggacagcaggtctagcatactcctcccttctcagtcggtgggagctggcaggcatgtcacctctgtcagacctctgggtaagaaaggggctctgttttggcctataggtataaggtttatcatgctcctggtcaacaggtcttgccttcccctgtgggggtgacagtagctgttctttacatttatgcagcagtttgtacttaaaatgctttctcccatcatgtctttttattctcggtgac

SEQ ID NO: 81093 - DNA, 1341 bp, Homo sapiens
catttgggttttttccattttttggcttttctgagtaatactgctatgaacatttgcgtataagtttttgtgtggacataatggggctgtttcccaaaaaggggctgcacttttttacattcccaccagcagtgtaggagggttcctcactaatacatgttatcgactgtcttttttattattcaagtgggtgtgatatagtgttccacttatttttgttaatgtttattttctaatttttttcaataaacattgtcacttgtataattttaaaaatgttttcaaacacgaaggatgtgagaaaatgctcacagaagaaggctaagtgaagaaagcaggaagcaaagctagtctttccagatgccctcaattttgtgaaaataatttgtttaaaataataggtagaaatgattgccttctctttgccaggctctgtgcagtattcttgactctattctcttatttagtcttcatgaagactctaaggtggtgaaagggaaggcttgatggggttcagtcacttgcccagggtcccacagctgctgaagagctgtgatttgaccgtggtatgtggccaccctggctcactggcccaatgtgtctttccttcatattggaaggaaagataccgcagtgtgtacatagtggtgattccagtggaggggcttgcaggggggtgtttatttctttttatgttttaaaatattttctcccttccttataaatcggacaaaaaatacatttaaataatgtaataacccaagattttattttgtagtatttacattaatcattcctttttttgtttactcataaagggcttgtaactcagtattcactgcattagaaaacagtgaagatgcaattgaaattacaagcgaagaccgttttatacaggtttgttattttggaaatctgtctttctggatttcttgttttgctttttccaacttttaggattgaacctctccaatatgatttttttttttctttttgaagtttaggagaccagtttttccttcgaggattatcagaacaaaatcaaatatgtaatttaaaataagctctctatagattagaaaacatactaataattaaggtgctagaaaatgcctgtagaaatgccacatttgcattcattatttccactagtttgtttatttaacaaggagagactcactgaaaaggatgattgctgggggcttgggggtagtgctgttgtacgaaggggaatgccctgaccataggtctgcaagtacaagtctttcacctttctcactgtttttgaagataatttgcacttacagaaatatactagaaacaactaaaagtttcagaaat

SEQ ID NO: 81094 - DNA, 2069 bp, Homo sapiens
ggtgtgagccactgcagctggcctgtactgctttatttctaaaaagagcctgggtatttgtttcgtttttcacagtttttggggagcatggaaaagcaacctttgtcctttgtcaggaacctgctggtctatgggcaacatggcagcagggcaggccgctgagctggcctgtgttttgaggtgaaagaatccataattccatctccggggaacagggcttgttgaggggtcagcaggccttatggaacagtggcactgtgatcaggaaggggaattcaggcatctgctggagaccagcattgcagaatggagacttaggaaatggccagatggctaggagttgggaccttggagtgtcagatgctaggtgttggatattgaagtttgaccttggggcagaagagaaattttgctgatgttcaagcagggaatattataaacattttccatctccacaaaccctgctgcccattgttgtcagtggctcctcttttgggtaaaaataacaggtatgttgatttccagcccccgcacttaggcttctttgcatcctatatgtatatccacctgactcttctcttttttcttcttccccaagacttgtctatcagggctttagaacccatagtctcccatcttctcagatacctaaactttatattgtcaattctcttttagagatcttttttttttttcttgagacatggacttgatctgtcacccaggctggagtgcggtggcacgatcttggctcactgcagccttgatctcccaggctcaagcgattttcccacttcagcctcccaagtagctgggaccacacgtgtctaccatcacacctggctaattttttaagcatattttttagaaatggggtctcactgtgttgcccaggctggtctcaaactcctaggctcaagcagtcctactccctcagcttcccaaagtactgggattacaggcgtgagccaccatgcttggcctcttttaaaaatcttgattttttttttccctccctcagaaactgtgtgttcttcttttgtcatttaatgggtaccaagtaaatggtggctacttagatgcctaagatgatgatgtgcagctgcagaaatcttcagcatttcaaaacttttaccttcattagctcctgtgcctttgctttcctctcactgtctccccttttcctactcttcttccatttcctcccagatttaccagaactctggcctttgccccctactgttgtccctcagaatgttcctttgttgttgaagtatcttttctgctctgtgtagaaatctcacacttctctggttttagtgtcagcctcttttccaaggtctggttcagcatcctactatcatcttaattgtctagcaatggttttctctcatctcccaaaaacccaatctctcttccaaatcctgctgtctctgctcatggacctacctcacagttgctttgacttagattcctgaaatggttttgatcccttcctccccgttggtcccctccatcaaatccacaagcattgatggctgttaaacccctgttttgagggtccattgcctgggcctgaccttgctcagggccttcttcccacactctggagttacagtgtgtaactctgtctccttgtccggaatcctccatctccactcggtccaccatacactactgcctgattagtcttactgagtcatcattttgtcatgttgcttcctcagcatagagctcatagtcctcagcttggctgccaggattctatagttgaacctcagcctacctttcccattcagtaacaaaagccccaagtgttctttgacagtttatcatgtgcacacactgtgcccaccctggggataggatggctggatgatgatgatttaattctcaagacagcgggtgccaagagggactgcatcaatagcttggtgcatagcttgtagcagacagaagggaggtaatagtcttactcctgttctgaggggagcttggcctggagaaagaggcctatgcaaaccacctgcacccaaaccagctcatttactgaatgtttactgttatgt

SEQ ID NO: 81095 - DNA, 1159 bp, Homo sapiens
ccttcagttgcacgggaggcaacagctttgacgtctagtgagccttttctcctgtctttatgtttgcctgtctgattatctgtagaaacaaatgataaatcacctcttcaaagatatttaaacaacatattaaggaaggttaccaatctaaaatttttttaaaactctcaactttaaatgttttaaatgccacaaaagtaaacacagtacagagatgaagactatgagaaaccagttttatgggggtagagtttctcaaaatgtcccaccaggtgcacagataaacaagggctttacagttccagattatgtaattacagagtcccaagacataaagtgacaactgatagaaatgacctcaggagaatttctcctattatatttctatataattgaataaaatgatgggaaaattttgatccccactcatcttgccccaaagaaaaaaaatcttttattttctctacaaaataaggactacaatatcccagggaaaacattcttctctttcctagggtagtatggtgaacactgtttgaggtatatttcaaatgatagctcatctgcctccctttcaccccctcttctctacgaaggacacactactctcctaggcttcaaacggggactgtctttgactcttctctaatcctgacccccaaaccaatcactgacaaggcaactctgacttaccttcctgaccccttctctgtgcacctgctgggtaccatgcatccccatttcacagacaaggaaactaggagctgctttgcagatgagtgcatagcagggtgggcgctgagctcagctcttcccacagccatggagtagcttctctgccttgtcttggcttcctcacttggaacttctctccctgctcatgtacaggatccgaatgtaggcccttagcacttcctttgcaccatcgaaaaggctcttcacttgctctttgcttctttgcccaattaaactaaatcctcttctctgtgggcactaaagagtgaatgtgtcaaggtcaccaacgacctcctttttgctaaatctgaaggctacaactcaatccttacctgacctgacttgattgtggtactagacacaactgatccctttctggacacttctgtttgcagagtccacactctcctggttttccttccac

SEQ ID NO: 81096 - DNA, 1125 bp, Homo sapiens
ttgacacattcactctttagtgcccacagagaagaggatttagtttaattgggcaaagaagcaaagagcaagtgaagagccttttcgatggtgcaaaggaagtgctaagggcctacattcggatcctgtacatgagcagggagagaagttccaagtgaggaagccaagacaaggcagagaagctactccatggctgtgggaagagctgagctcagcgcccaccctgctatgcactcatctgcaaagcagctcctagtttccttgtctgtgaaatggggatgcatggtacccagcaggtgcacagagaaggggtcaggaaggtaagtcagagttgccttgtcagtgattggtttgggggtcaggattagagaagagtcaaagacagtccccgtttgaagcctaggagagtagtgtgtccttcgtagagaagagggggtgaaagggaggcagatgagctatcatttgaaatatacctcaaacagtgttcaccatactaccctaggaaagagaagaatgttttccctgggatattgtagtccttattttgtagagaaaataaaagattttttttctttggggcaagatgagtggggatcaaaattttcccatcattttattcaattatatagaaatataataggagaaattctcctgaggtcatttctatcagttgtcactttatgtcttgggactctgtaattacataatctggaactgtaaagcccttgtttatctgtgcacctggtgggacattttgagaaactctacccccataaaactggtttctcatagtcttcatctctgtactgtgtttacttttgtggcatttaaaacatttaaagttgagagttttaaaaaaattttagattggtaaccttccttaatatgttgtttaaatatctttgaagaggtgatttatcatttgtttctacagataatcagacaggcaaacataaagacaggagaaaaggctcactagacgtcaaagctgttgcctcccgtgcaactgaaggtgagtgacaaagacaagagaaaaaaatgtgatcaaatcactgttgaacacatggagccctgccctgccttgcccaggctcatcctgtctacctccaattcttgggagaggag

SEQ ID NO: 81097 - DNA, 1033 bp, Homo sapiens
ttttcacctcattaagaagtttcttggtatgtcataaagcctcagaaacaaagcagctgtccctgaggcggtactgtcctccctaagaaacagttaatcctggccgggagcggtggctcacaccgccgagatgggcagatcacaaggtcaggagttcaagaccagcctggccaacatggcaaaatcctgtctctactgaaaatacaaaaaattagccaggcatggtggcaggtgcctgtaatcccactactcaggaggctgaggcaggagaatcacttgaacccgggaggcggaggttgcagtgagctgagactgtaccacaacactccagcctgggcaacagagtgagattccgtctcaaaaaaaaaaaaaaaagttaatcctttaaagcctatttgttctccaaattacatcactttacagacactcaaatggtttcaagcaatataatcactcccatctcccttgatgatgtcccaccacggatagctcgggccatggaaaatgaggaatactgggactttgatatttttgaactggaggctgccacccacaataggtgagttcatgcagagctcagcagcgggagaactagattcccagggcctgtgtgaggaggctacctgaggagtatggattgtgcacaagcctggtacctggtcagggtggggccctaaggaaggagtaacagggcaccaggtggctctgagtcaccagggcctgggggagagtctgctggccacagtgatggcacattcatggaaagcatgcaactgagccagtgacttctccaagtagcacaggacttttttctgtgaaataaaggtatttctcctgtaggtggtaatatgttaagattgctgtaagagatctgctcagagcctagaaccaaaatttattagaaacacatacacatgtgataagagctgctcccagcttttggttgttctgttggtgataggcatagggacacccaaagccccagtcatcctcatctgggtgtgatcacagagagtgggagcaggaatggggt

SEQ ID NO: 81098 - DNA, 1042 bp, Homo sapiens
gttttcttataggcaggatgtctggccaatggcatgggtccagcaagtccaaaggagaggatagtgttcaaggtggtacaagcttagcctggagaaagggttattttgaggaacccactagtgcaagtaggaagctgaacctggaaggacagaatgagcaaactccccccaacaaatcgggagccccaacgaggctgaggtcagagctgctgtgggcagccagctctcacccgtgcatcatggtcccctgagggcaagaagtggaaccagagttggttggccccaccagagagaggccagcacagcccaagcaatctccactttgctgccctgcactctctgaaatttggcttggaacctattcaggccttaaacacttggcctgtttgtttgctttgttctaatattgtggggttttttctgtctataggcctttgatttatcttggtctcaaaatgtttgctcgctttggaatctgtgaattcttacactgctccgagtcaacgctaagatcatggttacaaattatcgaagccaattatcattcctccaatccctaccacaattctacacattctgctgatgtgcttcatgccactgcctattttctctccaaggagaggataaaggtgagctgttgtttacctgccacatttaatgggcaggagcagtggggagagtctagtgcttctgcctccactaagatacatagcatgactgctcacgtgtgcagcctggcacaggaagggcaaggtcatacgaggaatcaggcaggaggccacattagctttgggaaattgatgtgttaattcatgacataatcccagctattccatgagggtacaagaggcagaatttggtcccggaggagaaacctaacaaggacaggatagggctattcttctgggggtctcactccaagcctgtacactagtagagccaagtaactgttggatatccccactttagggcctccatctgtacatgaaagtctgcagggctctaaggtcaggttcatcatctctgttcccagcactgctcc

SEQ ID NO: 81099 - DNA, 1044 bp, Homo sapiens
acacttaatttggtttgtgtggcttattatatgaacatgattctgtttcagttccccagatggaactagcttaaatgtctgtcattcatagtggagcaaaatggccagagtgtcatttattgttaacttcagttgtattcctttaccatctgctaaatgaaaaagaaaaatttgagaaatactgtgtgtgtcagtttgctcagagtgatttctcgtgctaagtgagtcctgtggagaagcgttcctgggcttttctggtttggtgggccttgtgttataaaaccaattttcttcacctgatgaagctaaagacaaattttcttcaggtacagccattgcacttttaaattacagagccgcttttaggattcacagtactcgctccatggcttcccttcctggttgtgtggttttgtgtgtgtgattgtggggaaggaggttgacagaggttggaagggattgtcagggagggacataatgtaagcaagtactacttacaacatgacgtgacgagtgcactagttgctttccttctctgggcggtgatggcatgttatactgtaggtactattgttttaggatttctcacacttcttttgccttgactaaatggtaactgcacacatactatactataaatggactcctcctctagtcctttaactccttgagggctgtgatagaccttatttagctttttaccctctttgccggtagtcttaacatagtgcaggcacggtacgtgtttgaattgggtaaattatttttactgcctagtggtagctagcgtacacaggagagagccactaactggggacctgtccagaatgacagttcacttgcagatctgtgatgacatttactttaaaaggatttctaacctttttttaatctgtcaattattttttgaaaagaagtgggtttaactagcgctctaaggatttcaacaagaggttccaatttagaaatcagcccccccctttttgtgaaattattattgtttttttttagagtcggaatcttcactgttgcccagttgtctct

SEQ ID NO: 81100 - DNA, 1012 bp, Homo sapiens
ggactgcaaaccttttattaagcacttttatatgaaatttgaggtttctgtcaaattagacatggaaaattaaagctgcacaaattactgatctgtgcagtttttttgagtcctctcgtatgttagactttttttttttttttttttttaagataactgtttctcttaagtaccagcacaggaatgctatgatttatacataattatttttgttttcacgtcagtagtcttttgttccccccattgaatttggtgattcccccccgccccccgaggattattttttaaataatgcattcccaagtattttgacttttgtgaaagaaaatactttttaaggtaattgaatacctccataaatcttgtatttccttaataatttatttggcaatgtatttaaaaacagtgttgatatcttaaaagctttcatttgaaggcccaaaaacaactgatacattgtttttcatagcactttttgtaaatattatgtcctaagtgcatagattctttgaaatactcctctttcaccccctctgtggtaaagaattattttggctgctttgccaaaagtgcttgtggcagtctaaagatgatcactttattagttagctcactgggatatgtgcccataaatggagagttttctttcccgagctcaaataaaggtaatggttcatctgtgagatacctcgggactcaaatactaattcagaagaaaaattatatttattctctcccctcagccttgatgcatgttgaaatctgcggggacaagttcactaatataatagctgtcacttattgggaaccattattgatctattggtagctattcatctaagtgtcttatataggtcaggtcttatctctgcaaggaaggtatttttatgattttaccagaaaaggaaattgaagctcagagaaattaatagctaattttatatatacttcattcagcattttatttaaggcctgttgtatgtcaggcacactactgggcaccagggattga

SEQ ID NO: 81101 - DNA, 1056 bp, Homo sapiens
gatgggacgggtgtgctgggtctttttttttttttttgggacggagtcttgctctgtcacccaggctggaatgcagtggtgcgatctgggctcactgcaacctccgcctcctgggttcaagagattctcctgtttcagcttcccgagtggctgagactacaggcatgcgctgccatgcctggctaatttttttaaaattttttttatttttagtagagacagggtttcaccatgttggccaggctgttcttcaactcctgacctcaggtgatctgtctgccttggcctcccaaagtgctgggattataggcatgagccatcgtgcccggcctgtgctgggtcttaaagcatgagtaggaatttgccaggcctgggttgaggagagaaagaatggaatgatggttctgctgtgatacactgtgtgcaaagaaacagacgtcaaagagcttggtgtgtttgaactcagtgagcagtgaggtgtagaattatttcgtgtggatagggtgtggtcaccgaattaggttagaaagtcaaaatggggtgggtggaagcgtcttttagtttgtcctcttgaagcaaaagggaggatagtctggttttgttttggatacctcattctgtgagcagtagaggatagtggcttggcagagggagaagggagcattgcctctcagacaagttagaggaggccattaccatagttttggacagattgtgagggcttgaatgcagtgaggttggaagggagccagcagatctaatggacattttgaaagttgaatggatgaaacttgttgagtagatggtgggaattaggaggtggtagttgtccagaataactgggaatttctagcacaggctgctgggtgaatgagagtgcactgaggggcatgattcattctggcatgggagaggagttggcttcctggaagtggtaatgtttacatttggcttagattacctcattcaaagtggttcttgattttgcccacaatctattttagagtccatttattcatctagaaagtaccaactgcttactgcatgccagtaatt

SEQ ID NO: 81102 - DNA, 1648 bp, Homo sapiens
attggttcaacatcaggagtgggatgggaaggaaaacacaataagaagaaaattgaaagatgggaaattagtggtggactgtgtcatgaacagtgtcacctgtactcggatctatgaaaaagtagaataaaaattccatcatcactttggacaggagttaactaagagaatgaccaagctcagttcaatgagcaaatctccataccgtttctttttttttttttttcattactgtgttcaattatctttatcccaaacattttacatacagctatttcaaagtgtgttggattaattaggatcatccctttggttaataaataaatgtgtttgtgctaataaaaaaaatgagatgtgtatattgatgattatcttttaaaaaataatgggaggtttatgagagagctggtgcacttaaagcctggtggttcagtacgcataacccctagagctcagttttcatggatcaaggcagatttgtaaatagaagaataatgagtcagtatggtaaatgtcaatgggaagattcgaatgaagtgagatgggagcacagaaggatggagcaactatatttgctttgaggagtcaaggagggaaggacattctaaaattttgagagcattaaagaataggttactcttttataattgtagagtttattgtactatgtatttgcataaatggacacataatatttagttaaatacctctattcattgtgcagtttatgtttagcactgtgccaggttcttggggaaggagttaaaaaataaaagatgtcctgtttcagtactttcttgggagtggggctactatgtgaacagcttgagtaacattttgttcaagactcagttgtgggtagccaggtactgtggtggactggtgcttttgttaagtctggtttttttcctccctgctggtaagccactttagaaatgatcagtttcattaatgtaaagtcatattttatacctctacgcactaattcccgtggacatgactggtagctacgataatttttgggactccagtggtcaatgagtatgtctcaggtacttaatttcttccatggctaactagtttttagtgggcaaaaggaaatttgagagaagctgcataatttgctttaacttgcagggtgtgttaagtattgaatcacatctattatgattatggaattttggtgtgtgtttgaatgtcagagatagtgttaaggtcagaattctgctgaaaactgacccatctgaaaaccagtatgttcactccattccactcttcagcaaggccatagtttccctatcatggttcatttctccttttccctgcccattaaaggtagcaaattttggaggttcttacacatttggggttcttaaaattgttctgtaatgtgtaagctcggctgtccacaaatgattataggattgacatttgttatttggtggagtttgatatattagagtaatataaatgtgttatgcttcaaaatgaaatacgggatttttattcactagtttgtctttgtttcattcctttccaaaagaaaattaatgcttaacttgaacagctgattttttgcattgtttcccttaaaagcttgctagcataggaacaaaaggtaacttttttctttgccttttattgtttt

SEQ ID NO: 81103 - DNA, 1025 bp, Homo sapiens
agctttctcttttagctatttcaactcaattctaacctcattcctaacttagcctaactctatagtttattttggctgcaaaatcctgcccactttatcttctataaaaatgtatttttccttcaatgaggggaaaaatgcaagctaacatatttattttggattatctttttaccccattattttcctaatgagctctgttcatgcctctctgcaaatcttaaaaaaaaaaaagtcgattcagtttgaggatagctgaaacattttttatgcagaaagtggtttgtaaaatacgggagaattctactgaattccctcttagagcatcattcagtagtagcttactggtgataaagattactattgatgtctttactattctgggaaagttttaaagtttacaaggagaatgttagaattcagtatataaaccaggaaaaactttactttgttatctgaaaaagacctaagtggatataaggcctcattataccactcaattttcattcacttcgcaaaattgacttttatgaagctaatataatacaaggtgaaaaaaatggtccatgatcctggcagtgttgctatggactaatttccatcactttgagtcatattactataaaagggcagaaaacactgggggaggctcttagcagatttctaactactttgtttactttggttgatagggagtttgctgtcatatttttgaaaggtggtggtggtgggattgtctgctatctcctttctctgccacctcccaggtatataggtgatggttacaatttggaaaatatagaaagaaaaaaaaatatacaccccattaccttgagatacttaacattttagttttcttcttgcttttttctctttcttacatggttttaaaaatagtttttaaaatattaaatcatataccattattttctcctttttcccccctttaacactgtgttcccttctgtacagttttttttttttttttttttttttggagtactgtttttaagggatagcatcat

SEQ ID NO: 81104 - DNA, 1080 bp, Homo sapiens
ggggtttcaccgtgttagccaggatagtctcaatctcctgaccttgtgatccgcctgcctcagcctcccaaagtgctgggattacaggcgtgagccactgtgcctggcctagcctgcttttccttaacagtaccatcatctatctagttaaggtgaaaatctttctagactcctacttagtcttcactctcaagtatattggatcactaagttctagccatgctacctttcaaatatttctcaaatttgttttctcctcttcatccctattactattgcccatatttaggttcactagtttttatcaggacagctgcagtagcctcccaagttccttttcacagacttaccttttcaaatgtgttttcatatcaagggcaaaaattgctttcttgggcatacatgtcatgctattttaatgcttacagacttttaatggcttcccattgcacctggagtcaaatttaactccatattagtctataattgtttctttttatctttctggcgttttctcctgctcctatcacacacacactcaccaagcttttgctatcaaacttctagcagttttctgactattgtgtgcaattttatgtgcatatgcatttgtacaggctgtttattctccctggaaagtacacagcccccgatacagctcgccctgcattttacccatcattgtaatgcgttcttagaagatacagtggaagttcactggtgtgacattattcatgaaccctgtcacccccagcctggacagaaataccttccttgctccatgtttattgagccatttatgatactttctgtggtagacaggataatggcccccacaaagttgtccatgtccttatccttggaacctatgaacattttaccttatatggcacaaggttctctctgaagatataattaagatgaaaggccttgagatgtggagatcatcttggattacccagatgggccagtctaatcataggaatctttaaaagcagagaacctttcttgcctgtgggcagagagagagatgacaattgaagaaaggtcagataaatttgactttgctggctctgaaga

SEQ ID NO: 81105 - DNA, 1048 bp, Homo sapiens
ccattagaaataaaatttttcattgaagcgattaacattaacaaaatctttaataggggactgcttagaatattgaagttttcctcatatctgtagaattttcacttaattatgacatatacaagtttttaatttgaagtcttcattgtttaaaacttttccttccaattttgataggtggtttaacaaaaacctaccaccttgtgtttccagtgtcattgttctcaagatgttaaaggcttagtattgtgaaattataacattgaagacaatatttattctcaagacaagaaccagtctaataattaacaaggtaactgacatttttaacgtctctgatcccctctgacacttgtgtgactcgttcgatagtcacataacgtgtgtgagaaggtgggccgtgcctgccttggaaatcattcctaacaggtctcgcatttgtccaggtaaggtcatccagctcagtaatgtcctcatttgtgtgagagcctacctgcctatatttagtctttccaggtggtttataattggtttagcccattggacagcctgctttttggttgatagaggctggggaggatgaaggaagtgtaaaggcttgaatttggcagtctctttgccggatatctattttaacccctcctgaagttaatttacataaaacccagctgtgtaagaatttttctaaatttaaagtttattcttattaccgtagggataggaatgtcagcactcactgaattatggccttcctctcctgtgtctggacctcctggcagcttatggttcccgtttcctttggataacaggatacagctggtggcaaaattctcacctgtggaatggccattgggagttttcttctccatatagatctttgcaaagcagcagaaaccatttttgcaggaaaccacaagcctgtgttaaacaccaaaagagaattgaaataacatgtccatgagttcctctttccagaggtaccaaccatcatgtgggatcctaagtatagtgttaagtagctctttgtcctccccttcactttgaggtt

SEQ ID NO: 81106 - DNA, 1062 bp, Homo sapiens
ataaactctaaaatgattataaggatgtcagagttctgattttttaaaactacatttaacttactattttaaattatttgtatttcattattgtaagagttctgattttttttccatgataattacattgatttggtgtttgtgcatgtgtttggcccaaactcaggatcatttatgccttttgggtaatccagcgttgataaagaataaattaaatgagtgaacgtgggtgttactgttttgtcgttgctgttgttttaatttgctatgttcttttgttttactgttgaatgttaccctgtgttagactcttcatttccttcatgtcatgcctgcctcctttgtcccactcccaacccctcgccttacccatttgggctcagtgctttgtgttttgtcttggtggctagtaagtaccatcatatgatagtggggcagagcagggctaactgttccgtatgagaatcagacacatattatgagtcttaacatcatttcccgaagtgtgggtcatgattccagagcaaaggatcaccagatttggtctcccgatttctactctttctggtcctgggaatgagaatcagccttatttaacaaggccttaaactgatgttcatgtgtactaaggttcaagaatcgctgcttaaaactaactgctcaattattaatgtagctgcaaacaaaagtaaagcattcatgagggtcttgtaagacttcctcagtcccttattcaggaaatatatttggcccatgtggtattttacttttttgatagaacttggcatcttcaacaggaaaagcgtatttactttttgtatcctggtcttcttccgttgttcagaatttctagctcatattcccagcctccccaaccagggcataacatttttatagccaccagcccaggctccgtgggttgaaggaaagagtttttggatcctgttattttcctggaggaagagctgaacattgactcttttacaagaatccaaagtatgcattgtcatttccatgttaaccctcactcgaaatttttgtgggttttgaaggattgactgt

SEQ ID NO: 81107 - DNA, 1152 bp, Homo sapiens
tgttaattcctgtataaatttcactgatatttcttctgcttgatgcaggaacacttgacaagttagttaaggtagattggtccataaatttataggttctttcattcccatgtcctaggcaagtctgagcaggccctggaaagctgattaaaaggccagtgagcacagtgagcttaattgtaaattaaatggatatttaatacattaagaaggcactcaagcctttcaatctttcattttcatccatgcttgctgtttgaatctgatgggcttgaaattgactttgttcttctaaaaatgttggttggttattgctgcctttctcaagcttggttttcagtgtggatttctgcagataatttttgcacctaaaagtacaaagtcattaagtgaagatagtcaggaaggaaagagtgccctgagccaggaggtctgttatagcgcatggggtggaccagagaatgaatgggcatgggcatggaggtggttcagtcagtgtgggaaagccacttgcttgtcagttttctactgcgttgtccagcagaacacgttgaagcttggggcctgcaactggtgtggagatgattgcatttaggaggctgatgtagatttttttccctctaagtgtgtgttaactgccttttggtgaagtcttgatccgagacatacacaacttgatctgtgaggattgtaatatcgagatggttctgttatttgagttaggcatggctaggctaccaaggcattgcttttcagtcccaacagttggtcatttcaatttcagtgaggcttttgtgatttgttagaatacaaagtttgttattttgtctgtgtttttgcatgtatgaatgacactttatactgttattttgctggttagtatgtgccttcatttacctattgtgagtaagaaacttcctcagatcaaattatagtaaagtcacttggttctgtttctctgactcttaagagattgagatcactttatactcaaactcagggtgtttggtaaaggacctacccttctgagcatttatagcctagatgaagtcctggtccaatcaccaagttaaacttttaagaacatgctattcttaatgttcaggaattcaaccctggaagccttctctaaatcttaatgagatttttatg

SEQ ID NO: 81108 - DNA, 1272 bp, Homo sapiens
ggtgggggaagttctctgcacctggacaaagaaataagcaagagaacaaagactgtgaagattttcatttagatcatatttgggatctgccaggggtgagtatcatcattagaagggagaatattgctgctaaataaggaaaaacactgtacccggagaagaacttttatctgtcagttaagacaaataggctggactccaaataaatattttaatcagactttgaataaagatgtgtccagaatacgttgcaatagttaaaaatgtaaggaaggttccaaagtgtacaggtggcagtactgttggatgtttcaattaagctcttttaatgaattattttcaatgaaatgttcaccataaaatgtgcaggaccctggcctgaaactttggagaccagtagctcaatatggctatgccttggttttcctgtctgttagctctgattgcatgagtacaacctttatgttaggcaagctagttacatcactaagtcgggtttttctcacagtcgccacaaaagtaatgattattgccagatgaattcataagaattgcattttcagttccatttagtggtagtgctaaaaactctgagtagcttagtagtatccttcttggtatgagggcctggattgtttagagagaggaaagatggagaggcagtggcagatgcaagaaatatttcaaaagaaacagcagggccaaatgctttattagactatagggagtgaaagagaaccatgaatgacagttgattgagaacttgagtgtgagtgacagctgatgccatcattgggtatagagaagaaggagatgatgatcttgttctttacacatgttaaataaagtcacatgggtatcctgttcataggtggaggtgtgtgcttgaaactacagagcaaggaagttggttttgaagtgaaatcgtttgagtcttctctaagaaattgattcttttgacaccatgtgactgtaagaatagatgagctctttgagaagctaaaagagtggatggaattagtatagtggactgtggtgtagaagacaaagtgagtcaagaaaggagttccagaaacctgggttgcattttagccttaaacattttgttcctggtgtttcttaatttcacttatacatcaggattggaagtaaactttgggctggagctgggcaatttattcttttattcaggtgccttctttgtgccaagacctgttctggatgctggagatttagccatgaacaaaacagaaggtccctgctctcctggta

SEQ ID NO: 81109 - DNA, 1034 bp, Homo sapiens
ctccagaaacagtaaataaatcctccctcagactaacagctgaaaaggaaacaagagttttagacttctgatgaaggaggaggaaagggtctttggatgccccttatgtcaggccccaggcttagtctggaagagatctgtctaggccaggcctgaagctctgcaaggtacaaggaaataatagctgtcaagaattaggcgacgtggatgaatcccatacttgatatgccagagaaagtcacttcctctgtcctctcatcattttactacacccaagtgaatgtcccacactcagttctacatgtaggaatggactttatgggagaggtcaggactggtgacgaatttgatgagtcataggaatcattgtatgttaggagtggttgagcccagtcttccggaagagtgaggatattgaactacagagagagattgagggaagttgcctgcagtttcacagcaggttacgagaggtctgaacaggtagcagaatctgcaaataattagcttatctggtgtacaggaggcaggtccctaattggtttgaatttaatactcaaagtacatgcgcagagaagttatagtataagattcagaacaaatgggctaagtaagagaaaaaaatgtagcaattggaagatgaagaagagaggaatattcaaaaagatagcattgtgctcctttcttggtggagtgaacaggtgaggattatactgtctttatggattataggtacattggaaaatagtttacagttattatttgaaattcctctatagtgaaggaagtagtcaagataaaatgtgttttgtgacttttgatataggaaagtcagtaatagccatctcaataaagtatatgctcagctatttcatctttatacttagagattcctcaagaggatggttacacattagctctggatcagtgagagtaagaccaaggccctggaacagtaaggctttctcttgtaaagctcagttcccatggttctttgatgctttttctgtgttagaataatgttctttactggt

SEQ ID NO: 81110 - DNA, 1103 bp, Homo sapiens
gggcaccttgatctgcctgcagtgggtgaggcatagtatgtattagatcaggtaaaggaggcccttcatctgaggaaggggcccaggtttctacttagaaaagaaaggcattgtatttcatgctttactctctcgctctaatcatcagtgtgacagataaagggagcagcatggccgagtagtgagacaggtaggaagagtgagccttgaacatgtgttcatgaattctcaggggcttggtatacttgtagcaaagtgtttgaggagaggctctgtgagggagatgatgctggaggggtcagtgagggctaggtttgttgggggctttgtgtgctgtgtgttgaagggacatgctcaggcatagggctttatcaggagagtagcttgatcagattgtattttggagactctgtgcttcccagtgtgtggaggccagcttagaagcctggagtcccaacttaattgatgactttggagaaaaacaagagaactgaggataataaataaccaagaaagctaggtgaataactgtaagatataggtgagagcagaagtcagatcttcagattttaatgacagaatgtcaccttttcaatcagcaacaaagtagccgagtataatcttcaaccatctgctctctgggagaggagagaggagaggggaaggagcgaggaatgaggagccagagagattgattttagctaatcacttctaactctttcattaaatttttatggagaattaatacaggctgggcgcagtggctcgtgctggtaatcccagcactttgggaggctgaagtgggaggatagcttaagcccaggagttcaggaccagcctatgcgatgtggtgagaccctgtctttacaaaaaaaaaaaaaaaaaaaaaaaaaaaaaaaagaaaaaattagccaggcatggtggcgtgcatttatagtcccagctatttgggaggctgagacaggagggttgctcaagcctggaagatcgaagctgcagtgagccatggtcgcaccactgtactccagcctgggtgacagggcccaacaccctgtctccaaaaaaaaaaaaaaaaaaaaatccttacatgtctgcattttagc

SEQ ID NO: 81111 - DNA, 1063 bp, Homo sapiens
gaaacagtgaaggtgcagctctgtgcttccaaagagggccttcccgtgtttgtggtggctgaagaagactttcatttcgtccaggatgaagcgtatgatgcagctcaattcctagcaaccagtgctggaaatcagcaggctttgaactttacccgttttcttgaccagtcaggacccccatctggggatgtgaattcccttgataagaagttggtgctggcattcaggcacctgaagctgcccacggagtggaatgtattggggacagatcagagtttgcatggtgagaatttatatgatctacaaacacactttaagtttgtgatatttctactttttttttaatggggctacttttctatggtcatcatattcaggtcttccacagaggctgcgtaaatcttagaattactgtaggaaagtggcctcaatggcatctcttctaggttcttcaattgagctgttaagcatgttgttgcagcgaaatgaccctagggattacccaaggagagtggcacgtcaccttcctgtgggtctggatttcagatttgatctctcaagtgtagaaagtgacatgctcttcatgaggagagtagcagagttactttttggtgtttaatgatcaaagacatggttttcattattgtattctgaagttctctaaagatagcctggaagtgaaggagaggaaagattgggcagtgagtgggaggagcatgagaacagggtgtgctctgagaaaccacacacttccttaaccaggttagtgtcactcttactgactttatctgttggccctccctatgagagttcactgaagaaaggactttttgtttgttttttgtttttttttgagaacgggctttcactcttgtagtccaggctggagtgcagtggcatgatctcggctcactgcagcctccacctcctgggttcaggtgattctgctgcctcagcctcccaaatagctgggattacaggcatgtaccaccatgcctagcaaatttttttttttttttaattagagacagggtttcaccgtgttagtcaggctggtctcgaa

SEQ ID NO: 81112 - DNA, 1054 bp, Homo sapiens
gcctcccaggttcacaccattctcctgcctcagcctcttgagtagctgggactacaggtgcccgccaccacgccaggctaattttttgtattttttggtagagacggggtttcaccatgttagccaggatggtctcgatctcctgatctcatgatcctcccgcctcggcctcccaaagtgctgggttacaggcatgagccactgtgcctggcctgtgtttgtgtattttttcagctgtcatcactgctgaaaagaaaataacaacatattttaaaactgctagtggtttttttttccccttggcagaagattaatatttattgatcccaagactagtagtggtaggacttgagctccaaaaggttttgttgcctctgaaaccttgtttttgttacaaggttacaggtctcatttttccacaactgcattttctcacagtggcctgttctccttcctttcacatgcagctgagaattcctgcatcatgtgggactttaggttttttaagaggtagtccagaatagtacaaagaatggtgattttggaatcataggtatagattcaaagagtactgtaagctgggcttgctggggggattgatggggtaggagagtagtccttgattattgtactgatctcagaacttagaacattttacttagagaatctgaccatttataaaagatacaaccctctagcaggctcatcatgcttgaatgcctactaggcacatcaacttttttgcagatctgagggaaggtgtgtgacaggtgtgtccagcatataagtaaatagaaagcaggatgtgagacattttctgccttccttctctgtgggtagaggctaagcctacagagatctttccaattaagtatggttaaacaggataaccagccaacatggggtctatggaataacattacagcataaagaaaagggaaaagtatcataagtattcagatggaagattttctgagtatgctttctgtaagaaacaaaaaaatgtagatgatatttcccatttgccctttaaagagctcaataaaatcaggtt

SEQ ID NO: 81113 - DNA, 1688 bp, Homo sapiens
attctgtcactttcagagtgactcactttactaagagggagcctttatttcaagttaaataaacgttttcctttctgcagttattagtggattgtcttagagttagtcttccttattgtgccaggagatgcatttcttcctctcattaaacaaataaataaagctggcagtgccagaaatttgatttgcccttattgtgtaggaataaaaagacccatgtgtactgaacaagcagaacctgtttttagtgtttaactagccaactcctgtctgggtgttcttttaaaaagtaattataccatttatgatacacccatttaagtcccaacagctattccctcttggacctcatgttgtggggctgcatttgcttctgttattattatttgagtaaaagaacgtgtgtatgggtcgcctttatatgcctgcctgtgaaattggttgaacaaacactgtgtattaagtcagaatatagaaatgtcctgattctcttttgcaggactgtgttcgattgaagattttgcttcctatactttctatgcttttgtagctttgttttgcctttacttgagggctgattctacctggccacaataaagctgttcacactgtatgttgtagcttaactttacaatcttaggcacttggaggcagtggtgtttacataacttgtctttatgtttgtttgttttttgtttttatattttcctcacttacgttcattttctcccccatttacagatgctggcccgcgagagacattgatgcattttgctgtgcggctgggactgctgaggttgacgtggttcctgttgcagaagccaggtggccgcggagctctcagtatccacaaccaggaaggggcgacgcctgtgagcttggccttggagcgaggctatcacaagctgcaccagcttctaaccgagtaagtgctccttctgccttatttccctcctctcatccccagccccacccccgattcataggagtaccacccacttggcatctcattgtgtgtttgccgcaaattaaaacctcagctctgtatcttgccttctgctggaggtttgtaagcttgctcctgctaaccacttcattgtctgagagagaaacgtaagtcgtgttaaccattttctctctcgtctgcctgcctgccttcttcaattcttatctcttatattttactattttactcaaaagtcagaatgagccttgtctgtggaggtagcataacattaccaatgtatacagtttatcctggtttagtacaagaggaaacagatttcctatatcatatatttttttctggtatgtctttaagacttgaaagagttaattagaaaccagtacttccatattataattgcatacagaaaatattgtaaacaattaagttttggattgaatgtaatttctgtgaataaaatttgagagcagtggtttcttcatatgaacagcaataaaaagcaactgaattgtcctggaaatgtgcagtaggaaatcctgtctgtttttgggctcaattattatatgtcctgactctttaaagagttctctagaggaaggttgttagtcaaaacatttgaagagcgctcttttattcttgtataaataaagaaataaacacactagagcagccaaaagtttttattggaatgtttatataaagaagtttcaagaatagtttc

SEQ ID NO: 81114 - DNA, 1109 bp, Homo sapiens
ttccggctcactgcagcctccacctcccaggttcaagtgattctcctgccttagcctcccgagtatctgggattacaggtgcacgccaccacgcccggcttatttttgaatttttagtagagacggggtttcaccgtgtcggtcaggctggtctcgatttcgtgacctcgtgatccgcctgccttggcctcccaaagtgctgggattacagacgtgagccactgcacctggccatctctgttttataattgaggaaactgaggccagagaggtaaagtgacttgcccaaggtctcggttcacaaggttgcaaagtaacagaacctaaagtgcaccgatctgtccagattgaggggacacatgtgaatgttgaacacagacccagcctgacaagctctaggtactcagtcatgatttactgtagtgggcactattggcccctctcaaagggtttgtgcctgtaagctctcaagtccttcttacaagacacttgcgcttgaaacctaggtgtagggttaggtggtggagtgactactcaagaatacatatttcacaatggaaccaagtgctattgagcaagatgttctgccaacatagtaattttgcccttttagattcctcttcaggtacttgacaagtgggtcctcagtagcccatctggtgcaaaacaagtttggagactttgcttttgcatagtaaagcaaaagatgaaacaaatgtacagacataccttaaaaataataaccagagaggcaggatttgggataacttgacatctggccaaattcccattcatcagtctgtccatccctttgtatctgacttcctttgtcattgtgtgatctaggtctttgtgtcttggtaaagataaggttgtagaactgagtggaaactagagaatgggggaggagactaacatttattgaatattgaatacctgctttgtattatgcacagtactaccttggtgctttacttgcgttttcatttaaaacccctcagcaaacctcggggaggctaaagcagcttgtccaaggccgtatagttagtcgctcttttcacaacctgtctttaggttgtatttggatttattcatagaattttgtgagg

SEQ ID NO: 81115 - DNA, 1028 bp, Homo sapiens
gactcacaaagctctgtgaaatctgaacctggtgcaactcttgagacttcatttcataacatttttctcattcccatagctctgtctgcacagctacactggctgtaacctccctggccagctcattgccacctcaggatctttgtacttgctgtacacattgcctgatgttcttgttccctaactctgcatgctggctctttcataccactcaggtcagttgttaggtcacctcctcagaaagctcttcagaagaagccgccatttccagtcgaagacattttctaccataagcacctgttttattttccttaagtgaagatttggatttgcgttttagaatacatacagagtaaataaaaattctctacacaattttgctgtaaacgtcttctgggatttttgtgtatacacttccttttagagaatatgtgcatttgaagtggttttgttgtttaaggtgtgagtgttcagtcgaatacctcttagtgccattttaaaatgtgatctaaagaaacattttgcttttatcttttctttctgctcattaatccacataaattactacactaaattgatttagaataaacagattgcttggaattaattttaaaatttattttttagccctcatttcagcccttagctctgtgaagccttggttgatttgcctaaacgctatctatctgcagaaccttggccttgttacttggaagattaaataagatatttatgatgaaaatgctctgaaaaactgaatacagctttttacaatcgttttatatttattatgtactgtgatttgttcctgatatttcacatttgattcagggaaatcatttcaacaaattatagagcttcttttgttgtcgtttttgttaggtgtggttttttttgtgttttgttgtttgttttgagataaggtctcattctgttgcccaggttggagtgcagtggcccagtcatggctcactgtagcctcgacatcctacctcaacttccgcagtagctgagactacaggcacgca

SEQ ID NO: 81116 - DNA, 1032 bp, Homo sapiens
tcttttagattcgcttatcatgtgaccttagaagagctagaatagaagtgagttctgtccaacagaatttttgctcagaggtgtcagtgacatcttctcctacaggcagttttttaaaagtgtatttcatttcctcctagaaaacaaacctcaagcagatggacagtcttatgcccttaatgatgacagcacaggatccttccagtgccccagagacagatggccagtttcttccctgtgcaccggagcccacggaccctcagcgactttcttcttctgaagagactgagagcactcagtgctgcccagggagccctgttgcacagactgaaagtccctgtgatttgtcaagcatagttgaggaggagaatacagaccgttcctgtaggaagaaaaataaaggcgtggaaagaaaaggggaagaggtggagccagcacctattgtggactctggaactgtatctgatcaagacagctgccttcagagcttgcctgattgtggagtaaagggcacggaaggcctttcgtcctgtggaaacagaaatgaagaaactggaacaaaatcttctggaatgcccacagaccaggagtccctgagcagtggagatgctgtgcttcagagagacttggtcatggagccaggcacagcccagtattcctctggaggtgaactgggaggcatttcaacaacaaatgtcagtaccccagacactgcaggggaaatggaacatgggctcatgaacccagatgccactgtttggaagaatgtgcttcagggaggggaaagtacaaaggaaagatttgagaactctaatattggcacagctggagcctctgacgtgcacgtcacaagtaagcctgtggataaaatcagtgttccaaactgtgcccctgctgccagttccctggatggtaacaaacctgctgagtcttcacttgcatttagtaatgaagaaacctccactgaaaaaacagcagaaacggaaacttcacgaagtcgtgaggagagtgctgatgctccagtagatcaga

SEQ ID NO: 81117 - DNA, 1747 bp, Homo sapiens
gcttaatccttttctctagtaccatagaaaacagtgccaaaaagctgtgttttatctacaagcctgaaactcccttcctcccctatcatcctagtctgtattctgagcaaatttagagtcagagtggtttcatgaacagctgtaagtattgttctgagctgacttcccaacatccaaaatggtggtattaggtcattggtggttttttgtttgtttgtttttgttttttttgggctaggggtgttgttgacggggaactccttccttttcctgcttggggagtggacctctagttccattgcctgttgcttttgggcagcagtctgagaattcaagaccctgcacagtgcaggggataggatgcaggatttccgcccaagcccagtctgctgagctgctgtcacagggcagaccttgtgtctgctttatcttggtgaagcagctgcactgagcagattgctcacacagcagcctgttccatctgtgggtaaccatgttccgaggcagcaaagagaaaccgctattgctccgtggaaataaactatctgaataaaacttcttaacgggggttgaggctgaagctgaaacgggagtcggacacgatcttggctcctgaagtctttaaaggtcagtttgatgcacacttctataccaccacctgttaccagctgtagacagaagacctatctccatgcttgcccctaggcttttgtaggtaagaagcagcctgttttgtctttattgtttatttttgctgttcttttcaatttttgaaaatccctttacacatatgtattaagaatgtgggggagggttatggagagaaatgaatcaatggagcaaaagaagttgctttggaagaagcgcaatttaaatacagtggttattttccctggtaaagggcttttagccgtttataatctttttcctccccagttgagggatttaaggaatccgaggtagaatttttgatgactttagctttttagttttattaatgttttggattgttagtgatagatacttgctggctgttgtctcaggatttaaatgaggtctctaatttttaaaaaaagccacaacaacaagtctattttgggggccctggcaggttggcatttcagaagaatgggagtggctgtaagctgatgcctggtgatgttcttttcatttcggtgctgcgtccttggccacatgggccggaattatttctctttctggctcagtggtcagaatttgactcaagcaagtgtgaactctgtggggattgtgtctgtagtatcctatgagaaaaagtaaaaaccagggagaatttcagactttgatttttattagcacatatagtaaagatggtgagaaatgacggatgtttaggattttgaggttttgagaaggaagaaaaatgtatggactttcagcagtatatatgggcttgaggttggtaaattttgtgtaggtgagttacttgtcctgttaccaaaaggagtcatactcatggtctcaaactgcagaggaactctgtattgatggtctcagactacagagaaagtagccagtcatgaagaaattggtactttcttcagaaaatggccaggattgggaaaatccctggtcacattactttagagaaaaagcacctgagtgtgatctcagagccaaagggtattttctatcaagtttacattctactcatagatttaatcatactgttttgtgagtgagaagacataggtttaactgctgattt

SEQ ID NO: 81118 - DNA, 1046 bp, Homo sapiens
acaactttattatggacactgaaatttgaatttcatgtgatggtcatgtgtcgtgaaatattattgttttgaattatgtttccagccattaaaaaaatgtaaaatctcagccgggcacagcggctcatgcctgtaattctgccactttgggaggctgaggcaggcggatcacttgaggtcaggagttcgtgaccagcctggctaacatggggaaaccttgtctccactaaaaaaaaaaaaaaaaatacaagagttagccagaaattgcttgacccgggaggttgcagtgagccgagatcgcaccactgcactccagcctgggcgacagagtaacactctgtcttgaaaaaaaaaaaaaaaaagcctactcttaattttttttcatgggctgtaaaaaagagttaatatcccactggcaatagcatgtgagcccctgcctaataaatacttgtgcaccagtggaagaaaagaaaaaagaagcaagcagatttcttaaattgttttgtggtgaaacctctggtttttaaactacaggttgggagtgggatcaagttctgtctttcctgaatagctttttgacagcctctctagggctcagtttccttgtctctaatcattctctagctttaaccttctagagtctgttttcatgctgaaaagggttagagtctatgattatatttgagggaggagtggcatttgtgtaatatttaacctgatctttctgccacataccccgtctatgtgtgtgccttgggaataggccagtcattgcttcattgaatcattgaatcatcctctccaaatgtaaaatagaacaaattcctgtatcttatgctttgctaccggcttcaaaaccagtagtatggtaaatttatggcagttttctaataaatgtaaataatccatttaaattcttatggaagttttgtaacattctctaaacgtgtaatggtcagagcataagaacctctgtcgagtggcactaccaaggatttaaagaaaaaagctacagctgagttcttgttttctttagtcctttagtc

SEQ ID NO: 81119 - DNA, 1348 bp, Homo sapiens
gctccagagttcatgcttttaaccacgatgctagcttaatagagtcactaagctactcatttgtcccttcatttcctttgatgtttcctgtatgagacatctctgctagtatgtatttaagtaaaggagcattctccactctttaaacatatttttgtgataacccttccaaagcaaatgttcacagtgtaatctaaggtaaacagttacattgtactttcttaaaaatttccagaacattaaaatatgtgttctagttaagtaaaattctcaaaatacaagctccagataatagtctctgaatgaacagaagcaagtttattgctttgaatatgagtgaatgccaaaattaacctggcagtagtgttgacaaataggctttttcatgaagaacttctttcttttcccctttgctttgtttttttggacaattgataaaaagagcaagttgtacctctgcattttttggagcgcatgactgtacaatggtgtatatttgcctggagggatgagggaagtcttccatgggaagctgagtcattttttggcttgtctgactgtgtgactgtgctagagctattctttttttgaagagaaaaataagaagtcaagtaatttcctaaagtaatacatttttattttatgtgggattcatattttccttgggttgtggttattttgagcaggagtttttgtgtctggccaggagtattcttctaatacagaaactacttcagacaaaattattttctctccttgtttaataactaaatttggtcagccattggaagtcttagggttgtgattgtggtggtaaacgaagacattattagttattcatctcaccttggatgtatcataccatttttggcactctggagaaatttaagaaatggctgttgcctttaaggcaattattatttgcttagaatcagaccaacatgcagtagcaatgaacaacacagggcaggacaccatagagtcagcaaggcagagtctaagccccatagtggttcaaaggagagcgttttaaggagggttagagtaggcagagagagctgaattgggaaagtagaattaaaggatggactttgactaaggtggataggcgagagagggaattccagaaaccatgattgttctgagagccgggggccttgaagtaggaagaaccatattctgattgtggaaccttgatacacaattaggctttatcttgaagaacaatagaaaatgagattggttaagggtcatggagtagtctgaaatccagacaagggagattagactggatgaagctaaagacttttgtactgcctttctgaatgacagcctaagtcatatcact

SEQ ID NO: 81120 - DNA, 1005 bp, Homo sapiens
ttctcctttacccttttactgtcttgtaatcttcaaatctgtatgttagtgaatgctaggagggaacagtagacctgcttctcctggagccatagtacaaggaaagcctaattggagacgatcctttgcagccattgtaaagtattttcttctttcacctctcaaatattcatttgtcttatttgaagcagtctattatctaagcagacaggagttgctcaagtggaggctaaatgttttatctgtattctaatacattttaccaccaacatatgtgtaactctggatggatcactatatttaagtttagattaatgaaaattgttgactgtggtaaacttttccttccttcccatttcatgtgaagaacaaaggtagaaagtgtcattatgcaggaataatgttttctgcaagttttaagagaatgtctcaattcctttttctttctcctctgaaactaccgtatcccatgaactatatggcatgtgataacttcctagtctcagactggcagtatataatattagagcaagaaggatcttcagatatgacctagcgttgaatctctaatttttccattctggaaatcttggtccagagggtcaaactagtatctcccaagttgctcagtgagataatggcacacctaggaagacaaagaacccttgattttcacttagtaccttgtgttctctgcagagagtaaaattgatcattgatgagtcattaaccagtgtccattcacatgctgctactttatgttcactttggggtttcaggaaaaaatacatagtagcagaagatgagccctacccctatccccacacccccacaaaaatattcactggcctttggtgttctgtttgggtcttcagcatcccccactaggtggtgtcctaattcagaaactttgctgtgagactccagatgggcttctgccctaactggaactaaagcagccacagtgttgacccataagaatgcttaaacaatttggtaaggtgc

SEQ ID NO: 81121 - DNA, 1043 bp, Homo sapiens
cctagctaaggactactctggacaactcaaggaaaatgtcagcagctcctagaaagagaaatccttttttttttttaatccctttttcttttgtttcttcactcctttctgctttttgcttccctcagttcctcatccttttccctcccaaatcattcatgatccaagtaagagaatgtctcaggtgagagaatgcattctgaagtaagtctgtccctgagaatgttagatagagtggggggctagaagggtctggaatagtaagaaaacaggcaaatgaagtagcagacccacaattcaagacccagttagtgtgcatagaaacactgaagaagtcccagccaggcagctatacttagtcgcaacaaatattaacatacacagaactcctttgttccactccttttctttttcattttctttaaatcaactccatcatcccttctccctccccaaaaataaagcttaactcttgataatttttaaactttatcagacacatttatagccacgtctcgatcctagagacataactgcaatatttggctgacatttttctcgtgttaaatcattgctttgcatttggcagggaggtatagtgtatgctttgggtagtttcaattttctgtacctcacgacaagtccattgtacacgcttgtggtgtttagtataacaccccccttcctttattagcatactactctgacatcaaagaactgagctgcatcttgcaatgcctgacagagcctttttcataggggtgggaggaggaggaggaggaagaagaagcgggttggaaaaggaagccttgtttttctcttcgtctcggtagatgaatcatgttcccacaactgcaattgggttttcaaacctccaaggctgcgggtgcggagctgaaagggcaagcagtgacgttcttgagagagaaggaaaaagggaggaggaggctggctagggagggaaggagggagggagggagtacagcaggagtggtcttttatttttttcccttttactctgctgtccttagagattttcaact

SEQ ID NO: 81122 - DNA, 1052 bp, Homo sapiens
atgctgtgtcacagctgagaaatctaaacctgaagaaatctgaatttttatacagtggacagtaagcctgtgtgacctttgcccttgactgagacattatctttataatactggacagaaacaaacctgccctttgcttcggaaggaaacagtatttttatcttctaagggtgtttgatatacaaacagtcttgaaaagatagtctagaataaaaggaccatcagggcttttgctgataaaacctgcagaaatgcaagagggacatggagaattgttttccaacatgattatgttctcatcactgttattatgttctcatcactgttactcagaaattagcatatttacttaaagatatgtaactttaattttgttctagtagtatgtgtttattgtatataattttgtaaaatatgaaactcactttatgtaacacatgtacctaaaatgacaggaaaagtatagagagtcttagttgcttgcatattcaaggcaaataatgttcactttactcattggctgtggaatgacatgtggtattgagaaggtaatgaaaagtattctaagaaataaaatttttttttttttgaggcggaatcttgctctgtcgctaggctggagtgctgtggcgtgatcttggctcactgcaacctctgactccatggttcaagcgattctcctgtctcagcctcccaagtagctgggactacaggcatgtgccaccacgcccagataatttttgtattttttcagtagagacagggtttcactatgttggccaggatgatctcgaactcctaaccttgtgatccgcctgcctcggcctcccaaagtgctgggattacaggcatgtgccaccgcgcccggcagaaatagaattttaatagggttttctaaactgttggccccttgttgaaggtcaaggtaagagacagtaatatggtaattcgtagtagttcatttccacattctttacttatcactaaagaatcatctgagctcttttatttctgtaaactaaacttgttgctgtattcatgcagcctcttct

SEQ ID NO: 81123 - DNA, 1666 bp, Homo sapiens
ttggaattatctggctgaacaagctttaaaaatatactgatgcctgggtcctacctccagatattctgatttaattgggtggggtgtggcctagatatcaaaatctttataagctcctttgattaccctgctgtgtacccaaggttgagaaccattacactttggacacatggtcaggaattaagtctttccttaagtacctttgagttattcctaacaacacttgagggtacgatgctcttaagaccttgcttgttaatgacacagcacatagcttgtgattagttaggattcccaacttttaaaccaggtccagcctctaactctgtgtgatgtaaagtatgttccctaatgtctgtgtgctccgttgtctccctcccatctgtaaagtgttagtagcctgtctcattttgagggtgtagtacagatgacatgatgagtaatccctgtgcctgttctacgactgctaagtgaatactagtaatttgcattctgagtttttttagtctgttttacccagcaagcctctgtttgccttcccaatttttactgcccagctttaaaaattacctagtcttcatttgcaggtctttttagaaatagtttacatgtagataccctccagtagtattaaatttaaaaacaaatggttttgaatcctctaactccagagcagtttcctactgattgtcaactctctaactttactacaaaggaaatattgaaaacaaatatgagaagtgtttttctctatttttgtctcattttttgagagtagttaaggatattatgctatagttgtgttcagggtccaagttttacaagattggccctgttcacagatttagctgacacttcccccatgtagcctcctagaaccttctacttaaacgtgtaccacttactactgtgttttgggtccttaaactgtttggggctttttctaaaagtgtaattaaaaccacccaagagtgagactttctgccaagtaaaggttaaatgaggttggtcacagtttgaatattcataggaaggaaagatctccacacatcatagtttaatttctatatttagagaaataatttttgaacccctggatgttttccccaggacacaattttgaattctgtagacctactgtacaccctaaccccaagcataagcaatttagtctttttagagtaattattgtaaaatctcgatttaacagaattgcagatcagaattatgctactgagcttcagacctgagattttgattttaggcatagtgtttttgtgaatcccaggtactttgttttgcaggtttctgtattttactttatacacacttcctcaagagagcaatagcattagaccaaataagatattgtcttttggccgggcgaggtggctcacgcctgtaatcccaacacttggggaggccgaggcgggcagatcacgagatcaggagttcaagaccagcctggccagtatggtgaaactcccatctctactaaaaatacaaaaattagccgggtgtggtggcacgcctctgtagtcccagatactcgggagactgaggcagaagaatcacttgaacctgggaggcggaggttgcagtgagccaagatcatgccactgcactccagcctgggcgacggagcaagactccatctcaaataaat

SEQ ID NO: 81124 - DNA, 1147 bp, Homo sapiens
ggagcttgcagtgagccgagattgtgccactgcactccagcctgggcgacagagcgagactccatctcaaaaaaacaaaaaacaaaacaaaaaaaactccacatttagaagatctgcctttctctttacttaggaaaagagaaatcaatagttttatgttattttattttttttttaataatatcagaatttaggtaatttccactgcgactttcgaggttttaattgtaaggaattctgttccccgcaaggggaataccattctgaagatatgtgtcgctaaaaacatactgagataaacagattagatagtatctctaagttccagctttaaaatgggatcattgataatcattgaaactaggtcatggatatacagagatttgttaaacatttatatatgtttgaaaattttaacgtaaaaagttttttaaaaatggaagtgtctttgttaagaaatacttccttgcaacctcctaggtgcatgacagcttgtgcctggatgttaccatctctgcagactcagagttacttctggtcacttaattgaatggttttcttagctaaggagaattagaattttctatatttcgccgtcttattttcccagaaccatttacaaaattgctcatataaatggcctgtgctagatttggaagattttttttttcaagaatattagacatataatttttaaaagttgaaggaggccaggcgtggtggatcttagcattttgggaggctaaggcaggaggatcacttgagtcaaggagtttgagatcagcctgggccaatataatgggaccttgtctctacaaaaaataccaaaattagccagacatggtggtgcacacctgtggtcccagctattcaggaggctgaggtgggaagatcacttaagtgtaggaggttaacgctgcagtgagccgtgatggcaccactgcactccagcctgggcgacagagcaagaccctgtctcaaaaataaataaataaataacacctacattttatactagactgcttagggaaaaccagaaatggtagcttcactttcacctcctcatgcatgcttgagaatgtctgcatggcctgagaagagatggggaggatttttctcttagtgtttttgctgtaccaaagtagcc

SEQ ID NO: 81125 - DNA, 1138 bp, Homo sapiens
cataatttcaccactgcaccccagcctgggtgacagagtgagaccctgtctcaaattggaaaaaaaagaaaagaaagaaaaaatgatgtacttctagtgtagtacctctagtaagaggataaaaagaggatagacctaggccaggcgcagtggctcacgcctgtaatcccaccattttgggaggctgaggtgggtcgatcatttgaagttaggcgttacagaccagcctggccagcatggtgaaaccctgtctgtactaaaaatacaaaaattagccaggcgtagtggtgcatgcctgtaatcccagctacttgggaggccgaggcaggataatctcttgaatccaggaggcggaggttgtggtgagctaagatggagccactgtactccagcctgggcgacagagtgagactgtctcaaaaacaaacaaaaaaaagaggatagatctagactgtttctcttctagagtccaggggggatttgaatccaattgtgatcatcctattaaaaaaacaagtctctgaggccaattatgatcttacctgcctggaatccactgagaagccattggcttgatctagaataactgaggctatctgattggccctgctggcttcaaccatatgtgctttctctccattacagccagaggaagagcatttggcctgtgatatcaccggatccagttcatccaccgatgacacggcttcactggaccgacattcttctcatggcagtgatgtgtctctctcccagattttaaagccaaacaggtcaagagatcggcaaagccttgatggattctacagccatgggatgggagctgagggtcgagaaagtgagagtgagcctgctgacccaggcgacgtggaggaggaggagatggacagtatcactgaagtgcctgcaaactgctctgtcctaaggagctccatgcgctctctttctcccttccggaggcacagctgggggcctgggaaaaatgcagccagcgatgcagaaatgaaccaccggaggtgagatgggaggcggtttgtttagtgtctcagtgtctgcttgcttttgagaagcttctgatttgtattattgttggtaaaagaatttaggagaccccatagtatagaagaaagaatatagg

SEQ ID NO: 81126 - DNA, 1052 bp, Homo sapiens
aggaggctgaggcgggagaatcgcttgaacctgggaggcagaggttgcaatgagccgagatcatgccactgcactccagcctgggcgacacagtgagactctgtctcaaaaataaaaataggctgggtgcggtgactcacgcctgtaatcccaacactttgggaggccgaggcaggcggatcacaaggtcaggagttcgagacctgcctgaccaacatggtgataccccatctctactaaaaatacaaaatttagctgcgcgtggtggcgcgcacctgtaatcccagctactcaggagtctgaggcaggagaattgttggaacctggaggcagaggttgcagtaagtaaaccaagattatgcctctgcacatcagctgggtgacagagtgagactctgtctaaaaaaaaataataataaataaagtaaaatcagaatactattactgatattctactatatctgtatgaagaaatatttagattttcaaagaacaagtattgtatgtagtttgatatttccagtgaaattatttttaagtgattatgcatccagcagatatttattaagtacttactaagtttgaaacattgttagatgctatgagggatacagaaccactgtaaagaatggatactctaatgatccccattttacagatgagaaaactaagcctcagaaaagctaagtaacttctctgaaactgagcagctgttaagtagcaggagcagactttaacctaagtctgtctgaccacaaggcctgtgctctcacccgcttcttcactgccttattttactatgtgggtctaattataaggttttatgcttatctagaaatatgagagtatatgcttacaacgtgttcttcacttttttacttcacagatatgtcacagatctaagcagcagggatttaattactgtacatcagccatttcctctccattgacaaaatccatctcattaatgacaatcagccatcctggattggacagtgagtatactactttttaaaaaaattaaatatattaaatcttaaccactcttccta

SEQ ID NO: 81127 - DNA, 1027 bp, Homo sapiens
tttacctctaatttagtgtatatttcctaaaaacaaagatattgtcttatattaccatagtatatgggtaccatatactggccttctctggctactgagtgctagcattagtatataagagtaccttatactcttatatactgtggtagtactgtattacagtagtctaattatccaaatcaggaaattaatatcgataaaattgtgttatctagtatgtacaccttattcagatttcaaattttctcacttatttctgggtccaagattcaatctaagaatatacattgaattaagttgtcatatctctttagtccactttaatctaaaaagttcctcagttgatctctgtcttccataaacttgtcagtggagaaacctcgcacagtaactgacctgagcttttcaacaatgtcaagctcaagaaggacaaagcaagactgagacagagatttagttcagtgagggccagtaggattgcatctgaaaggggttagtggacctgtatgcggattcagatcaactggtgttggaagttatgtagagatgtcatggcatccataagcgcagggccttgtgatgctcaaaaacatacttggattggatcagtgttgtttgtcacaaaaaaggcaacttgttctttgagaagcctcattttttattttttaaatgttgatttttttatgagtagttgctgtgtgggatctggatataaagattaaattctcatcagagagggagtgagtgatacattatgttctttgctgaaagaccatgtgtctcggaggctgaagcaaaggaaataaacacactctcctggtgtttatggggtttcctcattgttccctgatataattcagtttaagagttggtgacagaagcagatgccctatattcatgggatgttccatctcacttcatgacttactggaatcctaatttttaaaattttcacagtggaattaagacataatggatgactctagccagacatgctgacacatgcctgtagtccagctgcttcaga

SEQ ID NO: 81128 - DNA, 1336 bp, Homo sapiens
ttcataataggtaggtacagggctttttctctcatttcatttaggacattgagattccagaaagtctgataaagggaagttcatttattaatgtgtctatccagtaaatatttgagtacctactcttttccgtacaccaggctagaccatggtaggaggggggtgaactcacaggtagggttcctttcctcaccacatttacagatgagagcaagtgaatctaatagaaaatggtaaatgcagcaacttaaacatctgatgttataggactgacagacctaaggggtcagaaggctgactaaggaaaagtaatattaaagtttggaccagaaggaaactgggaattagctgggtgaattagtatgtggaaagcaagactgaggaatttgggcctcttgcctgagggaattggaatcatttacattgattaagttggtcgaataatgattagaacacttcaggctgaccatagtgagaatgtattgggaggagagattggatcagtagaaggctttttttttttgagaaggagtctcactccatcgcccgggctggaatgtagtggcgctatctcggctcactgcaacctctgcctcccgggttcaagcacttctcctgcctcagcctcctgagtagctgggattacaggtgcccaccactatgcccagctaattttttgtatttttagtggagacggggtttcaccgtgttggccaggctagtctcaaactcctgacctcatgatttgcccacctcggcctcccaaagtgctgggattacaggcgtgagccaccacgcccagccagtagaaggcttttgcaggattcaagttacagtagtagacaatgtcctaaaccaaggcagagagcagtggcaataggggaggaatagaggttgagctggaagacaaagtgaagaagcctgagtgaagtgtgatataaggattcaggaatggtgcccaggtttccattttgattaatgagttagatgttggtaccactcactaaatgaaggaacacaggaggaggaacaggtctgcaggaaaagataagttcacttacctgcttttggagctttagctgcctgtggaacatccacccacaggtgagcagggagaggaatgagcctagatctaaacagagatccggcttccagattagaaagatgtgagtcaccagtgtgttgtatgcagatcgttgttaagaggtggagtgaattaggagatttggggtgagggagaagagagccagatataaaatcctgaggaacatcactactagatgtttttagtatacttttaaggaagagaaccccaggtatgaattgtgatcattct

SEQ ID NO: 81129 - DNA, 1052 bp, Homo sapiens
aagaatactgctttaccagtattctacgtatttacatattggcagccaggcttaaaatagagccttaccttttttacttaccactgccggcttggatactagttggtatcaacaaaagaaaatccccttggacagagcaatataaattagccaagtattattaaatgctttgtatagtcttagcattccactaggtgttaacaggcacctaagagaactaaagctcatagtcctgaccttgaaaaactttatgatctagtttggatgaattcaaaatgttttcattgttttttattttgctttaaaactactgaatcttgtcttcaaacaagcttttcgtggaagaccaataaataagtggagattccccctttctagccatctccccaatgtcatggagttttaggacagagcagtgaatgtaccactcatctcatggataaggtaaaacatacacatgataggaaaaaaaacaacgtaagatggaatttagaaactggaccctgacctttaaaaaagtctcagccctcagcctagcctccttattttacaaactgaggcacagagatgtatgcttcatgtcacacaacctcacacaacctcacacaacctcctgttatctgacttccaggaagtagtactcatcattttgtgtttaaacaaaatgttactatacagcgtaatttttttcttttaacttttttaatctgaaaggactggagtttgctaggaggagatgagcagaaaggacaggagaaaacatattttgtgttagaccgaaatctgtgatcactggtagaaacttttagtatcagttgacctcttgtctctgatcatctcctttgtcaaaatgacaacacttttttgcaattgagattggttcctctttcagacttggcttcaagatttgatctcttggggtcgtgctgtctttagcagtggaaactcaaaaaattacaaatttgtaaccctgaattgtagtccatttcccattaccaagtgtttagagtgccctagtggcaactgtaagtcaccttttatagtgaggtgtt

SEQ ID NO: 81130 - DNA, 1004 bp, Homo sapiens
agattcataggaccaaagcatggggaggtaagagcctgacttctttaaagcactaaattctagtaaacacagaaagagccagtggagttggttgttttgttttgtttccatcctgggaagaactaatttggattgttgcaaagggaagctatttcttatttattcaggtttgaagagcattgcaaggcttgagaggataagctggttgccataaaaagattttttaaacgattgaagtataatttaactttcctgagcaaaaaaatcagatgcttttccatttaacattttatgcatggaaaaacctttagcaaaatttagttaaaagaaagaaattatttgaaaaaacccaaatttagttgttgattattactaaagttttatgtactttagtgattaccaattttcactcagaacagcttcctgttttgtaaagtgaaggagtttttctcccttcctctctcattattttttatagttcaaaagtgtagtaatttggctcttagatgttcattatatgtatttgattaacaaaagacttcacatgaatcatagatctagcaattatttaccatttcattacagtggttgggttctgaacagaaagtcagaagacctgggttcccattttgactgtgctgatcatctgttgtgtgaccttttgcaagtcaaccaacctctccagtccctggcagcatagtgcagtgtatgagagctgagctttacagtcagccagatctgaatcttaatttcagcttgagcagttattggcgtgtggcctcaaatgcattattaaacatctctaagcttcaatctcttcagatgtaaaatggagataatacctagtattatcattgggttgttgtgagaaaatacatgtaaattgcttactacagtgcttagcacgtagtaactgttcagatttttagctgttatttattatctttatcctctacgttgtaaaatgggaagcataatgctcaccctgcccacttcagagttat

SEQ ID NO: 81131 - DNA, 1368 bp, Homo sapiens
tcctgagggaactcagagcagtaaagagcatgccccctcatttggggtcaagatatgcggcctcagggtatgtagtgggagctgggactgagacccctgtataagaaatgctgttttaagactaacatccatgatgaagggccttggaaaattctacccagtggccttcagaagcagaaaggaaccttacagtctccccaggtccctgagtgagaattgatgaatctggagtccaagtttacaccgtctgtatgtgctagaacttcaggctaagaaactttcacaagaggttacatgaaattccagtttaggaatgacagatccttgagggacccagcctgtagcagatgtagaactgctccattgggttaggttgacaaatcagtatacccaaggctacggcaggaggaataaaatcctatgaagccgagctcatgataaaagatacatagatgccacataaggaagtaaaccaccatgaggaagaattaggggatgtacaagcaagagatgttgaaaatcactaaaaggggccgggcgcagtggctcacgcctgtaatcccagcactttgggaggctgaggtgggtggatcacaaggtcaggagttcaagaccagcctgaccaacatggtgaaaccccgtctctactaaaaatacaaaaattagccaggcttggtggcgtgcgcctgtaatcccagctattcagtaggctgaggcaggagaatctcttgaacccgggaggcggaggttgcagtgagctgaggtcgcgccactgcactccagtctgggtgacatagcgagactccatctcaaaaaaagaaagaaaattactaaaaggatgaaacgaatagaatctataatggaagaaaaagacgtaacaactaatgggtagatttaaaaacaactgagtaaaatttaaagcatggaaatagtcattgaaaggtattcatggattttttcaaatatttcagcatattgtcctgatttataattgtttataaaggaataagatggcttctactctgttgtctgcattagtaaggggagagcttcagtctagaaagtcttaatgacttcacactggatttgttttttacatttaatcataaataattgtacccttaagtccttgatcttatatgaagtcaatcaacaaagttcatttgactgaattctgcaagctactgtgtttgatatgtgattcatacaaaagcagtttgtcaacaaatatttattgaatatcaatatgagtcaggcacccacagtggcttaaaaaaaggaattctaaaatgatccttcgtacttatttattgtgaacttgtttatattctggaaaaattgaaagcaatttaaatatccatccataaa

SEQ ID NO: 81132 - DNA, 2169 bp, Homo sapiens
gtctgtctaacttatcaaggtcagatatttaagattgtctcatgaaaaactcctagtgaatctcattgttttattactctgtttatgacaaatagaagttagaatacattttgcattttccgtgtgcacagtacataaagtttctttaattttttgttgtttttcaaatctgtataacagctttattgagatttaatccatatgccatatagtctacccatttaaagttgaacctcttgagtaactgccagactgctttccaaagctgctgcaccatttcattcttttgggagaatttatgaggaagcgctcttgacttttacaactagactggaaacattttacaaaatggtattatgagtttggcgccccatggcataacttctgttctcttttctctgcagttttcaggtgagaatgcagaacgtttaaagaagacatatggcaagttttgtgggcaacataaccagtctgtaaactacttcaaagacctttatgccaaggataagcgttttcaagcctttgtaaaggtattgataagaaacatgaaaatccccgttattgttgagagccatgtgtccctgtcggctttcactagagcctttttcatgtgattcctcacagtctgtttactcccttgcagaagaagatgagcagttcagttgttagaaggcttggaattccagagtgcatattgcttgtaactcagcggattaccaagtacccagttttattccaaagaatattgcagtgtaccaaaggtaagtctcctttctaactcggtcttgtatggtcatggactgtttcctctgtggccagtagtactggaagccccatggaagtgctatttcatgctttagtatgtctaaaagagaccttgtgttttatcttgaattttgttgaatgaaaatttggactgttatgttaccagacttaggatagatgatagcaagaaggaaagggaacacattgattccatccagagttcaatgacctgaacagtattctgttatcactaggctgggagataatttccactagttattcccagaagtgctagaattgctgctgtttttcacttaatcagtaattactggtttctctctcttggctaattctgttcctaggtagttattttaaagattacaaggcagtacattaaaaattaagtaaaacaaataaaaaaaaaaaaacttggttgctcttcctgctattactgtccctcctagaagtctttagttccttttatttcagagcacaacatatgattgcatattatttatatcattgaaaacttctgactttttttagaatcaaacttatgacagcaagaaggataggcacatgatctctgacgtgttggcttccctctgatagcatagtcacaaagggaaaagatgatatggagtgagaagtcaggattcccttgcttctgcccttgtccaaaaagagccataaaaaacagaattattctttccttccaagacaatgaagtggagcaggaagatctagcacagtccttgagcctggtgaaggatgtgattggagctgtagacagcaaagtggcaagttatgaaaagaaagtgcgtctcaatgagatttatacaaagacagatagcaagtcaatcatgaggatgaagagtggtcagatgtttgccaaggaagatttgaaacggaagaagcttgtacgtgatgggagtgtgtttctgaagaatgcagcaggaaggttgaaaggtaaggcttggctcttttgtcttaagtatgtgcccaggtaaaacaggcaaaaatccaagtgcttttgttggaaattcactaccagatttttttcccagagagcccatctctaaacactacccaggagcaacaagcatttagttcttcgtaatcttatatcaaaaatggtttgtgatggcctgcaaaatcatacaaaatagaggaagaagacaaagaaatgatgcagtcagggaaaatggaaaataaggttttaaaaaaacaaagcaaagcgtaagattggtgcacatatgcaagctgtcaaggaaggtgtattcccctataagagatggacagccaggttggaattgggatctgtggcaaaactcacaaggagggagacacagtcagcgagtttcacagaatctgtgagttcaaaacacatcacttgttcacaag

SEQ ID NO: 81133 - DNA, 1070 bp, Homo sapiens
ttggttttaatttttacatttctaatagtcagccgtatcaagttaaagaagctatgaggcttgttttttaatttatgtgtacatttgattttttttgtttgttttcatcaaacctatactccatgggcctatatgttacaccaatagccttgaattatacccaccccgtcgccctggcctcagtgagctgaggacattgaagcagggtaggccagtactgtcagcctcactggcatagaaagaaggtggaggaaatgggtgctgctttcatttctgaggtataagtgatgatgtagataactgctataggaaatgcccacgcatagaacaaatggtaaagaagttccaggcagtcagctggtttcaacaatgaataaagcaggacaccctgcttagaagttgaaatcaaaatgaagagccttggaaagagatacctgctctacagtgtggtgagtgctggaatggaggagaaagcaagaggaatagcaatagagtcaagtcttgaaggatgacggcacataaggagaaagtgttccccacactaaggaagagaaagtggaagcacagagttgaaagggtgtggcacatccagggaagagtggacacccgggactctcacgtgagagagcagagtgaatgacaggggagtgacgggaaaccagcccaaagaaacgggaggggccaggttgtaatgaggtgcattctccagactgaggagttaacagttgatactattgatgagggaagggggcaaagaatgggttcaaaaacgagaacggcaagcaggagagggatacatgaggtggtttttcagtatgacaactaggggcagtttagagtgcagctggagtgaagagagactggtgacagataagagactgtgcagtgctttggggaagagctcatctgggcctgcattgtagcagaaggcataaaaaagaagggcagaaaagattcagagaaagaaatctcctttcccaccaccagctggctgtgtatttcatggttctgtgataaacttaaactaaggctccttccctccagtcttaatattccatgatgttctgaga

SEQ ID NO: 81134 - DNA, 1058 bp, Homo sapiens
tgctaaaaatctggtgaccagatctgaatcctggagaactgtaaaactgttgctttggaggagtgtgatctcagatcatagtttgcccgtataggggtgtatgtgttgctgaaacacccttcaataaaaaaccttctgactgtgggtaactattaagtagtcatcgttttatcttcccttctcccatttccattttccagaggttcaagcagttcttctcactgacattttagttttccttcaagaaaaagaccagaagtacatctttgcatcattggtaagctgaattgttatttttgtaatagtattataagcagctagtttagttatggaatgtaagcactatgttattgctctcccccgccctcttaaaattaaatggctcaggacaaattcctctgagtaatttcccacatgccctcagaattttctggcatcccctcttcccaaaaaattattattctgtttcatcacagtcttcttttagtgtcttggacatctgactatttgatctatgaagaaacctggtcactggagcatttctcacatttgagcccataaatggtgctcatgtataatattgctgactggattctttggggaacctggaaagattcatcgtgtggaaaacatgactggaacctttagagccataaattactatttcccttttgaaatctttttttgttaaaatctgaatgaaataaggagatacttctctttatcctaaagtagcccttgtttttcaaactatgtgcttttttaacagcatctggtcttaccttagattgaagctgtccttcagagttagaatattgtatatgtatcttttatttgccctcttccctttttccaggaccagaagtcaacagtgatctctttaaagaagctgattgtgagagaagtggcacatgaggagaaaggtttattcctgatcagcatggggatgacagatccagagatggtagaagtccatgccagctccaaagaggaacgaaacagctggattcagatcattcaggacacaatcaacaccctgtaagttaaccaccaggccc

SEQ ID NO: 81135 - DNA, 1044 bp, Homo sapiens
tgctcttttctctttgccagtggcttatcgaatgtttcaaagtaaagactatgctttggatagaaataaggcttagagttaaataaatgtaagcacctaaggagtttggttaggccttaaagccatacagatgatagcattctgtctcactgagggggaaattaaaaatatggacagctttagaccagagccagagttatagcaaatttattggcccatgattaggatgacaaggataaaaatcttccttctttaaattttgtcaagtacctggctaggcatactgctaggtacaacagatgcaaagattccttaaaaagagcccttgcccttgagaagctcacaccctagcaggggagacatacatcaatgatgggccacacagtgatttattagaccacaggcacaattagcatgtgtgggatctgctcatcctgcctctagtaagtctcacagagaagctggtgcatgagctacatctgaaaaaaattatctcagcacacaagagtggttatgtgcaaaggtgaaaaaggacttgacatgtctgccaaggaatgacaggttcggtgtgtctggagggtcagggctaagggatgggatcttaagctggaaatgcaccaggtattaaaaggcaacaagggactcatgtaattaaaaaaaaaaatttttttttttaacatgttgaagatagttaggagagttgcttgagggaatgggaagccactggaagtacaaagaccatttggaagactgttaggataggttaagtgagaatgagctggagaaggaagagatgtaagaaataaggtcattaaaatctgatcagttggccaggctcggtggctcatgcctgtaatcccagcactttgggaggccacggcgggcggatcacaaggtcaggagttcgagaccagcctgaccaacatggtgaaaccccatctctactaaaaatacaaaaattagctgggcgtggtggcacgtgcctgtaatcccagctacttaggaggctgaggcaggagaatcgcttgaacccgggaggcagag

SEQ ID NO: 81136 - DNA, 1039 bp, Homo sapiens
accggaacaggcttctataatctctttgccttaaaataattatctgcatccctgtgtagagcaatcttaagcagctctccttgtttcttcagggaatgggaattcttttctaagtcgccccatcaaaggtactattggttttttacaacgccggcgtttgtgtatgtagtaaaagtattaacagcattaaaggcgatatttttaacatgtttatagatactacttgggggagggcagctaatgaaaccttcaagctctatgcagtccacagacgtgagctctgtagagttcgcagaggtgggtaagtacccagccagcacacccagttgaattcagccaggatttattgagttggcatcacggacgctgacagcctccaagtgaaaacccttctcttgaatatgtacaggtttcccatccacataccaagctgatgaggatcccatcgttcttccccagtcctgaggagcccccctcgccatctgcaccttccatagccaaatcagggtcattggactcagaactttcagtgtccccaaaaaggaacagcatctctcggacacacaaagataaggggccttttcacatactgagttcaaccagccagacaaacaaaggaccagaagggcagagccaggcccctgcgtccacctctgcctctacccgcctgtttgggttaacaaagccaaaggaaaagaaggagaaaaaaaagaagaacaaaaccagccgctctcagcccggtggtgagtcacgcacacctgctctccctgtggccatagtgtctgtgcattctgagagagggtagattttagtggcatggggcggggttgaaaaggggacagttcagatgctcaaaagccaaactgccatccttttcaccagctccgcttgctaagagcactcatgcagcgaacattaagaacccactctgtgtggcacgtgtgcagaagcagagagcatgggtttcattttcaaggcattatccgatcgaggaactggagctcacccctcaatgaagtaattcaagtcctccttgcct

SEQ ID NO: 81137 - DNA, 1040 bp, Homo sapiens
gaggttaaagaaaaagtacattttcctggcctcttcataaattctagtgattatttaaaagttaaagggagcattaggcagtgaaggatatcacttaagaaccttattaaccaaatttgttcagaaaccccggtgcgcagaagagttaattgcccataagccccagtcgcctgtttgcattacagaagactttgggatggggaggaagttcaatgaaaggagcagtttttctgaatttttttcattcttggttttcacatttccagatggtcccgcgtcagaagtatcagcagagggtgaagagatcttctgctgaccctcttcctctctgctgaggcagctgcctcctgatcctggccagcccacctctcctgctgtccccgcgtgcacaagtctcttacactggacgcccactgctcctcagcgtccagtcctcctgggcggccccaggtcctggacaataagcaacagatgatattgagtgtcgggtggggaaggaggcccagactctgcttcggccatgatttgtgactgcccaggactctcaggttgggctggccctactcaggattacactgaaagtaatggcctcgtaagtacaggtgatggttttggacacgtcaggaattcctaaaggctgaaagagtgtatccaagtaaggtctgaacctccgaatgccttttatttgggggaacacaaaaccaaacagcagatgttttggacttgatctgtgtacgtacatggggacctgtctgcatatacacacggggaatgccagaagaaggcccagtctgcaccaggcgtctggtcaacttagcacaagggcagtgcctggacggacccggagcccccgcatatcagcagttcacccagtactcctcagagactggtttccctctaaacccatcccgggcacataccacccgtgttttgcatgtatttctcatttcattttagggatgacaaacatttgtgaaaccagtgagagaaggcttgatgtgtataaaagacgtgatgtgcaccacctcgatctcggtgtt

SEQ ID NO: 81138 - DNA, 1024 bp, Homo sapiens
cttgacagtgctctagttgctggatctaatggcctgtcttggtttctatcacatgagaaggggttgtttttttggggtgactcggactgaattccccatactgtttccacgccgggacaccatgttctccatcaagctaaagaaatcacgtgcctgaaactgtgcttaagttttgggggaaagatggagttcctatccagagcccccagatttccagaatcgagtgagcttcctggaaggagactgcgtcttctctcaattccagtcatctcagtcgttgtcgttaggtgacatgtgcactttaaatgctctcatcggttggcttcattttcaagacaatcaaatgtattgactgtgttttcttcttagaaaatggagagggttaaaaacatgcaaactgccactttcaacctttgccagtattccctctacccccgtgagagctatctggggggaagaatccttaccaaggtttttttggaaaggtacgaatcttaacttttttccccttctgtgtctcagggtaatactattcagagtcgcccctttgctcattttctcccgtatttgttaccttcctgaggcctcagtattagtcgtgagcacaaagttttgagacctttggcgttgtttcttgatgtgggaggggaggtgttagtgcatgcaagggttgaactagatagaccctgccttagtagagggtgggactataaccttagaggccagaacttgatccagaagttgctgtccacagaagtgctttctatttcatcatttttgtttctagggctctttttctgtagccaggtcttcccaaggattttagtatttgcattggagttgaggtttactctaatgatggtggcccagctgtgcccagaggacagccaggcaggccctgggagggagtttagaaagacagtcctggtgaatgggcttcaagtggtcacaaagagggtggctgtgaggtgaccccagacactgcagaacgatgtgcaccctctgcgttttggatgtccttgga

SEQ ID NO: 81139 - DNA, 1079 bp, Homo sapiens
agattgataggccatgaattacttctccatctcactaagggttaaaggcgtgcaaccccccactggctgtgtcccctgccaccgaagtgagtgacctgccctacaaccaggtgggaccacctgtgctgcagtccggaggggcttctgcaggaagcactcaccccccacaccttccccggcctgagcttcccctacctttcgtcaccacctgagggcatgagcacaggccatggggcgtgcctggtgagtctgcctgtggttcaggcttagcctgtggtctcctgtgtgctgctgcccgcatgggatgcgcaggggaggcgtggggatccgcaggagggtggttgggatacaccggatacctctgctctcattgcttgtttgcaaatgctctatggacatttgtgtgctaaatcctattaaataaaaaagacgggttaaaacccagatgctgtatattcatttgtaattatgtataaagtgaagcagttttaaactgtaaagatttttttcagtgtgttttctcgaattttgccacaacatactggcttcgtattttatttatctttctttctagttaccagcttcagacccttgtaaagtctccctcagccctttcaaaaaataataaatttcctgtgaagttctggttggtgctgtgacttattcctattcctgattcctgtagaagggatactccccatccacccccatagctcttgaggagacgccttatgcaccgagcagctgctggggacgcatttcactctctcggagtgggacccaaacccagagagtgactgatcagccctaaagtcaaacaaacagtttatgccaagagccaaaacttcctatttccagataaatcaatacagtgaacaggaactttgctatagagcctgcgacttcccttaatgttagtttctctctcttcgctaacattctccaccccgtcccacccccaaactagagcaactgccagaaactaattcaagaagaaagatcctctctgcttgtagctcccggctgattcactgggtctgatcccggaatgtcggggctcccctggagacacacagggc

SEQ ID NO: 81140 - DNA, 1090 bp, Homo sapiens
gttggatggctcctcccacggggaagcagggctgagcaggccatgggagcgctgtgcctgctgccaccagctcaagggccacattcaccttaggtgtcactccccacccatctctgccaggaggagccttccaccatcagccgagtggtgaggagtaggatgcagggaaaggatggagacaaaaaagccttgcttacattttttgcctgttcccattgggcccccaaggagaggctgaccacagatccatctaggctgagcagaattaatttcctaattaagataaggagaagctgtgctcattcaaactccaggacaagctgccagccaggtttgctgttggccaggccaatttgtctgagaggagtgagggccaagagatggaggagctctttttctagaaaaccatggcgattccatccattgtccggagttcatgttctgcaccctagccagctgggcttgtgagaccttggcagcaagtcccttaacctgtgaacgcttttgttgttcacaggcttggaaatctgagggagaaaggtacccagctttgttcatgcaacaaacatttatttagttttctgaatggctcgccgtggactagaagctgaggaaagaaagtcaggttcaaagagctcctgcttgggagctcagcgtctgatgtgggaggcagacaggcgggtatggcacagcgctagggtctcaatagtgggcatgttgagaatctgcctcagtttcctcattgatgaggtgaggaagtggactgttggtttcctcatttcaaatgtgtccagggaatttttttcccccatctgttctctgccgggctctgggattcagtggagaacaaggcaaggtcctccccgaccctctcctgatcccacattcagctgagggaggcagacaacagactgacaaaaatatgcagctgcagaggaagtggacagggaggtgtgggaagatggtcaagtgaggatgccctccgaagaggggtcaaggaaggcctctctggggtggtgacatttgagccagccgtgggaggatcagagaaaggcctgccaggtgggtagcacagctcgtgcaaaggctg

SEQ ID NO: 81141 - DNA, 1068 bp, Homo sapiens
ccatatgacctaccaattccacttctaggtgcataatagagaattgaaaacgtgttcatgcaaaaacttgtacatgaatattcacagcaagattattcataatagctaaaaagcagaaacagtgtaaatgttcaccaacttaaaaatggactaagaatataatatatccatggaatattattgaaccataaaaaggaatagagtattggtacttgctacaacatggttaaagcttgcaaacagtatgtcaagtgaaagaagctagattcaaagtaactacatatttaatgattcaatttctatgatttgtccagaataagcaaatccataataccagcaagtagattagtggttgtttccaggggtcagaggcacacagggtgatgaataactgctaatggatatggtttattcatgtgtatgtgtgtatgtgtgtgtggtatagttttaaagggtgaattttatgttttgtgaattatatttccataaatgattctaagagaaaaaaaccctgcctggtatacactgccctattggaagagattcttgcacctgaccttgcatgagctccttgttcgattgtgagaattctcagaggagggggctggggccagcatgacagtgttgagggtctgagtactcaaggcaggggctatttactaactagtatggacatatgtcgacattttaacaaagagtgtgaatatacagctacctgtccactattagtccctacctgtgtctaaatcctcagacttccactcctggattaccccactgggggcaacagaaagtgtatatacacccctacacatttcttgaatatcaccatcatagcactaagaagtctgatacttgaatatcaccatcatagcattaagaagtctgataagtatcactatcatagcactaagaagtccaagccctgtactctcagatccctaagtctgtgggtcaggagctgattaaatcagcatttcaattaatattttggagtaggtccttatagaggatggtggaaatttgtctggttctatggaatcatattgcaatgtaatagaaatacct

SEQ ID NO: 81142 - DNA, 1043 bp, Homo sapiens
tgaggaggcttccatgaccttccagactcggtggctttaacaacagaaatctattctggagttcaagctcaaggtagtggtagggttggtttcttcgaatgcctctcttctgggctcttctcattgtatcttcacatggccttccctttgtgtctgtctagtcctaaactcctgttcttctaagaaggacaccagtgacattgggttagggcttgccctaatgacctcattttaacctagttatccccttaaagaccttttctccaaatccagttacattttgaggccctgggtgttataacattaacatataaattttagggggggtcacaatttagcttgtaacacctagtgtcctctttatcccccgaccatagctctgggtagaagcaggtctcactgcacacacgatgggtgttatggaaaatggtgcaaacttcccggcagcatgttccttgtcctgtgttgattgaggtgcctgggggtgcttgccagagagtttggagctgtgcacagagtggaatatgagtggagcatgtgcagagtgaagcatgcatggagaatatttatatgggcctggaataatgtgcattttgtttcaggtgtgtgcctataactaggggtttataggtgatagaggagcaacaatgaaatgaacatgtaggatgtgtgtactgcttaccaagtgaactcctggcttggggtacaaaatcattgtatgttctggactcttgtctcccagcagagccatcgctgatctatctgaattacagattagctggcaccgaagggactgcagaatccatttaaatggatagctctctaatttattaaagggcttatttatgctgttgatatcgggtgctcatcaaattcttggagtggcacaagcccctttcctgccctctgcttgccattgctgctggaagattttctcttttccaggagagctctaaatggctgtagccagagggctgtgtgtgtgtgtgtgtgtgtgtgtgtgtgtttgtgtgtgagtgaaataaaggggccatgcaccttct

SEQ ID NO: 81143 - DNA, 1183 bp, Homo sapiens
ccatgctccctaagactgaggttcctcatgcaccttccctctgtagcactttgcacagttattgacaggaacatttgattagtgctttgcctctccaagtagactgttgtgtttgctcactgcagtaccactcatgtcagcagaccacttaaggcatagggtgcataaatgtcctctgggccccttgggcattgcacccaaagggctggacctggagctcctcctctgaccacccctagttttgttactactgtggtgaagatataatctgggatctttccttttggtacctgtggattgcctgtaagatggaggcagggatattctgggggagaatgttctcctccatccaacagctcttgccttgcatttcttccttctgcctaccccacggtgcctgcagacaggaagacgctaggtctgacctgccttttcctaagatcccacctccatgtttacctgatcttctttcttccttattgtctctttctttacccaccactttgtgcagtatctggccaatgctatggcttcttttccatgccatgacactaagatttcttccccagtcatcctactggggctcattaaaatttagagctatacaggctgaggtcgaatctcagttctgctgcttgggagctgtgggacttcaggtgacttatggaccattctgggcctccacaccctcagctgacaaatgagagggataattcttatcatacagggttttatgagaattaaatgaaattgtgtatataaagcaattagcttagtccccagctgtgtagtaatcactcagttaatgtgttgaggggagaaatcatgatttttgctgcactcagaaaagctgtgagtaatctgcaggtcccattatggctgtggttcatacacttggttttatggtagaatcgcatggggatctttaaaaaatttcaacagctaggctactcccccagccagtgggtcagaatctcagtggatgggctcttggtgttggttgtttctatagctgctcaggtgattttcagtgggaagctaaggctgtcagcctgggctttcccaacgccccccgcccagccccccacctctttctgccagagcacatatcttggaactttaaaggaataggagggatgcgggctgaaaacatggcgggaaaagctctctttattgggctccc

SEQ ID NO: 81144 - DNA, 1321 bp, Homo sapiens
tgcccagtgtgtagaatggggtagcctttctggaaagtggcttgacaatatttattaaaaacctaaaatcacaaaagcccatgcctactgactccacttctgagaatttaacctaaggtaatactcacaaatggctatctgtatttgtggatatgggtatttatcccagtgtgacttacagagtaaacttgataaataaataattacttacagatctaacaataaatgactagttaaatattaatacattatggtccatatatatgataaatacaatgcagaccttaaaaatgacaacttttaaaagtaggtatttaatgtttctgaaaggatacatatgcaaatggtaagaaaacctaatagtataaaagataatggagtaaaaatgttagtttcagtcccttcctaatttcctgccactgggataaccattacttagaggttcttgcatatcctttcagagatagtcaaggcttatgcaaggatatgtttccctgttgcctttgcacaaatgcaagcttgtattcacattgttctgtgccacattatttctgctaacagcctgtctttgagatgagttagtatcagttcatagagatctactgcattctatttttatagttgcataccaagaatgatattttagcaatatgtattgacatgtgaacatgtttacaatatatttccaagtgagaaaagactccaagcagtttctctaatgccatttttttttgttgttgtaaaataaagagaaaatatttttatacacatacctaggaaaaatactaggatcatatggaattataagtcagaatgtaaacagtagttatctttgggtggtgggatttgggatttttttaatttcatcttttttgatgtcttctgaggtttctgtattgaaccttaaaaacaaagcaaagcagatgtgagacccatgaggacaggggagctgttcctccctcagtggatccagaggctgactcattcccccacccaggatccatctgcccctttgtggtgaaagccacggctctggtgtcacttaggattgctgactgcacagagcaggattcccataatgttgcctcatgccacatgcttgacagtcattgatggtggtgtgtgtgtgtggttgttgttggtggtggggggggtactgattaaagtgcagattcctgggtcacatctactgaatctcataccttgatagtaggccctgggaatttgcattcttaaaaaacaggctgggtggtcatactgccattaaagtttgagaaactattgtgtagatcaggaatttgccaactttttcataaaagag

SEQ ID NO: 81145 - DNA, 1027 bp, Homo sapiens
agtgttgggatctgtgggaaccaaactgtagatccacatggttttgctttgactgctgataaacattgcttagaagggcttatgcaatgaggataatttggaaaggaagttggatttcagggcaaatgaagacggactttggtttattttcattacgggtgagtaaagggactcctagtttgaggacacggttttcctcttgtttttgaagttgtgttgggaaggcgtcagcacagcaagatgtagggtagactccggcattgaaaagctgcccatgcaatgggatctcagcacgtagctctacacagagtcccagagtggatgccaagagcaacatgatttctaaatctgctggctggcttccatgacatacagtgctccactccactgtggcagggtggggtggtgggatatggctctttgccaaggctcgggtaaggggactggcatgaaaggggttaacatggtgaattagcatccacctgcctggtctcagagatggatgtgaccaaatggttcaagagaggctgggtaccagttccaaaacagaaacttgaatttcaagatatactcccagctggggtttccatgtttggcgatgttgggtgggggtgggtagggaggcatgatacgaggtttgataagttatcagtttgctgagccaggactcaggttggtgttatctggtgagactatgggatgtgtagagagatgaatttctatggattctctgcatgagcttgtgtctgtggttggggaccttggggcttagggactgaagaagagtacatgaatggcattcacagggacggtgatcctctgagttgtatgcaaatgttggagtgtttgcgcatggaaccgaactagtccatagctttcgctatattctcagaaacctctgtaactccttgaaaattcagaacactgatatatagggaaatacccagagaggattagaagggtagaaaaccctgtaaacccagctactcaggaggctgaggtgggaagattgattgagcacaggagg

SEQ ID NO: 81146 - DNA, 1015 bp, Homo sapiens
tcatgtgcctcaatagacccctattgatcatcttagttgttcttgcagagagaatatggaacctataaacctgctagtgtttctcacctgcttcaggagcctgagcacttggccaggactcgcctcatgagagcttgacttacaaggtttcctgataggctcatgtgtcctcagaaggaattattgaggctcagtttataagtgatttggggctagggctagacaatcctaaaagaatttggggttttgtttatggactgtagggaaacctgtgtttattcctttttcttttttttctccatgggaggtgggaataatagcagcaactgctgccatttttgcctcgtgtctggcttgagataataggtgctgtttagaaacaccctcggctttctggcactgatgtcaatatctgtgatttctttagttgtcttcagccttagaggacttgtaatcttgcagaatattccttcagagaattctgaattggggccatttcttgtcaaggaggtgattctagatggtggagtgaggggaaaattgatacttagcttcccatcctggccttgctgggtaaaggtggtgtttcccggtcagatggttctatttttttaacttaagctgcccttgtgttctgaaatcagtgttaggggaatggatagtgggctgattgatggatccccaggcctcctggatctcactgaggagtaaagaaggaaagagggagggcacaggaaaggcagggagaggaaaaggaatgcctgtggcaaggagtagcagaatgtcagcaacagctgccaccaccagtaacatttgcctaatccagaccctggccaggatcccaaaccatgtttctttttttctgttctatagctcatggcccaagttgcccaggttatgttattttctctggggttggggcagggaatgggactgaatgtcctttattcctatggagcctgtgcttgaactgtaacaccagccagatggtcagataggaacctggtctgtgggg

SEQ ID NO: 81147 - DNA, 1041 bp, Homo sapiens
aagctactgttgcgttaatcagtgtaattcttcctcatgccagaaaatgaattgacaaagttttggccaagttgtctgctgtacagtaggctggagattaggactcttgggccttacgtcatggtttatgagtgactgaccatctcctcttgactgctttagttttctctaccttttgtagattgcggaaaatgagatatggatgaatacatatcaagggaaacccttttttgagagatgggaatattttccacccttgtatcccttctctgatcctaagaattctggattaaggatttttaaggataaggatttctgagattgataattgcaatagctgtatgccaatctgaaaagtgggcataataatagtggctattctagggatgggatgtggtcaagattaaacgataagaggcacatacagctctcagcccagtgaccaggaaatagtgagcgttcagagagaacagttgctagtaatgatagtaattattgttattattcctggtggtgatgatagaatcaaagagaaggggttaggtgaccttgatgggtattctgaccacttctttgtcctgaaaaagctgaatttctgtctcacagtggagcccacctctctggtgactggaatactcatattctccagcgtctttcttcattgtacactgatgaataaattcggataagttctctattctcctcttttatccccttgctctagactgtatgtaggcctctctgtagatgctgtcagtttcagaaaggagttaaggaactgaaactgatgagctgacaactttctttatttccacctgagttgagatctcctccaccagcattattgaacttgggttgttctcagagtcctctgagcccagcttctgcagctggcccctctttccctttatggggtgtgttttctctggcatggctcacacagactggatcgccacagtctgggatccccatacatgaagaatgtagacgtctgtctgagctgcactcaaacaatggtacttcctttcacctgtagagctc

SEQ ID NO: 81148 - DNA, 1045 bp, Homo sapiens
tgaaggtagggtttcaaggcaggcctagaacccaggcatgctgggtgagtgtcctttccctacccttatgcttgactgatgagccccatggagtatgagatttcccagctacctccacccttggatgtcggtactagtgactgtggggacctggagtggggagagggacaaggaacaaagagggctgcagccctgccattactggaccagcagaagccctggtccttacctactggccaggatgggtggagggcagctgccagtatgacccctgacctcccagcctcacggggccctggggcgtgtgagcccaggtgcctccactgagcaaccccagcaggccacctgtgataactggcaatgaagaggtgtagataatccacagggcggctgcagggccagccttagcctcaccccctgccagcctcagcccagagcagatatccctctgccacttgagctctgctgatcctctttttctctctgtctaggaccatcaagaactcaggacttcggagcattcagcccagagcctttgccaagaacccccatttgcgttatatgtgagtagagctgggctgcagggattgggggcacatggcaggtactcttggggcagtgaaaccggagacctgaggtctagacctggctttttgcctccaggggctcttgggcaaggttttgaactttattgggcttccaattttgcctcttaaaaggattattttgggtttgatgatctctaagtttcctgtcagaaggaaaaatctaggaccaggggctgagagggagagtcagtctcctgacacccaagtgtgttcactttcatgatgaaacttgcaattttatgggaacgtaaatgatagggaattccactcatatgtaatgtgaatactatacttctgagaccataagtaggcccataagagtgtgtatgtgtgttaggactggcggggggcgggggggggttgcaagaagaaagaaagtatggctaatagccagtgttatgtctaaatagatctgggttcagtggggaaaagctcag

SEQ ID NO: 81149 - DNA, 1100 bp, Homo sapiens
agagaaatggtgtcagaatgacccaaagttaagttagatttttctgcagaacattaatgtttttaaatgatcagggacaagattgaatagcttaagaaaaaagctgaaaattttctagaagcaccttcctttattgcaagtaggggctggtttagtaacttctagaagcactgctagcctttccatgatgttcagctctcaggggaaactgtgagtggaatggaagaagctgtgaagacacctcacccaccttgttttaaaaaattgatgaagaaggccctgtcctggatcacagttttaattttgatggaatgcatctctgctaagattacatatcaaagaacctacatctcaggaagcagtataagccccaggatttaaggctgctggggactggtgtacaggtggtgggggtactgcattagcatcatcattaggcttcattctcttttgttattgctctggttacagaattccataggttttgagtggtctgccccaacccccttttctgttatttttggagtgtgatattgcagaatgcaagatttttagcattatagtataaataactatatttgctgagtgccagcttgaatcttctaccggctggcaaacatgaccaaaaaattgtttctagtgtatcctttgggggaagattgccagggaacaaaataagatgctatgttctcagtgtgggaggacagcgtaatgtgtgtggtgctgtggggattaggagttccagtttgaagtgtgtttgtacaacctaagaagagaaatgcctctgtgtgtgtgtgtgtgtgtgtgtgtgtgtgtgtgtgtgtaacatgtacaacagaccacccagttcactgaaaggatccttcagttgttaaggtttagccttcgcctcttggtcattgttttcccaaatgatttctggtctccttgttttcacctttgctggttctacagagaaaatactgccctgcttacaaacttgttttcctggtaacttattttcaagggttacttcctgctgggccatttctatgccttgtatgtgcttctacacttaacactttataggataattagttgttaatctggctcctatacag

SEQ ID NO: 81150 - DNA, 1663 bp, Homo sapiens
tggtatcaattttattgtgaggactgagtatggaatccagcttggtttttcccatctggctaatcagttcttcagatgccgtttagtaattagtccatcatttccccatcatttgaaatgctgaattggggttgttaacccttagttatagattacagatactgtctactcatctgtttttgtctttaacttggtttatgccttttttcactaggtaggagttaaaactggggtcctttttaatgctttccaggtgacacccattttaaaggtggatgaactttgttttacagaccaaatgtcctcgtccttcaccagcagatagcgactgggctgattcaccaacagttagcgactgggctgattcgccaacagatagcgactgggctgattcgccagcagatagcgactgggctgattcgccagcatagcgactgggctgattcgccagcagatagcgactgggctgaatgtaggaactaggtgctctgactcccaggtgtgattgtaactgtgttgctgactttcagtctaaaaacagtagcttggcacatgggagtgagcctggtgaatctggactccatgggccaggaggcatttggattgagaggggaggagcctcttttcaggaatggctctagtcctattcctagggattgattttacctcagggccagatcttgcagggaccccctataattttgggagccagagtaaacagatggctgtatccttaccttccaattgtgatttttctttcctccctcttcagaaaacaacatggaagccaagttcctaggaaatgcaccctgtgggcactacacattcaagttcccccaggcaatgcggacagagagtaacctcggagccaaggtgttcttcttcaaagcactgctattaactggagacttttcccaggctgggaataagggccatcatgtgtgggtcactaaggatgagctgggtgactatttgaaaccaaaatacctggcccaagttaggaggtttgtttcagacctctgatgggccgagctgcctgtggacggtgctcagacaagtctgggattagagcctcaaggacattgtgtgattgcctcacatttgcaggtaatatcaagcagcaaactaaattctgagaaataaacgagtctattactgtgttggtctcagctgatttgccctttgatggcccagtgaagagagccatctcttagggtgtctttccatttttttcccaaggtgatcactgagtactggattatattacagtgcgtcactgagttactgggcccaggaagaaaggacagaaggaaatgaattgacttcccgaaagccttgaattctgtgaaagcttctctaggcccttgggaaaaaactagttctatatagtttcttagccatttccagtttgtttttccttccctctgcacttgatatgaaggtgttttaatctagcctgggaaataatccttccttctttcccccccttcctaaaagcattttattttaaaaagaattgagttatgtcttaaccttttttgaaacagtcatgtgaaatgtgcagttagtttatctccattctacagatggaggaatcacggccaggttgtgacttagcccagagtcatactgcatgtgcctgttggtgctagaggagaatgct

SEQ ID NO: 81151 - DNA, 1083 bp, Homo sapiens
atgactctgggctaagtcacaacctggccgtgattcctccatctgtagaatggagataaactaactgcacatttcacatgactgtttcaaaaaaggttaagacataactcaattctttttaaaataaaatgcttttaggaagggggggaaagaaggaaggattatttcccaggctagattaaaacaccttcatatcaagtgcagagggaaggaaaaacaaactggaaatggctaagaaactatatagaactagttttttcccaagggcctagagaagctttcacagaattcaaggctttcgggaagtcaattcatttccttctgtcctttcttcctgggcccagtaactcagtgacgcactgtaatataatccagtactcagtgatcaccttgggaaaaaaatggaaagacaccctaagagatggctctcttcactgggccatcaaagggcaaatcagctgagaccaacacagtaatagactcgtttatttctcagaatttagtttgctgcttgatattacctgcaaatgtgaggcaatcacacaatgtccttgaggctctaatcccagacttgtctgagcaccgtccacaggcagctcggcccatcagaggtctgaaacaaacctcctaacttgggccaggtattttggtttcaaatagtcacccagctcatccttagtgacccacacatgatggcccttattcccagcctgggaaaagtctccagttaatagcagtgctttgaagaagaacaccttggctccgaggttactctctgtccgcattgcctgggggaacttgaatgtgtagtgcccacagggtgcatttcctaggaacttggcttccatgttgttttctgaagagggaggaaagaaaaatcacaattggaaggtaaggatacagccatctgtttactctggctcccaaaattatagggggtccctgcaagatctggccctgaggtaaaatcaatccctaggaataggactagagccattcctgaaaagaggctcctcccctctcaatccaaatgcctcctggcccatggagtccagattcaccaggctcactcccatgtgccaa

SEQ ID NO: 81152 - DNA, 1059 bp, Homo sapiens
gctgggcgtggtggtgcgcgcctgtagtcccaggtactcgggaggctgaggcaggagaatcacttgaacccaggaggtggaggttgcagtgactcgagatcacaccactgcactccagcctggtgacagagcgagactccatctcaagaaaaaaaataaaaataaagaccagtggtttggggttgggagagatatgatagtctatttggagaggacatagtatcgtggggactcatgcaatagcaataccagttccagtgtgaactgtcgtagaccttttttagaagcaaattggcaaggtgctgctattggtatagttattgagcatctacatgtgccagacactttacattcattatcttgaatcttcagagaccctcagtattatccacattttcataagccaattgagattcagagtgtgtgacttgcccagagccatgcaccgattcagttcactgatcggaacccagattggtctgggaccaaagcctgcacaatttctactatagtacaggccttacaaatgttcagactctgccaaaccagatgtatttcctgaaggaaaaccttgaccttcaaacaagggaaggcaccccaaaatattgattgcatgtactatcatcagaaatcaaaatgctgtaaatgcccaaccatggacagatcatatactatgaaaagaagtatgtcactgttcacagtggcttctgcatggtgagtcatgaatgatttctgtatattttcccatttttataatgaactgcctttattatcaagaaagtaaattttaactctaactgcttagagattttaaatgataatacttttaaagtgggtatttaggttcagccttgaagcctagggtggcgcctcatggtctgaaattctgcatttgcccccctgagaaaaacctgagcaatatttagaaatttccattaggtggcggtgctgtcctaggctaaacagatcacagtcacgtgaattctgcaacctgccaaattctgtggtctctgctggcgcctgtcctccactatagccatctgccctttgcctccctgt

SEQ ID NO: 81153 - DNA, 1059 bp, Homo sapiens
ccttgaggcaggaacgtctggaagcggagaggctataattaaggctgtaaaactgagtcatctcaggaaagagaaatgaccagtgactcagtgcaacatagtaaaatttataatcactcttcactaaatgagctggtcattccagggtgattttatacttctgataacctggggctgatataagaggcgatttcattaataaggtaaaataatgagttgccacattcccctgctgtctagatttcagttcgatggtgaatatcaatcctgtcccctctttctctgtctctgtccttgttctttttaggttctatgcccgggactcgggcctgctcaagtttgagatccaggcggggttattgggccgccccatcaaccacacagtgcgacgccttgttgccttcacctttcacccttttgagcctttcgctatttctgtgcagaggactaatgctgagtatgttgtcaacttccatatgcgacactgctgcacgtaggtgcctcaccagagccagattatctggtcttccaagactttgccactcacttatctcagtggactccaaagcaaaagctcccgactactagctctgttagttccagcctgctatacctcagatgggagagagccagagagaggagtgagggtggctcaacctaatggaatttttaaattgtatacaatactgctactgattgttataatatcctcttgcgttttccctgtgggaatgcccagcattaattaagtccatttcatttttgctttactttgcatttgattgctgtgaagatgaaagcattagacttttatccccttcatgtcacttcttcggcattatggtttgcatctgaaagcagttaaatcttgtttactgatgagaatgacatacatcctttccatttagctcataagcacggctatctttttaagagaaaaataaagccatggtattttcatacttaaatatatgtggttggatgactgctttatgttcctatcatactcaatgctttcaagtacttgggttccaggaaggactgtgaaagagatgagag

SEQ ID NO: 81154 - DNA, 1018 bp, Homo sapiens
agactattccctccatatcattgaccttcacaccggccgcttatgtgatacacgcacgttcaagtgtgacaaggtggtcttgtcacacaaccaagggctgtacttgtacaaaaacatcctggccatcttgtctgtgcaacaacagaccatccatgtcttccaggtgactcctgaaggcactttcattgatgtgcggaccattggccgcttttgctatgaggatgacctgctcactgtgtcagctgttttccctgaggtacagcgggacagtcagacaggcatggccaatccctttagggatcctttcatcaattccctcaaacaccggttgctggtatatttgtggcgccgggcagaacaggatggtagtgcaatggccaagaggcgcttcttccagtattttgaccaactgcggcagctgcgaatgtggaaaatgcagcttctggatgaaaaccacctgtttatcaagtacactagtgaggatgtagtaacactgcgagtcacagatccatcacaggtatgaggtacactcctgccttttacttgtctaatctccttggcaaaatgggaaggtttctctgtttgtttatagcccacccctcagaaatagacatttcacgtagtctgaattgatatcctagggcccaaacttaaaatcagctccatttttctctggtcatatgtatttatctggacaaatggaagctaaagttcaagtcattgacaggaagatagtcacctctgattactaccctaactcttctgcagagtattttcagtactcatgagatggaagcccaaatgctacaaggtcaaggtttggactacttatggataacctcccttgattttgtaagactgtattattggtctggctgttttagttctggcaatgagaatgagtacaccataccaaaaagaaaattctctaagtaaccccactttcatccttaaatggttaatgtcaatttacttctctgtaaagtactataaagtcctatttataaggtaactaata

SEQ ID NO: 81155 - DNA, 1242 bp, Homo sapiens
gggcatccccaccgtggtgcactgcagggagggagggagggtgggtgggctgcctggcacactctcacccagcccctctgcctgtgtgttctctcttcaggctgctgccccattggaagattactccccaggcttcccttgccccaagcagtgagctgactggaatggtaccccgggaggcccctgagtctgctcagtgcctgtgcccttccctcaccatcccaaatgccaaggatgtgcttcggaagaggcacaagagaaggagccgacagcaccagcggttcatggcccggaaggccttgctgcaggagcaggggctgctgagcatgcctccagaaccagggtcctccccactgcccacccctttcggggcagcgacagcaactgaagctgccagcagtgggaagcagtgtctgagggctggatctggcagtgccccatgcagcagaaggcctgctcccgggaaagcctcagggcccttgcccagcaagtgtgtggctatcgactgtgagatggtgggcacgggaccccgagggcgggtaagcgagctggcccgctgttccattgtgagctaccatggcaatgtcctctatgacaagtacatcaggcctgagatgcccatcgctgactaccgtacccgctggagtggcatcactcggcagcacatgcgcaaggctgtccccttccaggtggcccagaaagaggtaagggcagggatggggacttgtttgggaggtgtggtgggctggaaagagccaccctgggtttgaatcaccactttgcttcactgggggcaagaaaccttgggaaagtcacctaactgctccaaacagtaggttccttctccatagaacaggggaaataaaaataaaatcctgaccttgcctccagataaggattgctggcctgttgcacaggacaatgtagaaaggctacaccaactgtaaggtgataaatagcttacattttagagtttgctttctgttataaaagttgtacgcattgatataaaatttgtaaagcccacagtggcatcacgttcaggtatggatgttttggcatatttccttatgttagtttcttagtgcttagaaaaaattaattagtggttgggaccacactgatgcaccaggaattcccaaacatgcttgaccttagaaacacctaagtcctttttaacaatctaggatccttgtccccagttccctccatagagttcctgatccattaggcttggggagg

SEQ ID NO: 81156 - DNA, 1004 bp, Homo sapiens
acaggcttctcgtggggagttggctccttaacatttcttggcaacagaaagccccaggcacagctcagggaggagggaaggcaggtaagctttggacgagaactggcatatttattttgacccaaatcagggatttccccagtccacccagtactgggctcttaagcaaaagtctgagaaacaagacagtggtttgaattctggggcctttgtgtaggattgtgcctgacctttatttatttattaacagcagggccactcgtctagggcagtggagtctgcgtgtctcctggggctggggcagggcattggcagttacgcagtggccctgaacctggtctggtgcccccgaacctggtctgatgccccctcagctctttgacaatcactgtggctgttgggttttctcctatttctaaaaatgttctcttctttcctaagtgacagttttgaagtattggataaccaagagctcaggtcacacagaccttggagccccatctttgcttgcagcttagctttgagatactaagcaagcgagggacttcactcttgaggctgttttttcctcatctgtaaagtggggatagtggtacggcctacctcatagggttgtaatgagcactaaatgtgaagtgcttggcacagtgcctggcacatggtgagccacagctactgtgagtttctgtttatcccccttttttttttttaagcccattgtttattctttgagaatttgttgtaacttcttcaggataacacctgagtccacaggctgagcagctgtggcccagacagaactgctccggcttggctgttccagcaggtggggcgctggcctcggtgagggcacagcagcaaggttcacggatatccgtgtgtcttgtctgtggccaccaggcacaggtttggcttccggtcagtgtcccgacactgtgcgggaggtgacaacagagcaaagcagcgcaggggtcagggaggtacagacactgctgaaatcacac

SEQ ID NO: 81157 - DNA, 1022 bp, Homo sapiens
tacttttcaaaccacagatcttcatgacactgggaggcagtcagattggagggatcagtgtggattctgcacagatctggggtaggaggcaagcgtgggtaacgctcagcttattgttggatctcaccacagtgaaagacaagcacttccctcattgaaagttgattttctttttgccccagttgtaactcatttgacattcactaaataccaagccctccctatctggcaggcactgttctaagagctcaaagtcctagcctgggagagtgtggacccaaggaagtgtggccgggctggtggggcctccccgaaggcctgcttctccttcaccctcacagagtcagccccactggaggcagagctcattgaggcatctggaacccacggaggcctgtaagggctccctcgctgctccttgccttccctgggttggaagtgggggctagccactcccaccacaagtttctcctgcccattccaataaaagcctgtatgtcccaagagccagcttccctaccccataagagaccactgagtatcagactggtagcaggctccagaagttagttgtgggacattccctgagctccagtcctggggatgtttattctctgggcggagggtgagaaaggaaacaaagatgttgcaatccactccacgaacgtcaaatgcgtcatctgaggagggggagggccggggcaaaggaggggcaccctgacatggagcctgccagctccgtcagccctgactcggcccggagctgagctccccacctgccggtagcccaggagatggagcagcccagcccacgtgcccggccttccgcccctgacttcacttgataacaaactagaaactgaaacagggtcgggatgccgatgccggcttggagttagagatgagtcaccgctgagagcagctgcagtagctgagcagtggcagcagagaggcagacgtgagctgagggcgcagaggcaggcaggtgagagcgggagctggagcagcagctggggaggcag

SEQ ID NO: 81158 - DNA, 1046 bp, Homo sapiens
cactgtctggacggtgatgtcctcctcaccccccactccaaagaagttttctgggatgtccacaaagtcttcacctaggggaggggcaaagacaagctttagcctctcagcctgggaccggcttgagggggatgaggagtgggctggagatgagcatggctccccctccttccctgctggggcaggagggcaccactgtgtgccaggcaccttgccaagcccatttcaggggtactcagctatcggcattcattgtaggagtccccacagtttcaagattgcaagagtgcaagagctatcagagggcaagatattgaccaatgagctgacggctcataaagatcagttcccaccccaacagcccttcctgctcaacacagctgctgcttcactcgtctcatgagcaccttaccaaccatctgatgctgtaactatccaacaggaccaggtaagtcagttataaggagaaatcagaaaatcttgcagaaagtgcagtttgtgaagttgatgaaggtggctttggagaactgcctgtctcatagtcatggaaaaatgagggtaccatgagagtgatactacttccaaaagagtggttagaataccaaaaggttaagagaggcttcgagggggaaatcccagctattaaccctcttcctgtaagatcaggttgtggaaatgaaacgtgtaatgagttgtcattgtgttatcaccacttagtacataaaagttttgcaactcctcattcatgtgaggcattgttttttcctccaagaattagcatgtaattataattataacccaaaatgtgttaaatgtaagataaaaacttatttgaacattttggtctaatttttcaaaataaagtccccatcaaactttcccctactcttttcaataacattttgtggccgggcgtggtggctcacgcatgcaagcccagcactttgggaggctgaggtgggtggatcacctgaggtcaggagttcaagaccagcctggtcaacatggtgaaacccatctctactaaaaatacaaaattagctggg

SEQ ID NO: 81159 - DNA, 1096 bp, Homo sapiens
gaagacttggtggggtcagcttctggagacttggacttgggcaaactgccttctggaactctaggaagtgggcaagctccagaaacaagtggtcttccctctggatttagtggtgagtattctggggtggaccttggaagtggcccaccctctggcctgcctgactttagtggacttccatctggattcccaactgtttccctagtggattctacattggtggaagtggtcacagcctccactgcaagtgaactggaagggaggggaaccattggcatcagtggtgcaggagaaatatctggactgccctccagtgagctggacattagtgggagagctagtggactcccttcaggaactgaactcagtggccaagcatctgggtctcctgatgtcagtggggaaatacctggactctttggtgtcagtggacagccatcagggtttcctgacactagtggggaaacatctggagtgactgagcttagcgggctgtcctctggacaaccaggtattagtggagaagcatctggagttctttatggcactagtcaaccctttggcataactgatctgagtggagaaacatctggggtccctgatctcagtgggcagccttcagggttaccagggttcagtggggcaacatcaggagtccctgacctggtttctggtaccacgagtggcagcggtgaatcttctgggattacatttgtggacaccagtttggttgaagtggcccctactacatttaaagaagaagaaggcttagggtctgtggaactcagtggcctcccttccggagaggcagatctgtcaggcaaatctgggatggtggatgtcagtggacagttttctggaacagtcgattccagtgggtttacatcccagactccggaattcagtggcctaccaagtggcatagctgaggtcagtggagaatcctccagagctgagattgggagcagcctgccctcgggagcatattatggcagtggaactccatctagtttccccactgtctctcttgtagacagaactttggtggaatctgtaacccaggctccaacagcccaagaggcaggagaagggcctt

SEQ ID NO: 81160 - DNA, 1089 bp, Homo sapiens
tgagctcagatcttgccacggcactccagcttggacaacagagtgagattctatctttaaaaaaaaacaaaacaggatatgcttctgggcctgacacccaaggcatccagacgctggccctggtgacccccttacctcctctcccccatgcagccagggtcttggcaggaagcagaattcagcccagatgattccaataaagagactttaatggaggaatgacttctagagagtagggtgaggggacccaacaaggaagtgggggacgcagaggccagcagcagcagcagacactctatggcagaggcactggggtggcaagggagctgggaagcaatgccccgtcttcctcctcttccctctctgccatcttctctgagtgcctcccattggctcaatcccactggaagccagaaggcctggggaactgggacaacagggaccaatacgtgtcagagaaggacagacgatggacctggtgggtgtgtggggcaaatggaggacctcctgtatacccccagcacccccaggcttgggactcttgctggcatctgcacctttgtagtggcagtgccctactggataaacctgtcagtccttctccacctggcaaactcctgcatcttcagtctcatttggacattcccgtttctgtacctccatcgtggtactcaacacacagcaatcaagactgcctgcccacgactctgccccctccctggaccaagctccttcaaggagtgaccccatcttttaattgttgagagcacgcagtaaatggcaggtgagcagggctagggtgacatgagtgaggcagtagcccttggtgtgagatttaagcgggggaggaagggagtttgctagaaatcttagtaatcaagacaaaatatttgaatacaatatttaaaaaaaaatcaaatcatcaaactacagcccatgggttggctacctcttttgagcgcccacccaaactggaatagctcccaagacctctagcatggtgttcaaaaattatttttgagttgggcgcagtggcttatgcctgtaatctcagcactttgggaggccgaggcgggctgatcactaggt

SEQ ID NO: 81161 - DNA, 2056 bp, Homo sapiens
tttttttttttttttttctgagacagagccttgctctgtcacccaggctggagtgcagtggcgccatctcggctcaccgcaacctccgcctcccaggttcaagcggttcttctgactcagcctccctagtagctgggattacaggcagccaccatcatgcccagctaattttttgtatttttagtagagacggggtttcaccatgttggtcaggctggtctcgaactcctgacctcaggtgatccacctgcctcaagtctctcccaaagtgttgggattataggcatgagacaccatgtccggccttatgcccattttatagccaaagaaactgaggctcacccaagtagtttttttcaaaactagaattcatgcctcagtgtgtctgcctcttttcaccttactggagatggtccaagcagagaaaatgtggttggtttcttctgtaggtggacctgggctcctcgaaggaggtgacaggcatcatcacccagggggcccgtaactttggctctgtccagtttgtggcatcctacaaggttgcctacagtaatgacagtgcgaactggactgagtaccaggaccccaggactggcagcagtaaggtgggtgtctgtccagctgcccaccctttgccattccttcattacttccctgggagtctggcctggggctctgaggggaggggggctggctcggggtcctcctgacacccgctctgcctctagatcttccctggcaactgggacaaccactcccacaagaagaacttgtttgagacgcccatcctggctcgctatgtgcgcatcctgcctgtagcctggcacaaccgcatcgccctgcgcctggagctgctgggctgttagtggccacctgccacccccaggtcttcctgctttccatgggcccgctgcctcttggcttctcagcccctttaaatcaccatagggctggggactggggaaggggagggtgttcagaggcagcaccaccacacagtcacccctccctccctctttcccaccctccacctctcacgggccctgccccagcccctaagccccgtcccctaacccccagtcctcactgtcctgttttcttaggcactgagggatctgagtaggtctgggatggacaggaaagggcaaagtagggcgtgtggtttccctgcccctgtccggaccgccgatcccaggtgcgtgtgtctctgtctctcctagcccctctctcacacatcacattcccatggtggcctcaagaaaggcccggaagcgccaggctggagataacagcctcttgcccgtcggccctgcgtcggccctggggtaccatgtggccacaactgctgtggccccctgtccccaagacacttccccttgtctccctggttgcctctcttgccccttgtcctgaagcccagcgacacagaagggggtggggcgggtctatggggagaaagggagcgaggtcagaggagggcatgggttggcagggtgggcgtttggggccctctatgctggcttttcaccccagaggacacaggcagcttccaaaatatatttatcttcttcacgggaactcttggtgtggttcgttattgtttcatgggaatgggatttaaattgcgctggtttccccatcccccacctgtggtcctccctgagccccagcttgcttgcttgcttttttttttttttttttgagatggagtcttgctctgtcgccaggctggagtgcagtggtgtgatctcggctcattgcaatctctgcctcctgggttcaagcatttctcctacctcagcctcccaagtagctgggactataggtgcacaccaccatgcccagctaagttttatatttttagtagagacagggtttcaccgtgttggccaggattgtctcaatctcttgaccttgtgatccacctgcctcggcctcccaaagtgctgggattacaggcgtgagccaccgtgcccagccccatctttctttatgtcacctgcctgactacacatagcttcatagcaggaggctggagactttggtccagggcggc

SEQ ID NO: 81162 - DNA, 1065 bp, Homo sapiens
ggcgatgggggcagtgctgtgagtccagaagaggaagaaatcctgcccaagtgaagtagtcagggcagacttcttggaggaggtgtctccaaagtcaggcattgaaggagggcaggaggtggtggagcaggggccttccctggtgcagaggagaagggtggtgagtgggaggtcttgggtgatctgtgaggagctgagcccggctggttgaggtgaggaggtggtggggtcggcagtgagaaggtcgcacagttggccctgcaaggcggatggagctgctttctgttgcccaagagcatgacaggggctggtcaggatccacagagttctttctgcttcatcgccttgtgctcctgcccctgggagctgtggatcccagatccagatgacagcccaccttgctggcaggatgcgccaatcccctgggcctgaagaataacagcatccctgacaagcagatcacggcctccagcagctacaagacctggggcttgcatctcttcagctggaacccctcctatgcacggctggacaagcagggcaacttcaacgcctgggttgcggggagctacggtaacgatcagtggctgcaggtgggtcagccttcttgggatatggggctggggttgggtgggatgaggtgggactgccagatctttgacctctctccagcccaggcttctcttctgctccccaaaagagttctggaaaagccttgtttttcttcggcttttctttcttcttcccacctgtactcccttctcttgatcctgcttccaccaaggtggagaaagggtgtgtgtgtgtatgtgtgtgtgtgtgtgaatgtgtgtgtgtgagtgtgtgaatgtgtgtgaatgtgagtgtgtgtgaatgcgtgcgtgtgaatgcgtgcgtgtgaatgtgtgtgtgaatgtgtatgtgtgaatgtgtgtgtgtgaatgtgtgaatgtgtgtgtgaatgtgtgagaatgtgtgtgaatgtgtgtgtgagaatgtgtgtgtgaatgtgtgtgtgtgaatgtgtatgtgtgaatgtgtatttgtgaatgtgtgtgaatgtgt

SEQ ID NO: 81163 - DNA, 1805 bp, Homo sapiens
cgatgaatgtttctgcatttgggggttaccccaggagggttcatcactggggttcaggtggcaaggtaacaggttcccatggatgaagtatctgtaagtggatggcatccctggaggaacctggtatggggtcaaggtgaggggggaggaggccccaggctgtggaggagctgttggtgctggatgaggcctctggaggcctgggcagaagaagaaagccctttgtgcgggcagtgtgctcagctacccctcctctgttttgcttgagttgttcccccacccagtgggggagtgaagggatgggtctgcttggatcttgagtggaaagaacccaggagataagggtgccatctcccctgccctgtgtccaggtgaacctgctgcggaggatgtgggtaacaggtgtggtgacgcagggtgccagccgcttggccagtcatgagtacctgaaggccttcaaggtggcctacagccttaatggacacgaattcgatttcatccatgatgttaataaaaaacacaaggtaggtcttgttggggcccgaaagaagggctgtggtccataccccctaaggttctagcattgactgaggacccccagcgagtccagagaaccctaggtgattggctatgatgtgggtcttcgggtgcatcttggcttctagaaattgggaaacccagactgtgtccatgttctgtggtttataagcaatagtcccactttagagatgagactagtgagattcaaaatggcacagtgacctgttgagggtgatagtggtggtggagctgggtttcattctgagccttcatgggtacatgtacagttgtgtaggttgtacactgctcaaggatgtcattgctaagcaggcaccattcacagtacaggcattgtacatttgtggaactctgtcagaaaattgtcataataaactatttgagaaaggagtgccttttcctaatttgcaaagaggtaccctgtaggttacaggtggccctgtgtcagctataggggtttatgcccaggctccatgatgattaaggaaagtgagaggagaatctttgtggagggccgtggggtggccaaaggagaggctgctgtgtgagcctctgctggctcttccaagtcctcttcaccctcccagccccacctctgcctcccaggtctgaagaggaagatgaggtaaccccagggagggggactgctcagatggacccccttctccagtcttgtcccttccctgctaggagtttgtgggtaactggaacaaaaacgcggtgcatgtcaacctgtttgagacccctgtggaggctcagtacgtgagattgtaccccacgagctgccacacggcctgcactctgcgctttgagctactgggctgtgagctgaacggtgagtgctgggggtgcgggtaggggggcactgttggccaatcctaggaggtggccctccctgctgcctcttttctcagccaaactgagctaggtagggcagcaacaaggcacggggaccaggcttcactcgggcaacgcactctagggggtcacctggccatagcagccccacccaggtgtttgctgtctgccaacccatgacccagggcattctgattgatagagaaaaagacatcagttttcaaagtattttcccttcttctggttggctcctctcctgtagcttctagaacatgtagcgttaggtgtgtttggcagatgtcagctttacgagggcagagaatctgtctgttttgtttgcttcggtattcccagggcctagaatggtgtctggtttataggtactcaat

SEQ ID NO: 81164 - DNA, 1568 bp, Homo sapiens
ttattttttctcccccctggtggacaatggtgaggagggtgaaggaaggttaaaagccactgctctacgggatgaaaaactaaacttgtcattcttcagatccctcccagtctggccccagcctacccttccagctgcatctaactgtgctccaacataccacaccctctgtgcatctgcttttcttggaacattctttactcattgcccagtctggcaccccccttactttgtcttctagacccagctcaaatattccctcctctggggaacttctaattccccagcagaaatcatgcctccagtgacggtccatgcaggcttctggagcgttgggcaatcttcctcatctgtggacttgctggcctctttccccttggcttcttgaggcctgcgctgcatctgatttctctgtctcgggggcctagcatggtcattggccctcccagtgtttcctggatgatcatcgtgctgttcctgagtcagggctgccattggaggtgacatctgtgactgcaacctgtgcctgaattggtgggcggaacctgctcaatgggccagaacaatgcttccttccactgcccctgcctgaaagtcctcatgggcctcctttgcaatcaaactgctgccaagagacctgccctggaccttgcctgcctctccagaccccagctgccagctcttccaccagtgggcagtggtccccagcaccactgccattgtcagccagcacttttctggacactcccaggccacttggaaagctgggcgcttcccttatgtgggccgattcgcctacacatggacttccttggctctaggcggactcaggctccatccagcacacgggggaagagggagaggaagagataatgggcgagtttgagtggagggtccttttgggctggacccatctgctacttctcacctgtgtccccagctccttcctgatcatctgctcatcttacctgtctctgtccccagatatctgttccaaaaacccctgccacaacggtggtttatgcgaggagatttcccaagaagtgcgaggagatgtcttcccctcgtacacctgcacgtgccttaagggctacgcgggcaaccactgtgagacgagtgagtatgtgggggtgcttgttgcctgtttctagcagtagaccctgagccacagccctggtggcataggccatatgctggccttattctctgcctgtgatccccaccccagtggaggtgtcaaggcctcctctggggagactcagagagagagacagagcctcagttagaccgaggggggaaaagggtcctgttgtttcttccttctttctgcctggccctctttcctgagactgccggccaggcctgatgctgatgcagaggagtgaggggttgtggtcaccctggaggtcacgggagtgctgtttcttgagtcaccatgagccagacacacagcattagggttaagttgcaaggatttttctacctaagaggggaaaacaaacacattcttggtcttttgaggcccaggaactcagtaaatcagccttggtttcagagtctgacagttc

SEQ ID NO: 81165 - DNA, 1019 bp, Homo sapiens
cttgttaacatcttgatacttgccgatccgagaagggaaacacgatgctcattgtagttttaatttgcatctatctgattatgaataaagagttagcatcttttcaagtctaaaaatcttaaaaacaaaactcctgaacttttcccgcccaacagactcaagactcgtgacccggccgttggcacgacgcgggacgccggtgtggcagtggcggaagaggcagatatcgcggaccacccccgcgccccccaattcctttcaaccaattccctcccagccgcggagccccgcccccagtccgcctctggccagcttgggcggagcgcacggccagtgggaggtgctgagccgcctgatttattccggtcccagaggagaaggcgccagaaccccgcggggtctgagcagcccagcgtgcccattccagcgcccgcgtccccgcagcatgccgcgcccccgcctgctggccgcgctgtgcggcgcgctgctctgcgcccccagcctcctcgtcgccctgggtgagtggatcgcgccgccctctgcccctcgcccctcctccccgcgccgctcggaagtttgcccggcgcccgccctccacctccactgttgacaaacttagacaaagccccggggaccgggctgggcagaggggcggcttcttccgctgcgccctggcgggacagggggatgcggccctgctgtctctgcgctggggcttttgggctgggactcgggacatcgggtgacagccctgccgcccccagggatgcggcttacagataatgacaaaggaatccgctgtgtcgggcctctcttttccctggtgaaaaatgaggccagggaactgcgtttgactttcgaaccccttccacctgggagattctaggactctagtatggataagtcttgtctggataactttgtcctggccatctccctgccaactccagttggctggacagttcattggatttttgcgctcccaattgtccgtgcctggtcacataagggaagggccg

SEQ ID NO: 81166 - DNA, 1037 bp, Homo sapiens
agctaccagccgacctcattcctctgagcccagtcgacagctgaccttacccagccctctaaagcagtttgcggtcacaattacccgtctcttcaccccgcccccatcgacatcaaacacgacccaccttctagccctcctcccctttccccgcccactccgggctggccttatccagtagcgtctgggtccctggactaaagccgtcaaatgtaaccaattgctgaggagctctcccctaagaatcccgcctccactctgaggaacagcttcgctgatcaatggatcccctcctagacgcaatgagcgcgcggggcaagtggagaagcggctgaactgcccaatgaacaagcggtttccgtggttaggggcgtggcagaagcggtcgtcaggggcgtggcggcagttacttgggcggggccggtagcggcgggagctgcactggccaggggttccggctgtatatccatgagcgccgctggcagccggggagctgcaggaaccagactgggggcgagctgagcacctgtagtcaatcacacgcaggtaaagccacggccgagcgagctccgcggagcggggatcgcaccccggacccgtcgaaccgaatctccgagccccgaggtccccggcgtagctcggcccatcacgccgcagcctgaggggatcctggggggcctgtcatctggcgccgtgggggtcccaggggctggcttgcccagtggtggggacagcccagatcgcggcgggggatacgccttcctgaggccctttgtccccttctgcccgaggaaccgaggttggggacaaccccgaccgcggcctttcccccattggtgctcactcctgggtcttcaggggcctggggaggggtctgccggttcaggctcggcgaagaaggtccgggatccgcacctggaaggagagggccgaggggcctgattacagcccgagatacccgagaggcctctgtgtttcggggctccaggggctcacgcaggaccagtgggtttaagttctagaaaggcagcttttga

SEQ ID NO: 81167 - DNA, 1073 bp, Homo sapiens
gactgcatgacccatctgtaagggccttctctacccacaaatgcactctaagtggcctttgatgcctagcttgagaagagtacttctgggggtccattaggttccaagtggctgttgaattcacccataatgaattttgaggtttcagctctcaagagtgggtgttagcaaagagactggattatacaaaaagatagaggtttatttagccactgtgaaactccttgtatttgaactaccatggaccgctctcttaatcttcccaatctctcttttttggttgctggacctccagtttgtcagtttcacctgcattccagtaaccaaatccaaaggcatgttccaagaacaggctccacagagggacctggagagactgcaggtttggcagagtcaacaagatctgtgcccagagcttttcgaaggccgtttccttacagccacattaagcagagtccaaaagagaaatccttcactaccctctgtcatttgccggaatagagagaacataataatctaaaggtcaggaggcagagaaagaatcttaacacaccttgctgtgtgttttaggatgaattaatctttgaacatctagtcagaaagcagtccatatacagctggtagtcagcacggactgtgacattttagagctgaaggcaccttagatagagctcatctctatctaagtctaattaggtggactctcattcagtctcctcaatgcacaggtgaggaaactgaggcctggggtggtcacagggctggttggtcatcacaggcccatgactaagggttgatctcttgactgtatttagatctagccagtgcatgacttatttcactccaagcttagtttgcccattctcagtgttttaagttctaggggagtccagagaggttaggaggacagattttggtgcctgagtgcctggatttgaatcccagccctgcctcttactggctgtacaaccttgggcaagctacttaacttctctgtgcctctgtttcctcacctctaaaacagaaataataatgatacttatgttagaagattgttttgagaagtgcatgga

SEQ ID NO: 81168 - DNA, 1703 bp, Homo sapiens
ctcaaattcctgagctcaagtgatccacccacctcagcctcccaaagtgctgggattacagatgtgcgccatggcacccaggcaaattttagcaaatttctacatatattgtttggcatcctattactttttctcatgtattcaattatgtcattactatttcctaaaaattgagggacatacaatattcctaggattatgtgattgtgctagagtcctcacagctgggaaatgttcttttttctcattcagagaatgagaaaaattcagagttcagcaggcatttattgagctctttccctgctggacgctgtgccagacactctgtcctgaggagtttccctggggcctgaacaccctgtgccccactatgggccatagaggaggctttccacagtgctaactgagcttccaaccccttccagctccttgtgtggcctgaactgtattcacactgtagacattagcttctcaggttccaaatatcctggctgcagttccctcctctattctgatcatgtaaataaagtgcttgctcattcttgtcaatgatgttgacaaatgtacccttctaaatagtgggatgatggaaaatgccgagtagattatagccaaggatatttttcccaatttagaaaacatagttcctttccctccatctatcattaatatcacccatcagtctatttattgactctacatataaattctggatgttgcactgacatcgcaagagaaatcagcactttgccacaaaagagcttataagaggaatgcagatttctttaagtctcttatggatgagcagagaggcctcatggagcttctgtaaagctgaattatcaaggctgaagtgatcagaatccatccagctctgcaaacagcttataagatggatgggtgccttgcttctctgtattcctagagcctcaccagggcctggcacagggagggtccctggtcctcagtttccttgcctgcattaatagtaactcacagcggttgtgagcaccaaatgaggtaatgtcggaggatgcactttgtcagtaagttaggcattcagtcttcactgtcaacacaaatgcattctgtgacatgtttgaggagtaaatgaggtaatgtattaaaatcacgaacactttataaacgatagagctacacaaataggacattttcttatcatccagctttgttccttcatttaaagttatcatgatttggccaggctcagtggctcatacctgtataattccagcacagtgggaggctaaggtgggaggatcacttgaggccagtagttggagaccagcctggaaaacatagtgagactccatctctgcaacaacaacaacaacaagaaattttaattagccaagtgtggtggcacatacctgcagtcccagctactcgggaagctgaggcaggaagatcacttgagcccaggagttcagagttgcagtgagctatgattgcaccactgcactccagcctgggtaacagagcaagaccttgtctctataaattaaaataaataaataaaaggcggggtgcagtagctcatacctgtaatcccagcactttgggaggccgaggtaagtggatcacttgaggccaggagttcaagaccatcctggccaacatggtgaaaaatataaaactaagctgggcatggtagtgcacacctgtggtcccagctactcggg

SEQ ID NO: 81169 - DNA, 1082 bp, Homo sapiens
aacaaaaatcaaagtgctacccctagtcctgcagccacctcttcgactgatcttatttttccccctccgataaaggacactattcttagcatttttcaattttctgatttgctcatcttagaaatgcttgtgaaattataaaaagaaaacacagtacccagtttatccatgctcagactgtttgtgatttggattatggccagttgattagtagctgtaagatgctggtggtgtctgcctgtcaggagcctgcggaaacatctgaattgtgacacaccgtcactggcagtatctcttagcccaccatgcgtctgtagggtggtgggcaccacccgtcctcactgtgcttgtaaacttagacctgtgcctctgctccccagatcaagatgaatgccatgctggagactcccgaactcccagccgtgtttgatggagtgaagctggctgcagtggctgctgtgctgtacgtgatcgtccggtgtttgaacctgaagagccccacagccccacctgacctctacttccaggactcggggctctcacgctttctgctcaagtcctgtcctcttctgaccaaagagtgagtagacctcatgccctctgtatgctcagctgctgatgtatttggctttgtgtgatgttcaaagaagaaacttctctcatcgtgtccttaaggcatcaatgggatatgacgtcactggtgttaaaatagccacagtctgattgcagtctagtgtttgaatcctggagggtaggagagaatcagatctctgttgcctgaaacattccttcctctacagtgtgatgtcattatccatgacagggactttgcagaaaatagtagtcatttttaggcagatatggaaaagttggacaatattctagtcctttaacgaatgctttgttgccagttctaggatggagaaactatcctcacccaaaataattaataagcaaaaaagcacagatccattagttgagtactctccatctgccttgttgaaaaatgtaccaagcattagctaagagaatgcacttaaagagagtgctttgtatgagtgaaccaggtttccctatagaag

SEQ ID NO: 81170 - DNA, 1086 bp, Homo sapiens
tcgatttcagaatccaccttggttcaccattcatccttaacttttagcttacacctcatttgctttacaggacttacatggaatcagatctacttttatactccttctcaatgtgtggttgactgaaaattgctccactatccgggagcaggaaatggaccttgttttctagaaagtctcgaatttctaaggatagccaacttttatcagcctctcatgttttactgaccctgtgaattcagaggttgccaattttgatctccactgttctttttctctgcctgcttctcagcatgccctccttcactatgatagtacactttgtactacaaaatagtatatactttatggtaaaataaaattaagacagtaaactgacttggaaaatatattctggagggtaagtaagaatttttcctaaactctcagtgccagtgtcatgcagtgatgtggagagtgaagagctgacggctgtttacgcttttctttgtctgaagcaacagtgagtgaagtgactggctttagaagcccagtcttcttcagcagcatcaagaatacttccctgcaaatggagtctgtttgggatcctgagctttagggtcagaatttattagatggtgtaatgtttacttaaggaaagcattttcctgagtttataaggaaatctacccctccatgaaattctagaaagctataactaatacagaaggctgtagtccttgaagacttgattttatgcatgattggatgagatgccattgctgtttgctaccccatgactgtcagtagtcagactgagaagtgccctctaccaagtaccaagggccgggtactcctcagaggccctccatctgcctgaggtagctgcctgcagtgtagtatcacggtgagccatggaaatgagtcagccattgtggcagcttgtgaaccaccctaactctacctgctgtcagtttctaatcatagagtgagggctctgggtcagcgtgggtgcatggcatcaaaccagatggcttaacttctgaggtagccattataagagtctgtaatccaaaacatttgggaaccctgcctggagatcagtgg

SEQ ID NO: 81171 - DNA, 1084 bp, Homo sapiens
agaaacagcaggttatatgtttttctacccttccactgagtactaatgccattgccatgaccaacctgactttcctgtgatatgtagcaccaaatcctcctgctggcaagaccctgaactggtgttttcagccagatcacaaaagcttgaacagtaatttcttactgatgtaaagtgagaaactccataaatgctttttaaaatgttgacacctgccaagccacagcagtatggacttttccttccttgggatttgaataaaggaagattcttctcagtgaatatatatatatacatatatatatatacacatatatatatatatatatgtatattttaaaaattagtcaattagtaatatttagtaacctgctcttccagtctgttcaccgtctgtacaccatactcagccccttctatatcacacacaatactttttctcacatttccaccttctctgtctgtcagaatcctcaggccttctcaaatcgtagctcttctagtagctcctgacttttacctgtctctgtctcattggctcttacctaaggacagggatggaaacaataactttccacatatgtatctctcgtcacacctcaagtgtattctgagaggcttaaggacagagactgtcttaaaaattctctgtcttccctgtggttgctgcttcttgtagagtcagtacacactaacttcagtagagtcttttggtaggaacatgtgattgacagagtgagtaattcaggtaagtgataaaggaatttagagaaagaggggatattcctgtggtggcttgactgatgaggtcttccataatcctgaaagattagttggctttggatagatgggacaataggagagaaggcacagatgttggtgtgagcatgaaccagtaaaatcaattatttaaacaagcactcatggcagaaaactggctttgctgcccaggccaacacttttcacccatccacctttgtccttttgtcctgtgggccttccaaccagtcagcaggataagaaggtggtagaggccttgctgccattgacacatatccacgttgtcaatgctttgccgtcacca

SEQ ID NO: 81172 - DNA, 1036 bp, Homo sapiens
actaatatttttaaaggatgactaatagactcataggagtctctagaatgaaagcatctgtctgtccttatcatgtttgttttatcatccaaataagccctggacgcagtggccaaggccccagttgaagtctcaaccctgctcttgactagcagtgtgaatgtggccaagccatgaactccctagcctcaggatccctgtggtaaagtggggttaacagtatctgcccatttcacaaaattgtcattgaaggcaaatgagatcattttaaaaaggactttgaaaaactatgaagtgctgtatagataaataaaatagcagttttatttattatgccgtgttcaaagaaaaaaggtaaataaattcttgatgctagaaccactgagattagtacctcaaacatccttgacttcctttgttaaagagcttggggggacatccttaatgtttctgaagttgcaaagggagaggccccaggtttcactccgggtgacataatttctttgctgtagtaagattccagtggcatttgccttagcatgtatctcgttcttgcagctaaattagagcacggtaactatttcctctcattcctttttaatctgtgaaatcatgagccttactcttgccttgttaaggaggagaagccagactactcagaggacccccacggagctcctcagcaagtggcctgcccagccttcccctccacagcccctgagccatcaccacatttgggatcttcttctccacccagttccttacttttcagctcatatcgtcacatttattggtctcaagtctcttgtcttgggttgggctgggaaggaggaacatgcaggaacggaataccagtcggattctagcctcctgcgttcccattgaatgcaggaggggttgaacccagtgacattttgaatataaatattttcatcagagttaggctaacattaaagaatttttctttgggaaaatattttctaaaacaaagtctgctgagccaattcgattccatgatgagtttttttttaataca

SEQ ID NO: 81173 - DNA, 1041 bp, Homo sapiens
catttttccagtaattaacttctattgtcttttcaaaagtatctgttcatgacttactggacattttcaaaacaaacccttcactataaatagcttgagaagcactgatatagacagctccagctagaagggaaaaattcttccccagagaactgagtgaaagatgtatgttgaattccctccccttgttttctagaccagtgaagtgtaattatgtccatttatcatgtcacatttcttggatacatcaggatctctttctctacgctatagatgatatcaccatggtcatctgccctggaattgccaatcacagcgagaagcaatacatccgcactttcgttgactacgcccagaaaaatggctatcggtgcgccgtgctgaaccacctgggtgccctgcccaacattgaattgacctcgccacgcatgttcacctatggtaagcatggctaagtggagtcctccctttttctgcaagtgtgctactacttctgcttctgccttgttttttctttttttaagttttaaacctatgcccatctgcaagagatggtaggtcacacggttatatcaacagccaacttgtactgggcattgatgatgccatgcctcacaccagcctttgagatgggcactataaccaccctcacagaggcagaaactgaagcttacaggggaaagtcttgcccaaggtcccctagctagtaagagtcacagcagggctgggagccaggtagatcgggtagcagagctcatgaccttcaggactgtgctgttctgatgctcgttcctcaggactcttgtgactgacaggcaagggtgtgatgaggcatgtgaatgtcagtgggaagggagcctggcacagtagcaactcactggattttaggttcctggggaacaggaactagatctcgtctttcgacgaatgcttcttgatttgaattaaaattttgtgttagctgggccagttgtggtggctcatgcctgtaatcccttctctagtaattaatttttattgtcttttttttttttttttttt

SEQ ID NO: 81174 - DNA, 1069 bp, Homo sapiens
catttgaaccaaagaattattgtgtccagttccatgttgagtttttgtcttattagtcaagatggactagattatgctgtggaaacaacttggatctcagtggtttaaagcaatgatttctgtccatactatccatccattatggcttagctgaggggcctctgtgtctccatcattatggtcctcactcaaggaaccaggcccatggagcagctacctgctggaacattgcagagggtaggaagagtgtggctcttgaagcttctcctcagaaatgacagaggtcactcctggtcacactttattggtcaaagtacagtacacgaccaagcctaacttcagtggggtgggggagaagcatccttcctagagatggaaagtagttattggtggtgaactctcgcacagtttatcacaatttctgaaggggaactttaatttataaattaatgtggaaaaatttataatacttacttttctcatccaggagcatgaccttttccttcaagtcttcctttatttctacctaaaagaactcctagttctctttgtgtaggtcagtttgttgtcaacactagaatttcccatgggagcttttaaaagatacctgtgccagtggcttagctctccgggagtctaaggtatagccaaggtttttcagagccacagatacaggttttactccttgttccctcattagttttatttttgcttttttactttttattacagacatttcaaaatatgcagaagtagggagaatagtagaataaaccccagtgtaccctttacccaacctcaacaattgttcaactcatggcccatcttgtttcctttactcccttctggcatcccctctcaaagattattttgttttattttaatttaattaatttatttattttctgagacactgtctcactctgttgccgaggctggagtgcaatggtgcaatctcagctcactgcaacctctgcctcccaggttcaagtgattctcctgcctcagcctccctagtagctgggattataagcacccgccaccacacccagctaatttttgtatattt

SEQ ID NO: 81175 - DNA, 1043 bp, Homo sapiens
agatccaagtcaggtccatatattgcaattggctgataggtctcttatgccacttttcgatctccttccacgcatttttaataggtccccaaccaagtaagcctcttccaggtggggtcactggatgtgacattggaggagctctctggatccccaggacatactgcagtccaccatcaggccccctattcccaccctgagtgtatggaaattccaggcactgaactccagtgcctgctaatcccaggactgcccaggttctgtttggaaggcccttctgtggtcttcacttggcttctctttgtcactcaggtctcaaccaagatgtcaccctctcagagagcccttccttgactcctctccctcatctaaagctcccccccaaccccagtcattatctaatgcccctccttactttcttcaagccacttaagatttgaaattaaggatttgttttcataacctgtgaaattatttgtttatatggctatcatctgtctctccatcccagaagttcactccatgagagcaggcagttttcgcactccctgctgtagttccccagtgtctagaatcctgcttggaccctagaaagcattcactgcatcagtgtttactgaatgcctactgagatgggaactgacagtttgtgactgtaaaatgatactttacaaactagtacatcccaaaccattgtgccctatatgtgagtcttcccttaggcacattgcctctcttttgagcagatgccaggcattcaagtcactgtgaataccctttgggctttttgcaactgtgatcttgaccagaagaaaactaaagagggcattaacatgaaactctatattcttcttttgctgttatgcacctgcctcagatttctctgagaaaattataaaggatcttttcccatttatcaacccaactctgttccaaaccacataagctttgctaatgtgattagaaattgttgaaaacagatctgccttgcacagaatttcctaaatggataattaagcattcttgtgacttagaacccttcg

SEQ ID NO: 81176 - DNA, 1035 bp, Homo sapiens
gccggcctggcttaggctacatcctaccacaaaagaagacagatataaggggagtttaccccaggctcaaaagatactttcccccatggcttgatgattagggaaggagctgttcaactctattaagaatgccaaaacctctgagctggtgccaaagtcaacaactcccgtttccattgtaaatccgtactcttctcatgccagtctattttgtatgtgctttgcgtcgacatccctatctttccatgttagattttaaattggctccctacagagtttgaggttgggccttagaaggatgtgatgaatcccttcacttgtaatatggccattcacctcctcctcttagcaaagctgctgagacataacatggcttcaataacttcccaaggggacaccagctgagatcatctctcctgggcaaatgaggcccaaacaaccctctctgttaagaggtctcatctgtgtatttttgaatgagcctgcctcccttggcaccctgtccctatgtcaccaagaacgttttaccctaatcctacagagcatcctggcagtccctctggactgaagtttatctttcctctcctttccaactctgtcaagaagattctgtaaataacatccacttgctacttttcttaacaccatgaatcatcatacacatgggtatagcatcccaatttgtagcctaggaagctaatctcaaaggattttgctcttgcatttatttatttatttacttattttatttttttgagacagggtctcactctgtcacccaggctggagtgcagtgatgcgatcttggctcactgtagcctctgcctccccggctcaagggatcctcttgcctcagcctcctaagtagcggggactacaaggacacacctgtagtgtgtagaggtggggtctcaccattttgtccaggctggcctagcttttatttaggtctgtgtgtgagcatatgtgctcatgcacaccctgaaatctgctttgatatccatgattatctagacacggttcttgtgacctacc

SEQ ID NO: 81177 - DNA, 1064 bp, Homo sapiens
ttgtacatttgatacatggtacctccacgctttggcactgctgaggccctgtttcctcttatcccaaggggcatctgggaacttctgtctggatagccaaagagcagtgtctgtctctctctccacacacatcccccgacacacacacgtatatatacacatatatatttctctctcttttagtatactggcacccatttagtaacgttccagcttgcattttctccagataggatgcacctgaaatgattgagcaatctcacccttttgcccacaggctgcacgtgggaatttggagccatggtgaactacatcaagaagacatatcccctgacccagctggtcgtcgtgggcttcagcctgggtggtaacattgtgtgcaaatacttgggggagactcaggcaaaccaagagaaggtcctgtgctgcgtcagcgtgtgccaggggtacagtgcactgaggtgagtcatctccgccttccatcagggccttcagttagcccttatttatagagatgccccgacgcacaacacactgttctgtgaagaccggggaacactgtggccgactgagtagaagtttctgagtcttggactcaccttgttttgtctgcatatcatacattggagatgccccatcagaccccttaagcctgggatatgcagctgcgttttggggtcagatctgtaattggagaagtaaaaccccctttgatagttgctgtctcctagggaatctctgtcaggtgacttaatttgttcaggcttcaggagtttttatagaaacgtggattaatgaaagagcacaggagactggcaagctgggatctgaaagctgggccttgggatcccagatccctccttcctgcaagagatgagtcccagatggcatctggaagggatctgtagaaatcatttaatcagtgtcctcacctttaagtatttgtctctgtcaggcatcccaggcatcatcacaaaggagctgatctactgggtcaagctttctcccaccccttagtctcttgccagtagatgccccacaggatgagtcccaggagggcgtgg

SEQ ID NO: 81178 - DNA, 3057 bp, Homo sapiens
cctggggttaaggagctttaagaactccacaactgattctaatatgcagccgagtttgagaaccctttagagttctaaggctttcttcagctggtgcccattcagctccaaagccaagctgtactctaaaacctgctagatgccactgtcttgcctgccccctctttggtgaacaaggcagagtgagtagaggttggatgcccacttaggtgaccctgcggggacagccaggctaccctagccagctcacctctgcacctcctgtcctggagcaaactagagaacagtaactcactcagctgcgtttcccctgcagagaaacgagagaacgtcatgtttgtgctgcctctgcatgggggccacttgggcttctttgagggctctgtgctgttccccgagcccctgacatggatggataagctggtggtggagtacgccaacgccatttgccaatgggagcgtaacaagttgcagtgctctgacacggagcaggtggaggccgacctggagtgaggcctccggactctggcacgctccagcagccctcctctggaagctgcgtcccctcaccccctgtttcaggtctcccatctccctcagtgacctggatctgacctcacaccatcagcagggggcacccaccatgcacacctgtctcggagtaggcagctcttcctgggagctccaggctatttttgtgcttagttactggttttctccattgcattgttaggcatggtgacaagtgacagagttcttgccctctgtccagtttcagcatctggttgcttttaagccaagtacatctagtttccctattaaaaatgtgtctgaatagcgattttgctttgccaccaaaaggcttttccctgagaacagtgaaggatgtatgtcattttgtggtggttgtatgtgtccttacatagaccttaaaaagagctcacccttccaggccaatgctgaagacacagctccgcttgggagcctgagaacccaggcttcccaggccagagtgtggcttcttaaacggcaaaggaaattcctttgagtcacaagccaagttttcgccctgtctcctgagaccatttccctacgctttgctgctgctgagagttacgtgaggcacttgttaaaaattcagcctcccaggtccctcccctcggagaggctgattcactgggtctgggaaggagcctggggattttaatttttcacaagtgccccagatgattctcatcaccaagcaaattttggaaatgctgttcaacagcgcccttaaattggaaacatctttgcagctcgttttattgaaattcataatcaggggtgtcctctagctcccacggtctccagagcagcaaggccggctatggagctgccgtcgtgtgaccacagtgtgatgtctcagaagggctctgggtgggctgagcatctgggctgtgccctggctctgcttttcaccctggacaaagtcgctgtggacttcaatttcttcacctctaaaatgggggacttggaccaggtagattgctgagctcactaccaggttcaaagttcaatgacaaactcagtttactgaggtttgagagaacatccctccaggggagcctgggagctgctctcccagtctaagcatgtagatatcatcgtttgccttttgtgtgtgtgtgtcccttatttgataaaaagatgttttgagttgttttttttttaagcactcacttgtaattttagtttttaaacccaagtccctctaactttgcctttgataccaaacaattcaaaagttggatctgagtttggagaaagatatttccaacctaagtgggtattattttgaaaccagatttttaatttaatagcctatatttgtagtctgttggataggtgtttccaaagtgtgtcttctcaagtgaaaacgcaactctaggtttcaagtactccttttctccgatcctgtggtacttgaatatccaaaaaccctgcactttgaacaatcagctgttgctatctggaactaaacagaactatgagtaaaattgcctggatactttaaaaagatatttttcctccttcatctcctttgactccaggacagactggaatataagtagtgggtctgcatggatgtttcagggatcaaaggagccacctgggcgcctgagtgccaaccctcagggccacaggtgggtgtggtttgggcacgggtccaagtgactgtgacgggacccgtgggcatgggtccaggtctgtaacctgaagaagttgttttctgacaatcaccaaatcatccgaatgacatcaaaagcagcccttatctcagagactgagatttctgtggtctcaacttcgctttggtataatttctggcactcaccagcctctatcattatgactttccccccagtgtattatttctctaataggtttccttttcacgttcttttagcacagactggcactttaccctctcagtttggaagttagcccctctcctctgttacttttcccttcacccaactacagctgtgatctagaacattcatagtcatatttctgctactactaccttcatttatcaagactttttatgagaataggtaaaccaagcaataacttcctaggactgaatcaccaccccagaagagcgagaggctcctttcatatgcctgaggccacaccccttaacctgttctgacaaaatagtggctggcccatgtaccagctccattcagaaattcaggaagagaaaagacagccctgttgtcacacaaaccggtgtgggggagggtggagcctggtctgcacggcagtcctggtggcccctgtggaggacaggcagggctggcagcatagcctttgttgccacacaaccggaatttgctcccccaggactgtgggagccagtgtcccagctgaaatctttttagtgtgtggctctgaatggcactcacattccattttggctcacatgaaactaactgaagccctttgttcaagcttcaggctcttaggcatggaaatgagaatgtgactgtggctgtcttacaggaaaat

SEQ ID NO: 81179 - DNA, 1071 bp, Homo sapiens
aaagtcattcatttctgatgagtatatgaatccccctcttgctagtaaggttctatttgggctaaaacaaggctgaatttttaaagagtatttgaatatattttagaatcaaattgaggctataaattgcatcaatctggacaattccattgcaggaataatatgttaaaaaccaatggggagaagcacccacatctctcctgtagcactccgtgtctcataagcaatttgaagacacttacaagtaactgattccagtcaaattaggattaactgactcaaaaaatggtgtcaagtttctttaatgtttttatgttagaagtgagtttaacagacttgaagaaaactgttatcttttcctgctgtgagtttacacaaatgattccagagcagaatgaaagcagaaagctgttggttacaatattcttttaacctctctgcagcattttacacttactgggaaccttatgattcaccgtaagagtggaaatatacctgagttcgtgtcctaatggtctctaattcacattggatcgtgggcaaatcacctcacctctctgagcctgttccctcctcttagaccatctctaagaccacttcatctatttacacatcatttgcttgaacattgctgaacatctgcgtgaacttggcctctccagcccttgcaggtggaaacagctgtgtcaaggctcaaggctcacgctgaggggacttggagggagggggcttctgcattaagctttcctggtgaagacccttgatcttgtccaaagccctgtgtctttgactggcttctcttcagagtccccgttgtcatcgtaagacccttgctgtttggagggtggtcttgtgactgtggcagctgctggccgctggaatgaggagcctatctccatcctccagtgtgactcaggcagagcattgagaattcccagggcagaaatccttcctgctcaggctttcattctaaaactacagtcttcattaaagctgaactttctgggtagctgagcttatatgcccggcatctgaatgagagctctctttgtaactgtgtgacttgagatc

SEQ ID NO: 81180 - DNA, 1290 bp, Homo sapiens
gtgtttagtggagcaaaaattgtaccataaacttgtgtttactcttttcattcggatcatagtcaaagggctgtagcattactgaaacagtcacagttgaccctgggtcaataattccactgttgggcctcacacagtaccggtgaggcacggtagtcttcactttgaaacacacttttctatccgatggatttcgcaatttaagatttgtagtgactacatctgtgaaggggcctttgaatttgaggtctatgggcgggtcgaggaccaggatctgctcgtgcttcgccgtggccccggaggcagacgccattggagagacagcgcagagcagggggcggcttgctcgctgggggcgggggacgatggcgagaggggagggggagcgagttcgcatctctccttttcctggttagactctgttcaaccacattcttatgttggcagatctgcttccagattgatttttagagcaccatcactttcacattcctgattctgattttgttttgttttgtttgggttttctgaaacttaaaatgctgccccgaaaatactatatttttgagtttgtgttctgaaagcctccgtgctgctggatctttggggggaaatacaggatccttcagcactgaggtgtttaagatttgcaactagcaatgcaattttttctaaatatggggatatttacctttattaagaaattatactaaacattgatgtccttgatcattttatgttctcatattacttttgattctactatgattgtgtggtggtgaacaaagatcattacaaacaaaaactgtaattttgttatatttgattcaatggaatttacctaaaaaataaagactaaaaatgtggtgtggctatgtgtcctttgtatagtgccagttttccatctgaaaggattcttcctgtgtcttcaccaaagtatgagattaatggaaatacacaaaaccccatttttgcaccacaattgatgttagtccatccttgcaaacaaataccaaaaccttgaccaggccacaagtgtcttcacaaccccatcttctccgggcaagaaagccaagaactaaaataagtgaagtatctcttttctacttttttaattttttagagagaggttcttgctctgtggcccaggctggagtgcagtggcatgatcacagctcactgcagccttgacctcttgggctcaagcagtcctcctgcctcagcctaccgagtagctgggactacagggacttgccactgcacctggctaattgtttagtttttagtttt

SEQ ID NO: 81181 - DNA, 1881 bp, Homo sapiens
caatctcaccaacattgggtatcatcagaattttgattttgcgagtcgggtaggttaacaactgctatttcattgttttaaatggtatttatttgatcttgtttctcggtattgcaaaatcaaacttgaattggccctgtttttttgtcctcattaattttacaaagttatatctaaataagttgtaaagaaataaactttgtcattttcttctaccaggtgggatcagcaatatgtaatccaactcacctccatgttcaagtaagcatcatcttttcccttttctttgtgtatcctgctttgtgaacttacttgctagaaattaaactatagcaaacgtaaacatcactctctcctgattgtaagaatattagtagttatgttttctgttacagattcacagattccctcctcactcctgcctcctttttggctttacttacttatttaaaacataactttattttttttataagaatgactttgcttaggtaaggttattggttcccttaaaggttcttcattagagaaaaatcaaaagggacagttataataatctattatctctttaattctctgctcccaagtttcatttcttaaaatatgtttaatggaattttaaccactgtaaagccctgaattgaatttctgaaaacaaggcagttagacactgtctatagcctttagaatctttgatccacagggatgtccctctgactgcagaagaggtggaatttgtggtggaaaaagcattgagcatgttctccaagatgaatcttcaagaaataccacctttggtctatcagcttctggttctctcctccaaggtacaaatggaaaattgtttctccttagttctggtggtatgaccagttatgaccattcaacttattcatacccttggtttatatagcagagcaaacatagccgaacatagatgctttcatttcacgtgagcaaacatagccgaacatagatgctttcatttcacatatagtggtttggtctggtaaaaggatcatacttctcatccaaggaaaacatgcattatctcttgtattgccacattttctttgcggaggtaaaagggataaagatctcagaaagggtagactataggccccataaattcttacagtaagaggtatttcaaatcttgtttcaacatgaaagtgttctatacattcttagtttgagtctaagtcatagattatttatttaaatttgtactggagaattctttaagctgaaaactactttgaattcaaattggttattttgctgttaattgggagaccttaccaattttgtattgttttcagggaagcagaaagagtgttttggaaggaatcatagccttcttcagtgcactagataagcagcacaatgaggaacagagtggtgacgagtgagtaatatagtgtagaaataaagatcatttttacaaattcatcttctcattgtgtattttagctatttcattttcttctctctcaccgcctaccttcacctcagcacaaaacttttctaatcttctcttagctactcagtaataaagagaataacatgatctcttcagctctttcattttcacctttccaggaaaataattgtcctataagctgcaagtttaaaacctatttattaggtgtcagctctctgccaggaactgtttagccttggggctaccgtgctgaaccagtcagacaatgtccctgctcttgtagaacttcaattttagtgagaagaggaaagaaaataaataacaagaaaaatgttatagtaaaagtgctatgcaggtaattcaaatggatgatctaccactgacagtatagctactttagattgggtcagggaaaacctctctcagatgtgctattt

SEQ ID NO: 81182 - DNA, 1050 bp, Homo sapiens
gatggatagatagatagacagacagacaggagcagaaaattgggcagtagaatttctagtaaacacctgccttcagtgattgtatgagtttagcttgagttggtctacttgctcatcgtagcacctgtccttgtctctcactcaaaaaccatagctcataccttttttttgttgttgttgagacagggtctctctgttgcctaggctgaagtgcaatggcacaatcttggctcacggcaacgtccaccttccgggctgaagcaatcctcccacctcagcctcccaagtagctgggactataggaatgccaccacatcgggctgatttttttgtatttttagtagaggctggtcttgaactcctgggatcaagtgatgcgcccgccttggcctcccaaagtgctggcattacaggcatgagccactgcaccttatagctcataactttctgttgaatcttttaggctattggatgttgtcactgtgccatcaggtgaacttcgtcatgtggaaggcaccattattctacacattgtgtttgccatcaaattggactatgaactaggcagagaactcgtgaaacacttaaaggtagcatcaaacttgtaaggtgatctgggtctcttttgaatgaaagtgtttgaacttaagccactgttatgccagttaatgacaggaaataaatactgtaaaatgaccctgggtgtggaggatctctttttttttttttactttaaaagtggaaaatacatgatgttaccacactcccttttttttaatgtcctcactttagcagtataccacatccttaagcaagccagaaagttctatttaaaaaaaccctcaaaagttctaacgcaaaaaagtgggaaaaaaggtgagaactattcagcaggaaactcaaaatctaattctaagtagattatgtgtcactgtcttatgtgaccttcagctatggcctctgctttctcatttatgaactaggatgttgcatctagtagtatatcgtggagttgtgtgatgctaagtcattcatcatgaagtatttgta

SEQ ID NO: 81183 - DNA, 1034 bp, Homo sapiens
attcaaatgtaagtctttgtgtggacatacattttatttcttttgtgcatatatccaggagtagaactgctggcttatatgagaaatttatgtttatatttttaagaaactgcctgttttccaaaacggtatcattttacattcccactatcactatgtgagggttcctatttctctgtgtcttggccaacatttgttattgtctgtcttttttattatatccattctaatgggtatgaaacagtacctcattgaggtttaactttgcattttcttaatgactgatgataattgagcatcttttcatgtgctcattaactgttctaataccttctttggtgaaatgtctattcaaatcttttgcccgttttttgagtgtgttgtttgtcttcttaattaaaattctttgtatattctactgacaagctcttttttattttttcaataactttgttatgaatggtgacaagttctttatcaggtatataattagcaaatattttttctcagtctgtgacttgtctttttattttcttaatggtatcttttgaagtacaaaagttttaaattttggtgaggtccagtttatcaattttttcttgtagaaattatgcttttggtattgtatgtaagcaatctttacttaatccaaggtcttgaaatttttctatatgttttcctctaaaaatattacaatttttgctcttacatttggatttctgatccattcaaggacctatttttattttttattactattaaaaaatgttttttatgtctctcgagtcataaggacttttttgggggatgcagtggcgcaatctgagctcactgcaaccttcgcctcccagattcaagtgattctcctgcctcaacctcccgagtagctgggattacaggtgtgtgccaccactcccagctaatttttgtactttacaagacagggtttcaccatgttggccagactgatcttgaactcctgacctcaagtgacccacctgcctcagtctcccaaagtgctggcattacaggca

SEQ ID NO: 81184 - DNA, 1072 bp, Homo sapiens
gacttttagccttttttcccccttttttcttaaggaaggcttgtcttcagctccttaaagttcccactgaatgtcataatttttgtaacatcttcatctagttaaaatagttgtcatagggatatatgtgaatggcagctcataggaacagttataaggttaagatttatagcatgagctatataatatttgctttattttcttatttctttcattctgttaggtgcttgatcttttatttatttattttttcatttatttttattaactatactcaaggtgcttgatcttttaaagacttcggttgtaaagagctttaaggatcttcaactcctccaaggctcaaaatttcttcagaatctagttcctcatagatcttatgtttcaaccatgatcttggaagtagtgaagaataggtaagttggtgaaccatatctcaaaaggtttataaggtgtttaatgttagaaaatgcaatgtgatatcatacttgcagcctgtgaggggaaactgatgacttaacagctgttgacgtcacacatcgaggttcattttcttaaaactggtagaggatactttttccctatggaaatatccttgaatctcaggccctggtttcttggccaccttgacagcaagcatacaaaactgaattagttgcttttgtttattccatgatattacaattctctattttccttttctttctttcctttttttttttttttttttttttgagacagagtctcactctgtcaccgaggctggagtgtagtgccacaatcttggctcactgcacccttgacctcctgggctcaagcaatcctcccacctgaacctctcgagtacctggtattacaggcatgctccaccatgcccaagtaatttttgcgttttttgtagagacagagtttcgccatattgcccaggctggtcttgaacttctgagctcaagcaatccacctgccttggcctcccaaagtgctgggattacaggcttgagccaccggtcctggccgtttcttttcctttttaaaggaaacagtctcactatgttgcccaggctggagtgca

SEQ ID NO: 81185 - DNA, 1088 bp, Homo sapiens
ctctcaagtagctgggacaataataggtgcatgccactgcatctgactcatggcctctttttaaagtgagtaaaaaacattaagagttttatttactttgttgaaatttggagcgtacagttggaattcaattattgattagccagtttagagaaattcatttaaaaccacatggaaaacatcagtaactgtcctggtttttattttaatttcaggatatacattagctgttgtaacagtctttactatgtcatgctttcactgtgtattaaatatattttaaagtttcataatttaagcataatttatggtaggcctcttctaggcctggaattcttgtttattaatagattgaatttacatgagctttgcagtagggcaaatttgaaattagagtttattgtttgagtgttttacccattgttaggccttaaagctttttaatctttgtatctcattattctttttcctgaggtttatacttgtgtctccagtattttcccaacccaatctcttaaagttgggctaaagaaggaggtactcactaaccaggaaattcctggaaagcttcccatcttctggaaatctcaactgtcataggacttgaaagcatctccatgtataattagcctggagtgggtacttgccactgggtgggaccaaacctcagctgggagagatttggatagccttattagatcctctaaaataactggctggttagttacacatgcttgccccagtcagttaatgaacctttaaataatgcattctccattttatgtaattgaatttttggctcttcagagtatgaatattgttaactctgttaaagtcttataatttatccataactgtctacttcattctgtagtgctgcattataatttgttgcaatttaacaggtagatataatggataaaggttatattcacattatttccactgtggggtataacattaagtggtataaaaccaccaatgattctactcttttacaaaagattatttgtagttttagcttatgctgttgataccagatcactcatccatttatagtataaatatctactgagtgtcttttatat

SEQ ID NO: 81186 - DNA, 1037 bp, Homo sapiens
tcattggagaccacttgcctgctgttcccattatggtacatttaggaattcagaattctgtcagacgatgtgtgtaaagaaaaggtttatatgcagagtacgttgattatctaggtcaagtttgggaaatgtataacagggcaatgagtataaaggtaagaatatctcactaagtttttcttttttaactaagctttgtgttcttgtagcgttcatagctgggaccatgttactcagggcctcgtagaacttggtttcattttgatggattcatatgggccaaagaaggttcttgatggaaaaactattgaaaccagcccaagtctttctagaatgccaaaccagcatgcatgtaagctcggagctaatatcctgttggaaacttttaaggtgagacactattttggcaaccactccctaattttgtttaaataatccaagtagggcttggcatttgcctgggagtttggtggacaaggaaatttgagtatgtattagtttgacagaggatatatgacagagattaggataatattgaaacattatagatccagtttgatggaatacttacttacgtattcttctatgtaagtttttcatttattccacttaatccaattgtttctgacctagaagtttgaatataagacagctttttcatgatttttccttcttcttccagaagtaaaccatttctagtttttgttttgttttgttttaatgctgttcctttacacagaagaaatttttttaggtcactgtagagcatcaagcttaaagaatcatgcttaagaatttttactgaaaataaaacaaaaaaagaatcatgcttggtcgggcatggtggctcaagcctataatcccaacactttgggaggctgaggtgggcagatcacttgagctcaggagtttgagaccagcctgggcaacgtggcgaaacctcatctctacaaaaaacacaaaaattagccaggtgtggtggcacgcacctgcagtcccagctacttaggtgactgaggtggatcacttgagcccag

SEQ ID NO: 81187 - DNA, 1067 bp, Homo sapiens
ctaagtcttcttgatgttcaattgtttaatgtagctacacaccaagagtgtctgctgaaaatgtttatttgggaggctgatctaaatgtaaatctagtgttctaatccagaactatgaagtaaatgtcagaatagttcttgagagttatcagtgtatttgatgatataaattaccctgcttaacagtgatattgttaaagacattatcttagagtatgtttttatatttaaattattatttttcaaaactaaagaggctccatttgatttcacatggatgtcggctttatcaaggcatctttataaattgctactaagtcactaacagtctgaggtctgaacgaattagtctgtaccataaagtaatcaagttgaagtaagaattttaactacaattcaagtgaaaattcagaatgggtctttttaacagcaactgctgtgcttctagaaactgagaaaggggttagggaagatcttttaagtttctagaaatcttcatgggcttttacattttaatttttagaataaaagttatgtatactgtcaggaatatggatattgtcaggtaatggatacctaagtagaattgatcctgtttgatgctgaaccttatatgtagcaatagtttaatgtgatctgtacttttaggctaataaacatggtatttatcctactaatgaatcatctaagcacagaacaaggggaaagttgagtgattctgtctttccagatgattcacattatattctgattttttgagttttactcatatccaaacggttcttcatgctgcctgacatgcattgatatacttaaaagctgaagggtcacccaggaatattttatttattctgttctttttagatccatgagatgatcagacaagaaattttggagcaggtcctcaacagggttgttaccagagcatcttctcccatcagtcatttcttaggtattcaactttgaaagaatgaataaagtttttagaaatattttcatttcaatgtcataatcatttggtcctgggaaaaaaattttaatgagcatttaaatgcagtatctttgat

SEQ ID NO: 81188 - DNA, 1281 bp, Homo sapiens
tttttgagatggagtctcactctgtcacccaggctggagggcagtggtgtgatctcagctcactgcaacctccgcctcccgggttcaagcaattctcctgcctcagccttgagagtagctgggactgcaggcacgtgccaccacacccagctaatttttgtatttttagtagggatggtgtttcaccatgttggccaggatggtctcaatctcttgacctcgtgatccacctgcctcaggcttccaaagtgctgggattacaggcgtgagccaccacacctggccaaattgtcagctctttatcctggcactgaaggtgcttgacaagttgatcccaccctacctttccattgttaaagtcagttatttactttcctggattcttcaccccagcatcattgatttccctaccatcttctgaatatgtcttaaacttacctttctcatacctttactcatacttttccctttatatatgtaggcctttctggtgctttgtgcatttaaatgttccccatcttttagaacctagtttaagttccttctcctcattgctttcctaatatataccaactcataatgagctcttcttcctttgaactcctatttaaactctccctttaccatttggtaggcaataaactatgtttggaattaatagatatttgatattgctctgtgatttacctctttaattctttaaaaaaatttttttacttccaactaaattattaaaatttttgaagaaagactatgttttatacttttatgttcctaataggaccatattacgcttgtgcatagtaaaaattcagaaatatttattgatttattttagcttagaagtaagaagatgtgtgctactacttatgtctaggcagtgtaatcggtttcttcctttcttttaggcagtttaatttttatagaaattgaaactatcatagaaaaaagctaaaattatcctggttacattggagaaaaagtatatatagaatcagtagaaatttgtattgcagtatacttgacttatttgagaaaggaaacaaaagacttcacatttctttctccgtatttttcttttatttcagttatctttagttatttgagacaactgattatagattctgtttttcagacctgctttcaaatatcgtcatgtatgcacccttagttcttcaaagttgttcttctaaagtcacagaagcttttgactatttgtcctttctgccccttcagactgtacaaaggctgcttaaggcagtgcaggtaagtcttcagatt

SEQ ID NO: 81189 - DNA, 1030 bp, Homo sapiens
acttgtccttcggaaagctatgtttgccaagtatgtagcatctttttctatcataggaagacgttgtcttctaatgttggagctaaagttatctctgccatctcctagtaccacctgttcacagtgatcatgagaattcctagccccgcagagcaatttcatcaaataaggcattttgctaagtgctttatgtgcttttttcatttagtcttcagagcaaccctatgaagtaagaattattgcaattcccattttacagataagaaaagttaggcttagagaagatgagtgactttccaaaagtaaaacagtagttggtggtggagcaaggattcaaagtcaggtctaacatcagagcttgtgatgtcaagtactttgctctactacattagaataatcttcagggtaatgttctagtgtcaaatactctgaaacctgagctggcagcagttccaaaggggaaagtaccttagtcaagaagattatacttaagaatctcattttagtgaacatctgaattatgatctagaggctagtagatcaaattaattgttgaggggaatgagttttatttgtagcttagccagtccctcctaacatctcttcctttatttcttagtatataagctagagatgatcttgccatctcctaaaaatataagacagtaatatgtgaaaagcatttggtactttgaggataagatgcccaattaatatcacattggccatattataatatattcatgggtgtccagaggaacaactaagccatatgctattatctttgttctagaattaaaagtttttgttactcctcacccaaaggcatagcgaatagactgagatattacgttgtaacatctttaacatgaattaatcattgcgcctcagtgagaagacaagtgtgacattttctggatggacagtttacatggcatcaaatattacattatcctatgatgaaagagagcatatgaagggaagcactccttcaaacatggcaaaatcagcaatttcttacatttgagta

SEQ ID NO: 81190 - DNA, 1962 bp, Homo sapiens
aattgtcttcataatttaaatgatgtactataagatttataaataggagacatttatatataacagtttgactaggaatcctcactttattgctttggtataactacataaagctttgtctataacatatagcatagattaaatattaggaacactagatatcatttgtgtgttattatccccattttaaagacagggaaactgaggctgagccaggttaaataacttgcccaaggttatataaccaagaaagggtggaagaaggatttggcctcaggcagtatgaactacattactgtgatgcctggagtaaggattaggaattcttggtctataattgctgattttattatgtaatttacacaaaggatgtcagttctttgtcatgtccatttctaaacaaaagactgtcttcctctcaacctttctagaatttgtggaatagtgagattcttctagctattgaagaagtcttagaccttttaaataaaattatgtatattgttactactggattctagtggcttgaaataagcagtgtaccttcctaagcaattgatattgtcaaggaaaccttaaggaatatgaacagttaattttgttaaaatgcttaaaaattctcttattccaaaccagaataagagtgacacttactactgcatggtaatgattatactgtgtgtctcacccctggggtttggcatgtggaggaagctaagttttttcgaccaagaacataggctcatttagctccttattggaaacagctttggtaagatagacgtgaattggcctgtcttcctttcaggttcatgtggatgttcacagccattacaattctgtcgccaatgaaactttttgccttgagatcatggatagtttgaggagatgcttaagccagcaagctgatgttcgactcatgctttatgaggtaagtccgtagaatggaaagaatgtagcaaaaccccaactaataatttttattttagtaatttttttcctgattataaaagtacaatagctatgctcttacttgatgtagtcagcaccagtagctagtgatgtttagtcaaaaagttgtttaaggcagggcacagtggctcacacctgtaatcccaacaccttgtgaggccaaggcaggaggatcaagcaagactctgtctttacaaaaaataagaaaataaaaaacattagctgggtgtggtggcatgcgcccgtggtcccagctactcaggaggctgaggcaggaggatcccagcagtgaggctgcagtgagctatgatcacaccactgccctccaacccaggcaacagtgagaccttgtctctcaaaaaaatttttttaaggtgagaaatcataaaacacagttgatagaccttaaatattttattttaatttgaaatatttaaatatactataaatttgccagtcttaagactaagtccttttttttgctttgttaatgattacaagtttacttcctgcctctcatacaaacccatacccttaatttattgcctatagtttcaaatttgtgtttacctaaagtggtatgaaaactttaagctacctcagatacagtttagcacaaaaatcttttagatagcttcagttttttctctttttacaattgtgttacctctaatttatcagaaattggtttgagagactgactttccaaacattgttccaaacttagtttttttttttctttgggacagagtctcgctctgtcacccaggctggagtgcagtggcacaatctcggttcactgcagcctccatcctccatctcctgggttcaagcagttctcctgcttctcaacctcccaagtacctgggattacagccatgcaccaccatgcccagctgatttttgtatttttagtagagatgggatttcaccatgttggccaggctggtcttgtactcctggcctcaagtgatccacctgtctcggcat

SEQ ID NO: 81191 - DNA, 1028 bp, Homo sapiens
gggattacaggtgtgagttacttcacctggcttccccaggattttactctgagcagttcttaactaagactaggacattttgggtgggaaaaaaatatggtcatttatattagggcatttaggactgtcaaatatggtctcaataggaaaaaactgagaagaggataaagaaagtgttatttttaagttatgattgtccagatcactagtatctctgttaaagtgcttatttcttctctttgattcctcttaggggttttatgatgttcttcgaaggaactctcagctggctaattcagtcatgcaaactctgctctcacaggtaaaatacatttttatggatatatggaaaacagaccatcaaggatcgagagacagttgatggttttcagacctttcaaaatataaaataattcccaactagtacattagtactttgtgaacatgctgtgggtatgttatgctgttctgggttgtcttatctcggtcaccacttacctgtctgccataataccatcatctagcagttatccttgtgaattaacagtctgtatcctaagtcagaaggacattttgaagaaccatttatataaggaccattgcaactgtatccattatgttatatttctgaaagaaaaaagaaatccaaaacaaatatagcaaaatattatttcttaaatctgggtaatggatacatggatgtcttttacattcctttctgcacttttcagttaacaaatttttaaattagaagattaaattcttctaatcttcaagactagaagaattcatatagagactctctaccaggagggttcctttagacccctagtctatcattttgtttgctgtctctcaatgccattgctttgtgatagttatgaaatttcatttaaaattaaggtctcagatgtgtgaaattattggaagttcccatactgtccatcaaaagcttttcatctggccttaggcttgatcctatataaaatttatattctgtcagctatattgtatctttcaaactgtaa

SEQ ID NO: 81192 - DNA, 1067 bp, Homo sapiens
ccactggtgagacttttattcttccttcaaccattatttttagtattaaggatagggttgaactttgcaaagagatacctttccctgtgaaactctcttcctggttcttccaatgaatgtttacttttaagtcttccctgcttatcatttctgaaccattatcattttggatctattggtaagttatctccatgttagccctttactaaatcaaggcttccatcacttcccccagagaatattttatctcatttatgaatctttgattacattcactaaataaatgtactttagaatggggagagggatgatgtcacctacgaacagatgaacctaggggacctgcttcattagtctagaggaagtatatgatttaggctgaactaggattggcactgttgaaccttcagaggagctaggcctggttgactttctgttcttatctagcctcagaaggacagcgaagaggataaaaatggaaactcccaccccaagtgacttataactcatggcagaagaaaggaggaagtctttcagttgtcatatcttgccttcatttttgtgccttctgtgacatgagatgtcctcagcctagatctaagatgctgtgttggtctcctaaagattccctcaacataaacctctatctttagaatagcctctgggactcaaatgaactagagaagatttaacttcaccacctagctccagggttatttatcagaccagagatagcacatctaatgttgcattttgaggtgtcagccacttaggccaattttcggggggaagcattagaaaaggatgctgctgttcaattaattttcccagttttgttaatttagatggacttaatttgtaacgccaatgaatcattttctttagccttatagataagaattatttgctggttatgaacaactttataagttatccatcaacactcaagagtatttaatttacttattttctcctacaggattatctgctgtgttgtattcagcattgtttggcctggtataagaatacagtcatacccttacagcagggagaggaggaagaggagg

SEQ ID NO: 81193 - DNA, 1046 bp, Homo sapiens
gcaggagactcacttgaacccaggaggcagaggttgcagtgagccgagatcatgccattgcactccagcctgggcaacaagaacaaaattctgcctaaataaataaaaaggtagggggggtgactgaattaaaaatacaaagggacaaaaaaaaacctaaaagactaagactgacatttaaattttatcaaagtaaaggatttggggagggagagaaaatgaggaaccactaagaataacgattataaaagggcagccatagcagtgactatagcttgggctgcctagagagtctgccagtcggaacttactggcaagctctgttgggtgctgctgttctgaacaatttctagaaagcttaattccatataccaatagcagtaagggaatcttcctttttctttctctctctctgtctctctctagggatagtatccaaagccaccaagaaagcctttctgttctcaggtccagcaatgagtttatgcgctatgcagtgaatgtagctctgcagaaggtacagcagctaaaggaaacagggcatgtgagtggccctgatggccaaaacccagaaaagatctttcagaacctctgtgacataactcggtaagccactcccaccccttagaaacttattccacttggctgtggtgtctccaagagaacaaactgggaacagaggatgaaggtaatttgaggttggacatattttaggagtgaaagaatataaaacattagccaggtggcaggcacttgtaatcccagctactcaggaagctgaggcaagagaatcacttgaaccaggaggtggaggtcgcagtgagctgagttcataccactgcactctagcctgggtgacagggcaagactctcaaaagaaaaaaaaaaaaaaaaaagccagacatggcagctcatgcctgtaatcccagcactttgggaggctgagccgggtggattacctgaggttgggagttcgagaccagtctgaccaacatggagaaaccctatctctactaaaaatacaaaaattagcctggcatggtggc

SEQ ID NO: 81194 - DNA, 2003 bp, Homo sapiens
aaccaaagatgattaattcagaaagtgtaactatagtcccaaagcagaaacacctctgcagagataggttgtatgtatgtttgtgtaagtgtgcacacgtagatgtagagctgtgtacccacatgagcgttcacacacagaagaataagagaaggaccacttgttgggggtctgtaccattcaggagtaattttcctgtaggatgatagagtaccttcaggagcccaggactgtgtgctcctaccacatctacttcctgggcttgagaaagacaatgaagccctgcggtatactcctctttatgtgagcccttgcctcagaagactgtagcctgggagtatgaaggcgtttgggcactagaaagcagagctgcttcctgtcgtcctacttccaggtttgcccaaagaaagtccctttggttacttcatcccagttccaaacagctcacccccactttgctctcatcatcgttctttcatactgctgtttttgctgcaaagaggaaaggactgagaaagaaatagctaattggggcagggggaaatttgagagaaaataaatggatttaggaaggctaaaatgttcaggaaaatttaaaaatttttcttttttaaacttttaaacttttagatttttaaacgttttaccacctaccccttctcccttaacttcaggtagtctctttaaaaaaaaattttttttttttttgagacagagtctcgctctgtctcccaggctggagtgtagtggcgccatctcagctcactgcaggcgccgccttccgggttcacgccattctcctgcctcagcctcccaagtagctgggactacaggcgcctgccacaacacccggctaattttttgtatttttaatagagacggggtttcaccgtgttagccaggatgatctcgatctcctgacctcgtgattcacccgcctcggcctcccaaagtgctgggattacaggtgtgagccaccgcgcctggccaaaaatttttaattttaattttgaatgggtaataaagtcctatgatttgaaaaccagagattatcaagagatttatggtaaatggtgtcccccacccatgtcctccatctgttcagttcctcctctccccaaataagtaaacacctttagttttttgtgtccttcaaccttctttattcccttccaagtaaatatagagttttattcccaatcctacccctcttcacacaaaaacttgttctgcatcctgcttatttcattgagcacggtattctgaagatcttttaatatcagtttgtagagagctttcagttagcctcttaatttaccttttcctcaacagatcaaaactgcatttttgttagtcatttacacttaagtataacggcatttcggtgcctttgtagctgaaagaactgctgaagcagaaagttgactgtgtgtctggtgatgcagatgcttgctatctgaagaccttaagtctccttcacttagctaagaaaatgctgtctggtttcttgcctcttttatttctcttttttctgcccttctctcttctaacctcctttgttcttttggcttctaaatgctaattctactgttcttatagctaggttttctctttcccacacctttctgataacctaatatcctcaagtggagagtctgggggcatgggaaagaaaagagggcgctttagccctagaccactatggtagaagcagaggaagttcaggtgtaaggaccctaaaacttttggacctcagtaaggacatagacattgagaattaaattatatattattctcataattcttagaattttggacttatttttatgcccttcatcatatattaccacttgagatctaaggacatgttttggcagctgatttgcttagatatggaaaggtctagaactcttctgttctgacaacacctaggtctatctctggcatgtttctttaatatctgaatgatctctaatttagtttgtgcagatgttatcctggac

SEQ ID NO: 81195 - DNA, 1112 bp, Homo sapiens
ttatattacccccacagctgtgtgtagtgaatcacaccaggcactcttttctttcagttacttgttctgagtcaggccgagaaggttctagaagaagtggactggctaatcaccaagcttaagggacaagtgagccaagaaaccttatcaggtaagataagttcaactgggattccaggaattgacatgagcaaggtcaaaattcatattgggtcggtgcataaaaatggagcccctgagctaaatttcttatttgcctttaagctagattttttcctatgtgatgaaagaagtagaagatcatatgtcttatcacagcacgattaattcactctgcatattgaatgttcgtttttccataaagactttctagttagtagtaatcaatttctaaatctcctttactcttaattagaaaacgaagttgggtttgaatgtgccaattttatttccctttagaagaggcctcttctcaggcaaccctaccaaatcagcctgttgagaaagctatcatcatgcaactgggaactctgcttacatttttccacgagctggtgcagacagctctgccatcaggcagctgtgtggacaccttgttaaaggacttgtgcaaaatgtacaccacacttacagcccttgtcagatatgtgagtatttgagacaagcagattcgccccaccattctaccccagtgagccaggagatgaggatggggcagcagcccactgctgcagaatgcccctaaacaagagagcatttgcctccatcttggcaggtcatggtttcattttagtttggtcagtaggtggcaggcatctccacaggccagggaaaaacagtttataattctaatctgcttttgggcctgtcacggtggttcatgcctgtaatcccagcactttggtaggctgagacgggcggatcacctgaggtcaggagttcgagaccagcctggccaacatggtgaaaccccgtctctactaaaaatacaaaaagtagctgggcgtggtggtgggcacctgtaatcccagctactcaggaggctgaggcaggagaatcgcttgaacccaggaggcggaggttgcagtgagctgagattgtgccactgtact

SEQ ID NO: 81196 - DNA, 1213 bp, Homo sapiens
tttaatctaaactataactatcctagaattaaatctgggcccataatgcatagaaattataccatttctaaccagtctggacacttaaagagatgtttattccttttttcattcctttaacatgtaggtgttaaatgccttatagatcaaatactaaggtggggaagaaaattattttttataaaaatacaaggcataccctgcccttactgtttatgttcctagcaatgatccatattaaatacttagaaaggcacagataatccaagaaagatgtggaccaccccgcatcacagcagtgtggctctctcagaatgtgtagctctagctacatgtggctaagctgctgtagtggaaatactgagagcctcttctctttattggcatctttaaaaggaaaaacagcaaagttgttggttttttacatgcagggactaccagcctgaggaatttttaaagaaatgagcaaatcagaaacaaacccttcattacttattgtctgggaagcttaggagctttggaggagaggaataaggaagcttgtgtcttggcttctctgtgaattttgtttttcctcttcagtcagaatgatgagtcacactccataggctcactgcagcagtcacttgtagtttcataggacagtctactaaatctaggaatctttttttattagtatctccaggtgtgtcagagctccggaggaattccaaaaaatatggaaaagctggtgagttgagaatgcctttcctaggaatgggggaagcacttttactgctggttacattggtttccttctcccttgttgtgcaggtgaagctgtctggttctcatctgacccccctgtgttattctttcatttcttacgtacaggtaagagattcagaggcagtacccaataggtcttcaagaaaggatttcttacatgcccaggggactattgatcacctgaactgagcatatataaacttttttccctgcttaccacaagctggaggcacccatcagagaccaagccaaggcttgagggctttgcagcaaggacatctttatgtaaagaaaactgtttcacttaatttggagaaaggaagcatatatgtttgcatttggagcaaggaaggaacaagcatgctcaggctcaaggacttggtttattcctgggtgactgaaagtccatgccatgaggcatcctctgggaatgtgagcagagtag

SEQ ID NO: 81197 - DNA, 1962 bp, Homo sapiens
tgatctatcctgattattgggtaaataacagatgtttacaatattcaacattgttcccattgccctcttaatcatcatctccgggaggttatgcttaacaaagctaaaagtcctcatttatgcttcaaactctggcccaattggaagtgatttcgtatattaattaataaagtgtaccaaactgggaaaaaaaaaaaaagtatgttgagtccataattgcatttcagtatctcagtgggaggttaggctgctggatggaaaacagtgctggaccttcacctttcttgacttagctaagtgaacagatggggtgttggtccaggggaagccctgctctaaggggtgtggggtcattgctccaggagtgatgcatctgttcacaggaggggcatgactgtgagagtagattgggtctctttcaggtgcatgtttgcctacaagctgggtctgaatgacttgccccagtcagtcgcctttttcagtgcagtcgatattgaccggtgcctcaggaaggaagtgaccatggattgtaaaaccccttccaacccaactgggatggaaaggagatacgggattccccagggtgagcacaacacatttgttcctcattacacataggatctgaggtggactagaaagtgggtcttggagaacaggaaacttggggccccagagaatccactcttgactcaggctatattctaggctaatttcagtttataaggtgccctgtgtccagagtgaatgtgatatgatgtttcagaaatgaaggcagcagagcttcaaatattctacctgtacctgtcccctacttcaaccacagaagaaatgtttaaagataatttattctatagagtgcattcttgcactctataggtgacagaaaaacaaactgtgctttaaataccaaacaagtaaatcagaaagcttattttctatttaaaatatatctaagacacacttatataaaaagaaaacagaccctcctaacatgtaacattaccgttcgtggcaattgttctcaacctttcactctccttttgaccttagcattaagctcctttgctcacttctgagctctcagttacagttcttgaggtggcatcctaaccaatttgcactatctttcaggtgaagcgctggatatttaccagataattgaactcaccaaaggctccttggaaaaacgaagccagcctggaccatagcactgcctggaggctctgtatttgctcccgtggagcttcatcggggtggtgcaggctcccaaactcaggctttcagctgtgctttttgcaaaagggcttgcctaaggccagccatttttcagtagcaggacctgccaagaagattccttctaactgaaggtgcagttgaattcagtgggttcagaaccaagatgccaacatcggtgtggactacaggacaaggggcattgttgcttgttgggtaaaaatgaagcagaagccccaaagttcacattaactcaggcatttcatttattttttccttttcttcttggctggttctttgttctgtcccccatgctctgatgcagtgccctagaaggggaaagaattaatgctctaacgtgataaacctgctccaaggcagtggaaataaaaagaaggaaaaaaaagactctatcttctcatcaaagcctttgttagtcatgctttccccactttcccactcacaggaggtaattatgttgttgaagaagaggaaggagtcctccaaagtgtagagtaataagacagtggcacctccttttaggacttttgctatactgaggatacttatgggacaaaatgacaagagaagaagccattgacatcaaaatgctacatgactctcctgagtgcagctgccaagtgggtaaagagagtggatggggccaggtacattagagcctggagtgtgatcatctgaagaatgcatgttcaaaattctgaaatccag

SEQ ID NO: 81198 - DNA, 1198 bp, Homo sapiens
ctcttcttcaacaacataattacctcctgtgagtgggaaagtggggaaagcatgactaacaaaggctttgatgagaagatagagtcttttttttccttctttttatttccactgccttggagcaggtttatcacgttagagcattaattctttccccttctagggcactgcatcagagcatgggggacagaacaaagaaccagccaagaagaaaaggaaaaaataaatgaaatgcctgagttaatgtgaactttggggcttctgcttcatttttacccaacaagcaacaatgccccttgtcctgtagtccacaccgatgttggcatcttggttctgaacccactgaattcaactgcaccttcagttagaaggaatcttcttggcaggtcctgctactgaaaaatggctggccttaggcaagcccttttgcaaaaagcacagctgaaagcctgagtttgggagcctgcaccaccccgatgaagctccacgggagcaaatacagagcctccaggcagtgctatggtccaggctggcttcgtttttccaaggagcctttggtgagttcaattatctggtaaatatccagcgcttcacctgaaagatagtgcaaattggttaggatgccacctcaagaactgtaactgagagctcagaagtgagcaaaggagcttaatgctaaggtcaaaaggagagtgaaaggttgagaacaattgccacgaacggtaatgttacatgttaggagggtctgttttctttttatataagtgtgtcttagatatattttaaatagaaaataagctttctgatttacttgtttggtatttaaagcacagtttgtttttctgtcacctatagagtgcaagaatgcactctatagaataaattatctttaaacatttcttctgtggttgaagtaggggacaggtacaggtagaatatttgaagctctgctgccttcatttctgaaacatcatatcacattcactctggacacagggcaccttataaactgaaattagcctagaatatagcctgagtcaagagtggattctctggggccccaagtttcctgttctccaagacccactttctagtccacctcagatcctatgtgtaatgaggaacaaatgtgttgtgctcaccctggggaatcccgtatctcctttccatcccagttgggttggaaggggttttacaa

SEQ ID NO: 81199 - DNA, 1254 bp, Homo sapiens
aaaagcctttaggggactggcatgatgtcagtgtttttaaaagttgaagtgatatgtgaacattccttgccaaggcactagcgtggcacaggaagcactcccgtggaatgatggtgataacactgcccccaggtatcggctgtcggatgagggcgagtggctggtgagggagttgaacctcccagtggacaggactgagggtggctggatttccctgcaggatctgcgcaaggtccagagagaaactgcaaggaagtaagaaccttctttgtgttaaggatggagggaggggtctgggcttgccccagaagagcttggatgctttgttttttagctttgagatgctgaaagacaaagtctgccctctgtttctggtcccttaggtcacagtggaagaagtgggaggtggttgctgaacgggcatggaaggggggcacagagtcagaaatgttcaataagcttgagagcattgctacgtctgacataccacgtaccccggtgctgggctgctgcatcagccgagccctggagccctcggctgtccaggaagaggtatcttgctacctttggagcatgggcagaggggccccagggagggcagggcagagctccctgtggaccttaccaatgtttgtaggtagggccagagtgaagcttctcttggggcttctaccctggagttaattggtatgtagcatagcccctttcacctctgcccaccttcccttcccagtttatgaccagccgtgtgaattgggtggtacagagctctgctgttgactacttacacctcatgcttgtggccatgaagtggctgtttgaagagtttgccatagatgggcgcttctgcatcagcatccatgacgaggttcgctacctggtgcgggaggaggaccgctaccgcgctgccctggccttgcagatcaccaacctcttgaccaggtatgcggggcccatggcctctagcctggccatgtgctcctatgtggggctttgggtgagcgttccttgggccagactggtcagttttgacttttcatccccctagaagtgaatgtttcagcttatttatttatttctaatttttaaaaagttgtagaagtcctaaaaagactagcctcaattcgtaaaaaaagagttattgggtttgaaaatgtgaaataccaagactgatcattgagggaagcagtgaggttaggggaattgttccgaagggtggtactcacgcttttctatttggaaaatcaaatgaca

SEQ ID NO: 81200 - DNA, 1048 bp, Homo sapiens
aaggactggtgtttctctagaggggtggggagggcagatctgctccctcctctggtcagttaccctggatgaaatggagcttgggaaggagccctgccctgggtcagggtatgcttttgtgtcctggcttctgactagtccagtgggactgacttagtgtctttgcttttgaaatattcttctagaggattccatgggggtcctggctaaagcatcccagaggaggggatggcggctgtaggctggggtcaccagaaagccccagggctttggagggtgggtggggacattgtgagagagagaaccttccccccaacaactgcccttaccatcgtgacactgctgtcttcctgctgggacgtagatggtaccggaagctctgcccccggctagacgaccctgcatggaccccgggccccagcctcctcagcctgcagatgcgggtcacacctaaactcatggcacttacctgggatggcttccctctgcactactcagagcgtcatggctggggctacttggtgcctgggcggcgggacaacctggccaagctgccgacaggtaccaccctggagtcagctggggtggtctgcccctacaggtaaggcttaggcccaggggaggaaggggctggagcctagggaccccttcccctggctggtcagctcaggctagtggaaagagtttgggttcaagagtctgggttcagaagaagggaaaacaggaaaaaaattaacacacacacacacaccctctctctctctctttctctctctctcactcactcactcactctctctctcactcactcactctctcactcactctctcactcactcactctctcactcactctctcactcactcactctctcactctctcactcactcactcactcactcactctctcactcactctctcactcactcactcactctctctcactctctcactcactcactctctcactcactcactcactcactcactctctcactcactcactcactctctgggttcaggttttttcttccatggctaccctt

SEQ ID NO: 81201 - DNA, 1050 bp, Homo sapiens
gtccagggcccagatggacaccactgaacagaagggctccattctttcagcctagaaaagctaaggtccccaacctgagatagaaccagcgccacctgattacagtgggcccgggtaccaggaacacactgacccccagagattcccacatgggctccccctcacctctccaagaagagcggtagctgctgctggaaaacctcatgggtggcccacacgtcctgggcacagtactgcatcaggtcctggcacaaggtgacaggaaggcgcaaggtgggcagccatcccattaccaccaccagctctcagggtcaggcctggcagctgcatctccccaagtgcagctaggggtgtgccacagcccatgtccccagagccccctccagcaccatacctggaagttctcacgaatgtccttcatggtgcccttcacaaacagttctcgaggctccttctctaagggaggcccccctacataaagtctgtgcacctctgccagactgttgacactgctgatgtccagccagtcccaggatgagatctggggaaccagagcaagggacatggcagatcagcctggcctcgggccagacgggctggtgagagggggtcccaagcactatgctcctgcccaccggcagtgtgctctcaccgctgggcctcttctggctttcctctgggacttctggccttgctttgtggggggctggaccttgtgtttgccctgcttggctgctatccacagactgcgctggaagctgcttagccctgagatggccatgtgcatgctcatggtgtccaggaaacgcatgcgggaaccctgaggaggaggaggagaaaagggaagggaaggagggaggctgcaactgtggggccagcccaccactgcttggtggtgtggacctccagccccacctcagctcctcaaacagcctcccctcccagcacacagccttcaacaccaaatacagaatcctcatgcttgttcatgcttgccccatcacctgtaaggggcctgccttcccaaatcctagccaccctttaagatgc

SEQ ID NO: 81202 - DNA, 1029 bp, Homo sapiens
ttaattattttgggcggtagaaagctcccttttgtgggactgtcccaggcagtataggacatttagcatccccagcctttcccataaacgccagaccaacacccccccgcccccctgcccccgccggcaacgtttccagacgcccccttgaggtggcatctggttgaccacccctagttgagaaacattgcttccttcccccagccttccaagcaggcattttggtcccaaacaagtatatccaatctctcttttctttttaaataactttctaagtgctacccaagtttctttttcaaacaatgatggcagtactgtttctcccctttttttattcttcattccaggattaaaatactatttacaaccttaatgctttcaggcatggccagcaaaaaagttggcagtttctttattcctattggaagctacatctttgtaaagaaagctgcgaaatgttaaatatgcagttgaaaatggtgaaaacatggctaaatagataaggtaggcattaatggctgaaaagagcaaaactagatgattctgcattgattgagttccagttacaatgagaatcacactacttagaatatgtaacttgatggtcaaagtaaaggggaatatcggccatcatttgaaaagataaagtaggctttggtggctgaaagaaaattaggaaaccagtgacaagaaagatttgttttttgatctgtcggtcattttaggccaaattacctcaagtccccttttcttttctctttctccttctttctctctttttacctctcctttccctccctgtccttccctgctctgccctcattctcattccattcttgccagtggtactcggggcattgcttagttgacctgatggcagaagtcactgttaaggcctgggctcatgctgggaccttcctcctgggagtctgactggtgggtgggggtgggtgccacatggtgccctaatagcggtccactttgaacctgggcatgcccctgccccttagctgagtaacattaggtacc

SEQ ID NO: 81203 - DNA, 1040 bp, Homo sapiens
gggcctggggtcgggggagcagcagaccgggaagcaccgtgaggaccgaggtttccggcggggtcggcggcggggaggccgggtcgctgagcgacggcgcggcccctccctctccagtcagggagcgaggcccggagcagggcggcggctagtcccagggcgcaccgcggcgcctctgccgggcgcaggcgggcggcggggcgcacgggggtggccgccgactcctcctgcaggacgctctcggccgggtgggccgtggtccgggtgtgggtgtgggtcccgggggacggcggcccaccctgcgggttcgaatccgggcgctggcacctctcgacgctaggcccgcgccggtcgcggtaatggcagccaccatttgccgagcgcttgccaagagcagggccgcacgacataggcgccctgtgtcccccagacagcagcccggtgtgacaggcagaatccgtaatcccattttacagaataggatatcagggcctaaggagctttgcccaaggtcacacagctcgagagagccagaagcggggttcaaaaccgcgtcgccctactccagatactgctctcttactcgctgccctcggcttccccacgtgggttcactgacgaagttgcgtggaccccggttcccccaggaggggtattgacgtttcccaagttttgaggcttaacggaaaatgcaactgaagcgcctggcacagtgttggggacgcagtaaatgctcaaggaatgatgattatggatacacctattacatatatggtaaaataacgctttatatcatctgtctcctttaggatttggggtggaaggcaggcatggtcaaacccatttcactgacaggagagcagagacaggacgtgtctctctccacgtcttccagccagtaaaagaagccaagctggagcccaaagccaggtgttctgactcccagcgtgggggtccctgcaccaaccatgagccgcctgctctggaggaaggtggccggcgccaccgtcgggccagggccggttccagctccggggcgc

SEQ ID NO: 81204 - DNA, 1013 bp, Homo sapiens
tgggtagttcctacagggatacatggtagaaaattcaccaaacccagtgctggagtgtatttacaccccataggagccaggtggccctgagcatagattgtacaaatagaggtccttagcaagactggcatctaatgcagaggtctcccagagcctccctcttgtgtcttcctgttggtctttgttccttagccttgtaatgtcaagtatattcatttctgctcatttctgggttgtctgtttcaaaataggtttatgttgcagtctccctgaatttgattgatcataaaattatctatttcataggccatgactatgtatttggaaactgaagggaaaggctgatgggcacagctggggcttccctttctatccttgtgtgcttttcttagatacttggaccacattctcatcctcttctgaaaatggggagaagttgctgttgtcaagagctgtgctgtcctttatgataaccactagacacacatgctattgatctcatgaaatgtggtcagtgtggcatgttgaaatgataatgttgggttaagtacaatatattgttaaaatgacctgttcattcttactttttaatgaggcttctgaaacatttaaaattatacttggaactgacatattttcactggacagtgaggtctacactagatgctcaagacctcctccatccccagtgcttagtaactaatcctgatctccccccaggaggcctctggccacacagggttctgtgcatagaggtccatggaaaagctagagaggaggcaagtagagagcctcgggccttaaggggcttttaggagtgcctagttcagccctttaaatggggattaccccccagtccttggaggcagaagtcgtggcttgaatctgcaggcaacattgtatttttcagcatttaaggtggggacaaggcagccaatgggtaaaccccagaagagtctttggatgaaggtttagcactgccccagtggagtttgaatgggcacagctgtaga

SEQ ID NO: 81205 - DNA, 1126 bp, Homo sapiens
aaccatttactgagcactgactctgccaggttctgtgctaatgctttgtatattgtatctcttttgagggccatctcttggggagaaaaaagaacagtaaatctgaccagggatttgcccttcttttctaagccaaatgccatttgggtgactgcatggggtgtgttacaggagctacaaaccttgcataggagggactatcagcccccagtgagtccttgtctcccagagaatcagcctgggctttgggaagcagcatgagttcatttgcgttgccaaaggatgcctctgcagtgtttcctgcttgaggctggcagtacacctggagaatcaagatgggagggctccatgctgggcccctgggagccttggtgcggtgctagaggggtgagcagcataccacccggtctggattcatctcctaattgtgtgccccatatccttgctgtgcctcagtctgtaaaattagggggttggcccaagcctaccagcctgcccacagtgccaagggattgtggctgctcgggatgatgctggccttttactttctgcaatgttatatccccctgatgtagcacgtatgatcttctggaggagggaagggggcccacatcctctgtcccatctcatcttgtccttaagcagagaatatcaagccttcctcctatctgcccagttctgcaccatagctcctgctgtctccttaggttaggagaggtggcacatgcctctgaaggcatgttacatccttgatgagtgctgggggaaaagggagtaaagaaacaagtctcaagtttatagccaccccttccctttgaatctgtagcttttacccagtattgagtccactgttctctcttctactgtgggtcacagactccaagaccatggtggtgtgaggcagaggcagtgtggcccagtgggtatccaggtggaggggttggtctgacctaattcagaacccacaggacaccccttcccctcttcctctgagccagttttcccatctgcaaaattgggaatagtaatacttaccttgtgacactcaagatgcatcccccatcttgctggtctgtcacgagtaaaggccaggtaaggtggccagcaagggaccagggtcagtcag

SEQ ID NO: 81206 - DNA, 1040 bp, Homo sapiens
ttcacagaattttttttttaacagcaggaaggatgactgtagcctgtggattgtactgcagtaggaaactgtcctagcaaggctccactttgccccagcttcaaggtatatcgtctcaaaatgcaggggacttcagatgagttttgagcaccctttcttttattataaaaaaaattccagacagttcagccaatactgactaagggctgagaccagttccatgcttttctgtctccagaggaatttgcttccatctggatgcctgaaacggtattttacttcacctcctgtgtcaccggcagcagtcctgggagccctggggaggaggtttttgggagagccagctcacagcctctccatcaccttttagccaccccagtgctgggcagccagggtgtgggcttttgactgaatgcacttgccctcctgcattcattacaccattgtcagtgtgtgtgtctggggctgcctctgggtgtgcatggttttttttgtgtctgcgtgtcagtgtcaggctatgtgtgtctgtttctgtcggcctgtctaggcgcgctcagtgcaacaaggagctgggggaggtggcggtaaagaggaagggcatttcaaagcccagctgtcctcctcagggacctcaggagatgcgtgtgtgtgtgtgtgtgtgtgtgtgtgtgtgtgtgtgtgtatttttttccatgctgctcattgtgtggggctgcatgcgagtgtctgaccaggtgtggtgtgagcagccgctgggctgggtgagccccatctgccgtgagctcccagacttgccttctagccctctgccgccatccatggggagcctctcccttcgcagctcaccgtctcttctctaatttattagctggaaaggaggagaacatgaaacattgcttgaagacaatggccgagacagcaggtcccaccctgcacagccaccagcatctctcccctcagccctgtctcctcttctgcagttgggatctgcacatttaagcctgaagtaagaataaaacaaacccccaaaccaccctatt

SEQ ID NO: 81207 - DNA, 1073 bp, Homo sapiens
atcctccctgctggccttcctgctccctccttccatccagtaccaccccagctccctccttcctgcaggaaggcccccctgtctcttccctggacatagatcctcttcatgggtaaggtaaaggaaagatcccaataacaaggccctggttaccagcagaagaggtgtgtgcagagtgagagataaggatctggaggcagaaactgcatctggttggaggaaacaggaagacttcctgaaagaggaggcagtaaaaggaggttctggaaaagcaggtagaagctacagggcagggaaggaccccaaatatggggcatgttcaacaatagcaaccagaccacatggtgccctgagcccaagctgtctgcaagcagcgggggcctgagatgggctgcatgggaggtgggcatctggtgtgtgctgctgtactagtcctgtctcgtgtggtttcttttcattcttggagtagctctaaatgttaggtgcccattagtgtagatgatgaaactgaagctcagaaaggttaagccacaagcccaaatccatatatgaccaaagtccagggcctccagtgccactttttgctattgccccagcttctccactggcctgtctccccacagcctcatcaacgctgacttctgcgtggcctctgtctgcgtggcctttggggcagttctgggtaaagtcagccccattcagctgctcatcatgactttcttccaagtgaccctcttcgctgtgaatgagttcattctccttaacctgctaaaggtgagcagggctcagaatggggatgaggtggtgggggtgctttgggggacagcagggtatggagaaatagacagctggggagacatgccagcctggcgagtcacttaacttcctgaacgtcactcagttttctcatctctaaagtgggagtaataatatctaccaggcaggtactacagtccacctagcccatcaatccagcacgtggacagagcagggcttccttgaatgttgtttttttccccctcctttctttcccacacatcacatggaatgaataggatatccctgcacatact

SEQ ID NO: 81208 - DNA, 1388 bp, Homo sapiens
caagcagccaataggagcaaaccttggaaactagctcccccaatagcagcagttcctggagagcgcgggagcctttcgaccagggtcccaaaggaaagcagtgagtggtgctgtttccctgaaggaagggactaagggacggtggcgcgggcccggaccggggccccggggcggcggcacggccgatatggcatgctgtcacaaagtaatgctgctgctggacaccgcgggcggcgccgcccgccacagccgggtccggcgggccgccctgcgcctcctcacctatctgagttgccgattcggcctggccagggtccactgggccttcaagttctttgactcgcagggggcgcggagccggccgtcccgcgtgtctgacttccgcgagctggggtcccgctcgtgggaggactttgaggaggagctggaggccaggctcgaggatcgcgcccacctgcccggcccggcgcccagggccacccacacgcacggcgccctgatggagacgctgctagactaccagtgggaccggcccgagatcacgtcgcccacgaagccgatcctgcggagcagcgggaggagactgctggacgtggagagcgaggccaaggaggccgaggccgcgctcgggggcttggtgaacgccgtcttcctcctggccccctgtccgcactcgcagagggagctgctgcagttcgtgtctgggtgcgaggcccaggcccagcgcctgccgcccacccctaagcaggtgatggagaagttgttgcccaagagagtccgggaagtcatggtcgcccgaaaaatcaccttctactgggtggataccaccgaatggtctaaggtaaggaaggttactgtcgtctcagatggcgtgcacggtgctttccttgctaaccagaacttggcagcgtccttagaacagccacagaccccgaatgagactaatatgactatgcgtcccttcggaaggaaacaaataaataggaacagttttcacaacaaaatgggtagttcctcactacctactgtttaagacccctcacaatttgggccctacctgccttcccagacttgattttcctacacactacatctactctagcatattgaagtccagtccagaaaatcaacaggtctggactgcttgttttgtgttatgtgtgttgttcaatctgcctggaatgccagttctcactcttccaggccagtcttaacttcacttaccctttaaggcttcttctcccagtgacaactgctcagtccagcgtctgaattgccatacacattttgtgtggcacttaaccatttctccatatgttttgattatgcacatctctcaccctccatctagtctaaaaatacctcagaggcaagcagcaggttttaac

SEQ ID NO: 81209 - DNA, 1227 bp, Homo sapiens
gctgaggcaagagaatcgcttgaacctgagaggtggaggttcctgtgagccgagatcatgccactgccctccagcctgggtgacagatcaagactctgactcaaaaaaaaaaaaaaaaaggttatttttattaatgtataatggttctatgttccttctaacattttatgatctatacccagtgatttgtgtcacttctttctgttccttgacaaaaaatataaatgaggtactatttttactaaatgaatgctttctcaaagggatataaggtagtaatttgttctggggctgcacagtagcttgatgctgaccattatttctatttagctcagcaaatacattggttgtgtaattcgatcctttaatattggtatcaactttactttctcctgatttcctttacttttatttgtgaatgcctaatttatagtaacctaaggttgtttgtcgttttattttagttgtgggaatccccagaccaccttggatactggactgtttgtgaactgctccaccacggaggtggcactgtcttgccatctgaatctttcagctgggattttgctcaagctggggaaatgctgctcaggagtggaataaagctgtcaagtgaacctcatctttctccgtggatttcaatgctgccaactgatgccactttaaaccgtttgctctacaattctcctgagtatgaggcctcgtttccacgaatggaaggaatgttatttctccctgttgaaggtaagcaaataatattttaaggtttttttttttttaaatctcagttacattaatttcttcaaagaagcttttaacttctttggcatttctcacagcccaggcactcaacgaatgcttgtcatgaaagaattaaaagacatcaaggcaaaatcagagatactgtaggaaagagttgaactcttaattcagtacaactgccagcctttgtacaaaaaaacaagtgaatgattgattttaaagtttaccagctgttcccaaagaagggtaatattattcaggtgcccaagcacatgggtatacgatttcattgcctcatagagtagattgataaattgaagaccatagagaaacaatggtcgactaaaagaagaaataaattagtctacagaaacccagaatgatgcttgttaccaggaaaagcaaacatgttggaatcttcattacattagtttcaccatatgatttgctatatggtaaatctca

SEQ ID NO: 81210 - DNA, 1019 bp, Homo sapiens
acttggcagtagaataagtgttgaagtgttcaactaagtgacagtatctcaattgacaacttgattattttcttattgttattaaatctctttttagtatctattccttatattggaattttaatctttttttaaaattttaatttggcatcctggtctaattaatctttatttctagcaggcaaagagattcaagaaacatggacagtcaccctagagcccttggccatgcatcagagacattttcagaaaccagtcagaatttttctaaaaggctcagtggcccagtggtctctcccaacgagcagcactttgggcactgacagctggatgctaggaagtccagaggagagcacagcaactcaaaggctgttatttcagcagttggtaagcaggctgactgctgaagagttacacctggtaggtatcctccacacgggaagttattcttgtctaacaacacactggtaaagtgaaataagtgtgtttataaatgccctacacaatatagtcttagtaaaactgattatgcttttgcaaataatattgttgacattatagtatcatgacagcaatgcttattagagaagaaatcacttataaaattgcatgtaccaagaatccaattaagttaaattatattcacatagggaagaaggcagttggccagatgaagtgcttatgttagggtagtaatgtgatgagtgatttctcattgttttttaaatattctgttacatatttactacttttatataagtatttaagaaaaagctgctacacagtaaaattagatgtaatagtataatagttgtgtaactatatacaatgtaatataattgtctgtgtaactcagcagttggacagtagttacacaaatgtagaaatgtcttctgaaaaggaacatatacatacccagatttgatttaacggtgagaattatttttaaactaccagcaaattccttaccttactttgtcttttgccttcatactctcaggaggggtctctattctggt

SEQ ID NO: 81211 - DNA, 1095 bp, Homo sapiens
gctttaacaggttacttctgcctcagcctcaatccctcctttataaaatggggataataattatttttacctcagggcgattgtgaggattcagtaagcacatagtaaatacctagtaaatattcctggtaatgtcaggttttacttatttgtaagtagaaatatgaggactctgtgattaataaattcccttctacctctattaatgatcaaatctatctttttcatagttttcacgttaataataattgggaaaatggttattctgtcttttagtacactacattcttctttaggcatattgacaataatattctcaactaattagggcttctcacgtaggttgctgatgtggaccctggtgaaggccggccccccatcactggagttatttccccactctctgccagtgctatgatcctcactgtgtgccgcaccaaggaggctgaatttcaacgacatgttctccaaacagctgtggctgacagcccccgggacacagcttcccttttctcagatgttgtggatagtatattgaatcagactcatgattcgcttgcagatactgcttctgctggtaagctcctaaactagtaactaacagagtctagggtggtttgcagtcttttcaagcatcgggactttttcactgtgcagttagtagaaccccaatatgttataacacagatgaaagaaagctataatacttcaggcagtttaaatcattattatttatagaattccttaagtacttctgaggaggctgcaggttccatgaaaccagtctgaaatcgaagtcatggtttttaatatatttaagaaatactgcatataaaactgtagtgattctgtctaccctgcattgcattgttactactagcattgcaactaaatgcattgttactactaaatctacctagcataaataaggtttgtatcatgttagtattacaaaccttatgtaagctaggtagatttaaatatacgtatacatatatatatatataaaatcaacttgatatttctttaattcattcattcattcaacagatttgagtacctgctgtatggcaggcactgtttgaagtactggga

SEQ ID NO: 81212 - DNA, 1004 bp, Homo sapiens
tttcttaacagaccacattctctgagtatagtctaataatattaaaaagtagttacaaaaataaaatactctcatacttaatatatattgtgagagtatgttagctagataatatgttaacaatatataaatatatacctgccaaaaattctttaaaatttaccaaagtaattcgtcaagttaaatataaataaatactcccttaaagtgagaaaatatttataactaagtatcaatgcaaatagaaaacagcaaacttgaataatgcagctgaatttatacttaaagaagtatttgcagaccgtttttgtaaggaaaaaagttaacaaccgattactaagaatccaacatgagaagtaaataagaaagtaacctccaccctacaaaagataacaacagaaataaatagaaaacaaataaatgtaagtgatcaagagaaacaaaagatggttctttgaaaagccaaataaaataatctatagcaagatcaagcaattaaaagacgaacaatattagaaatgtaaacgatatggcagaaattcaaactattattaagaggtatggttgacgtttattttctccacacatatatccattcagttgttccaacaccatttgctaaaagactatcttttcccactaataactgtggtaccttgtcaaaaatcaactggccacctttgtgcagattgatttctagacagaatacagtccagaaactatgttaataccacattatcttcaatattgcattatagcaataccatatactgtagctttatagcaccagtcactaaatcaggtagtgtaagtcctctaaactttggtttcgtttttttaaaatttttttggttattttagatacttcgcattttcatataaacttcagaaccagcttgtcagtttccacgcacacaaacatctgttgaaactctaggagtgcattgaatcatagataaatttgggaagaactgacatcttaacaatgttgagtcatccgatcc

SEQ ID NO: 81213 - DNA, 1480 bp, Homo sapiens
tcctgcctgccctacttcctcctcttctcatcaatcccaaattagtttattacaatgtgaaagaattattcgaagtcattgcaatacttactacaatgtgttaacatcattttgtactttgatatatggaaactgagtaaaaaataactatggaagcttgaagtgaaatagttgccataattagacttgcatcctaattcatgaagaatcctattaataaaagtcaatattatatgtaatggttaatggttttgtgaacaagacagctttggttcctgcattcgttcaaatcgaaaatgagaggagggacattttctctcctaagaaaatatatttttgaaggcatcttgtggggacatctttttggttagctttttagaggatagtgggtattttggtgttatttctaaagcattttgcaaaattagaatgttggttttattctagacatcttgacttcacaggttactacaggctgcctcagctaataaggaagagtcttccaaaactgaaggcgaattaatacattgccttgccgagctctaccagagaaaatctcgtgaagaatccactatagctcatcaagaagacagcaaaaagaaacgtatgtacctagaaaggctgtttcttaaggcattcttttttgagactgtatgttttaaaagatgggcatttcctgaaatgaggttgaaatggtaactaaataaagaagggcaaatttttatatttaaattttaaaataattacattagttcaatagtgatttttaaaaaatcaaccagtcttatctgtctaatgaataagccatcttcatttttaattatgatagaaattcaaatacaactttgtgttctgcttattagtattttttcttttgctaccttgcctttttagatattattccatctcattgcttaactaaatttacaaaattctcatgttgttgaacatttagattgctttcagttttcatcattataaataatactgtagtatacattatgcgtataatttgttttttaagtaattaccttagcagaagtttccaggaaccagttactgtgtcagggtatgaaaactggctctttatgtagattgctaaattgtcattcagaaattttcatcaccatttttcgtggccattgggtaacaccaaaataagtctgtttggcatttgccttatgggaaaaccatccattgagatgtttagttccaatccaatcacattgagatgtttagttcctaaacttcggttaaaagaaaggttctctttctaccctgtgtgtgggcagaaagagatgcaagaacttcctaattcaaatcattctggagggatatgcttcattttgatattctttcacagtaatctgaattaaagtagttcttctttccacagaagtggaaggcaatttactttccctcctctgatgttgttttggtaggaggggtccctcgtactccagtgagacagaagatgaat

SEQ ID NO: 81214 - DNA, 1077 bp, Homo sapiens
gcatccctggctcctacatactagatggccagcagccacccccgcccccaccaccatcagtcatgacaatccagacaaggccaaatgttccctgcaaggaaatattttccccagtggacaacaactggcctaagtaatacaaggacttgagcaagatatgattaatccattttattttatttttttctcagattttaaaactgaggaagagctgctatcatatatacgtgaaaattaccaaaagactgtggccacaggagaaatcatgttgtatgcatgtgctcgaaacatgatctcaaccgttaaaatgttcctaaaatcaaaaggcaccaaggaattagaagtaagagggtccagatattgttgtttgtcatggatgtagtggttggttggttggttggtggtggatttggttagtgtcttggaaaatgtctgttatgtcatatgtgattcaaaaatggtaagataagtaagggagtaagtacagttccagatctcagaaggtggatatggtgaactggtaaggcagaaatcaaagagatggggtgagcggggataattacatataattctctcctaatgaaaagcctttcctcatgtgagctatatgttagctgcatgattaagccagtggtttttaaccctggctatactttagaatcacttacagcatttaaaaaatatatatatgccaactaaccgtggtggctcacgcctgtaataccagcactttgggaggccagggtgggtggatcacgaggtcaggagtttgagaccagcctggccaacatggtgaaaccccgtctctactaaaaatacaaaaatcagctggatgtggtggtaggtgcctgtaatcccagctactcgggaggctgaggcaggagaatcgttttaacctgggaggtggaggttgcagtgaggcaagatcgtaccattgcacttcagcctgggcaacggagcgagactccatctccaaagaatatatatatatgccttgctctctccagatgaactgaaacagatctctggggttggcgcttttaaaaagccccctggataatccttttgcactgggag

SEQ ID NO: 81215 - DNA, 1454 bp, Homo sapiens
aatttgaggccatcctgggcaatatagtgagaccgtgtctaccaaaaaattttttttaattaggtgagcatggtggtgtacacctgtagccctagctacttgggatgctgaagctggaggattgtttgagcccaggagctcaagactactgtgagctatgatcccagtactgcactctagcctgggcaacagagcaagaccctgtctcaggaaaaaaaaaaaaaaaaaaaaaaagattaccaactgcatgaagatgcttttgtagccaattcttttttatgttataatatgcagcttgaatcacctatttatctaataactacatcagtttttagaaaaggcactggctctcctcctttttggttgttgtgtcttatataaatagatctatgcttacggaaggagctttttgtttagtgacatccaaagtagatatgaccaagtatttttttctctcaaggtgccagcttcaggtatttcttcgtttggagatgtgtctgcaatgcccttcaataaatgaaagtacagatgatatggaacaagtagtggaggaggcaagtatatagtttcgtgccattgaaatacgccctagatgctttcagcttccctgcagagggcatctatatagtaacgttctaaaatctccttcaggtgacagatttgctgcgcatggtgtgtttaactgaggattcagcgtacctagcagagtttctggaggaaattttgagattgtaagtttgatggttactaacttaactttaaaattgttttgtcaaaacctatgtatggtgttgtctctgaattttggagttgtaaggactactttttaggctgggtgagggagggaatagagagggtaagatggtaactgttccgtattcgatcaatctgttccacaggtatattgactctatcccaaagacacttggaaatctttacaacagcctagggtttgtgattcctcagaagctggctggtgtccttcctacagattttttcagtgatgactccatgacacaagagaacaaatcaccacttctttctgtgccttttttgtcaagtgctcgtagatcagtgtcaggcagccctgaatctgatgaactgcaggaacttcgtaccagatcagccaagaagagaaggtaagaggtcaaagaatcaaaggaattatttgcactgttatagttctgataaaagatgtgtttaaactacagtccagtcatctttgtccatataatttgttgaactaatagctgcccttatgtctgaatcagagaagccaactattagagctcctaataggagcatctgacaatctttatattatctaggaaatatatagtcatgttttgcttaacaacagggatacatcctgagaaatgcattgttaggcaatttttgttgtactaacatcagagtgtgcctaccaaaacctagatagtatatattttttcatt

SEQ ID NO: 81216 - DNA, 1369 bp, Homo sapiens
tactttctactttatttgtgaaggacatagaatttttggttgacaatttttttttcccccttcaggacttcaaatgtgacatccactgccttctggtctcccaaatttctgatgagaaatcaactattaatcttattaagctgcttctctattgctgctttccagattctctctttgtccttgggtttcaacactttgactacaacgtgtctcagtgtgaatctcttagagtttattcagcttggagttcgtggaacttcttggatgtatatgttcatgtctttcatcagatttttggaaggttttaaccattatttcttcaaaaaattttctgccacttttggtctcatttcctccttagactcccatgatatatgtgttggtacacttgatggtgtcctacaggtccctcagactttgttcattttttttttaattattttttctttctgctcaggctggataatttcaattaccttatcttcacgttcactgattcttctgccagctcaaatctgtggttgacccttctagttagttttttcatttcagctccagaatttctactggattcttttttatcatttctattgctttattgatattctcattttgttcatatattattttcctgatttccattagtttcttatatatggtttaagtgagctcattgtgcatatttagagaagttgatttaacatctttgactagtaattccaatgtcttggcttccttagtgacggtttttgccaaatttctcttttctggtaaataggccatactttcttgtttctttgtatacttcgtagttttttgttgaggactagttattagggatattataatgtggtaactgcatggaggtcagatcctgtcacccctcagggattcctgttctttgcttattaaggatctcagctattcatttgtgccttttctgaactatttgtgtaaagtatgtataccttgttgtgtgtggtcactgaagtttctgtctattatctctgtggtcagccaatgacctaagaaggatttccttaaatgtctgattcaagaaacgaggagggggaaggtgtgtctgtcccttaaacttctgataattgggagaaacccactgtagcctaagagagctgaaaccaaggcagtgtctgcactgctcctacaggaatctgcctggttgaccaaagcatgcaacccccaatttttggaggacgaggtcttcactgtctgccctagcaccagccagctgctcctggaatgtgggctgctatcccaatagctacagcagggatgagaaaagggaaatggtagccagttcatgcacatcattcccttcctaaagatcatcagtctctcccatcatcaa

SEQ ID NO: 81217 - DNA, 1315 bp, Homo sapiens
ctctgtcgcccaggctggagtgcactggcatgctctccgctcactgcaacctccacctcccaggttcaagcgattctcctgccacagcctcccaagtagctggggttataggcacccaccaccatacctggctaatttttgtatttttagtagagacagggtttcaccttgttggtcaggctggctacaccattcttaaggtggcagtaaataagacttctgaaggtaatagtctagtgggtcagtgtttttttaataccttgttgggaccatgtatcaaacccctcttagtttgttaagagacacttcagaagtctcttaaagctaatagcttgctgaatttccatcttatatgtggtactatgtaaattttgcccggttttggacaacatgagaaaatgtcaagcttgtagttgtctttggttacttactgtggttctgattttacagaaataagtctgagacgaagtcctcgaatcaagcagttgtcatttagcaggacacattctgcctccttctattctgtgtctcagccgaagtctcgaagtgtgcaaagagtccactctttccagcaagataagtcaggtaacatacgggcccctctgccttcacaagtccgtgctgacttggtgagaagtgtttttgggaaaagaagcaagaaatttgacattttctttcttgacattggagaagtagaataggtatgtctagttgaggttcagggtgatggctagatggacagtccatgactttgtaatcagtcatccctaggactcctacaactggtcatccatgctatcattataggtagctcattcattcaagaggaagctacccataatttcccataaggacagaacctacacatcattatcttaggtggaaggtgatatctgtgtttacgttcttcattcttctatccatggttagcttgctaatagatttgtgtttcttattttatctttttttgagacaaggtctcactctgtcacccaggctggagtgcagtggcacgaacacagctcactgtagcctcaacctcccaggctcaggtgatcctcccaccttagcctcccagggaggtgggactacaggcatgcaccaccacgcccagctgattttttgtttttagtaaagactgggtttcaccatgttgcccaggctggtcttgaactgctgggctcaagtgatccatctgcctcggcctcccaaagtgctgggattacaagtgtgagccaccacacccagccagatatgtgtttttatatttacaaattaaagtagttcagttgtctacattttctaacataggagc

SEQ ID NO: 81218 - DNA, 2931 bp, Homo sapiens
tgttgaatgagggtgagcagcagatgaggtggctcctggaggctgctttaggcaaagatcagaaatagctgccttatctgaaaagaaggaagagctagagagtagctgcagtggtagaatgattccattagaggcaaaaagcatggtttagcaatatgtagattattaaaattatttgttctaggacaaactaaacttggatagtgtttggtcctagaaaaagtagacaagtaaaatctgagtcatgttttggagagggaaacgggtcactatttgagatttccatctttagatcattcctttggctgactataaatctcccatttggtcttagagattactaaaacacttcagagatcatgagttataatattcaaggactgaaataagcatttctcttttcagactcccaagaagagtcaccagaaatctctgagcttttctaaaactacaccaagaaggatctctcatacaccacaaactccgttgtatactccagaaaggctgcagaagtcccctgcaaaaatgacccctacaaagcaggcagcttttaaggagtccttaaaagactcctcctcacccggccatgactcaccattggattcaaaaatcactcctcaaaaacgacatacccaggcaggagaaggtacctctcttgaaacgaagacaccaagaactcctaagaggcaaggtactcagccgcctgggtttttgccaaactgtacttggccacattcagtgaattccagtccagaaagcccctcctgtccagcccctccaacttcatcgactgcccagcccaggagagagtgtctcactcccatcagagaccctctcagaacacctccgagagcagcagccttcatgggcacgcctcagaatcaaacacaccaacagccccatgtcctcagagctgctcgggcagaggaaccagcccagaaactaaaggataaagctatcaaaactccaaaaagaccagggaattcaactgtgacttcttccccacctgttacgccaaagaaactgtttacctctcctttatgtgatgtctccaagaagagtccatttaggaaatctaaaatagagtgtccttccccaggagaactggatcagaaagagccccagatgtcacccagcgtagctgcatctctctcctgccctgttccctcaactccccctgaactctcacagagagctacattggacaccgtccctcctccacccccttctaaagttgggaaacggtgtagaaagacctctgatcccagaaggagcatcgtggagtgtcagcctgatgcctccgctactcctggggttggcacagctgacagcccagctgcccccacagactctagagatgaccagaagggactgagcctctctcctcagtctcctcctgaaagacggggctacccaggccctggtctcaggagtgattggcatgcatcctctcctctgctcattacaagtgacacagagcatgtcactctcctcagtgaagccgaacaccatggcattggtgacttgaaaagtaacgtcttatcagtggaagagggtgaggggctaaggacagcagatgctgagaagtcttctctgtctcaccctgggattcccccatctcctccttcctgtgggcctggctctcctctgatgccttcccgtgacgtgcactgtaccacagatgggagacagtgccaggcttcggcacaactagacaacctgccagcatcagcttggcattccacagactctgccagcccacagacctatgaggttgagctggagatgcaagcttctggccttcccaaacttcgaattaagaagatagaccccagctcttcattagaggctgagcccctcagcaaggaggagagctctctgggagaagagagcttcctccctgctctcagcatgcccagggccagcaggtccttaagcaaacctgaacccacctatgtgtcacccccctgcccccgcctctcccacagcacacctggcaagagcagggggcaaacctacatctgccaggcctgtacccccacccacggcccttctagtaccccctctccatttcaaacagatggggttccttggacaccatcccccaagcacagtgggaagacaactccagacataattaaagactggcccaggaggaagagggcggtgggctgtggcgccggctcctcttccgggaggggcgaggtcggtgcagaccttcctgggagcctgtcactgcttgagtcagagggcaaggaccacggccttgaactcagcatccacaggacgcccatcttggaggattttgagctcgagggagtgtgccagctcccagaccagtcgcctcccaggaacagcatgcctaaggccgaggaagcctcttcctggggacagtttgggttgagttccaggaagagagtcctgttggccaaggaagaagctgaccgtggagccaaaaggatctgtgacctgagagaagattcagaagttagtaagagtaaagaggggtctccaagttggagtgcatggcagctaccctccacgggagacgaagaggtgtttgtttccggtgagttcgtttttgaaacccagtttcctcatggtttcttttggtcagagtgcttgacaaggaggcacttgggagttgcttcttgggaggcctgggcttcccggttgggggtctggggacgctgctcttactatgtgggatctctttaggctccaccccacctcccagctgtgccgtgcggagctgcctctctgccagtgccctccaggctctgacccagtctccgctgctgttccaggggaaaacaccttcctctcagagcaaagaccccagaggtaatgtttgttgaaggtctaggaccctttcctgtgacagactgtctgaattcaccagggttgccaggcagctcgattctagaggag

SEQ ID NO: 81219 - DNA, 1010 bp, Homo sapiens
cgccccatcagcagaacttatacacggaagaagctcatgggaacctggctggaggacttatagccacaaacattactgagcccaaaagatcaaggagtcagccaggaccctgtggacataaagaagttggatgcctggtcccaagcctcttttgccatggtcagtgttcagattgccattagaatgccttagggttttctaattccccttatggatccaatccatctcctggccctgccccttgttggggaagttgcaggaggagaggtggatggcaatgtgattggtgctataactcaggcagcctgggagtcaggaacccagacaaggaatcccattccagcctcaccccaaccatgaccttggcaagtcagggggccactctgcctcatttatgcaaatggagaaaggcgccctccctggggtcccttgagctgctgtaaggctgggctgctgcgacacaggcagcgctttgtaaactgtgaagccatatacgtgaaactgaagagtgcattgggcagtggaagctattttttgccttccctgtgtaacagtaaaatcatctctagtgactgagcactcagtacatttttgtttaatgttgggcctgaggttaactgtgaccatggtccagcttgagtggcttctggagcagccacattttcaaggactgtccaagagccagccagttcagggctcaggcctcacccattgcccactcctggggagaccatcacctggctcatcgtttccaccaagagtgccccacaggagtgccccacagacccgctggaccagcctgctgcgggtcctggccaggggtctggctaacggtgagggctgactctgaactgtctctcagtctccagaaagtgttcaagcctgttgtgttcccaaatctgattcctcctattgtcttgtaaatcaaactctaagtgaaaacttcccatttgtcccttcaaagatttttttttattaaatggttttttaagatcctaaagtctcccagt

SEQ ID NO: 81220 - DNA, 1091 bp, Homo sapiens
tctgaacttcctgaatgtagatcattcacagaggcttgcagttgagcaggccacctctgagcagtgcccccagctcaccctggggttggggctgtgacagtgagcagggggcacctctctcgatgggctgacttggcccttgggacgaggggacccttaaggcccagttgtggctacgtgttggctgttgcatgtctgcccaggacttcagcattcaggcagtgggtgctgttcctccacgcgtgcccgtctctgcaggaggagcggacgctgttccagttggatgaggccatcgaggccctggatgctgccattgagtataagaatgaggccatcacatgccgccagcgggtgcttcgggcctcagcctcgttgctgtcccagtgcgagatgaacctcatggccaagctcagctacctctcatcctcagagaccagagccctcctctgcaagtattttgacaaggtgggccagcagcccatggccccccagctcctcctcagcggcacgtgtggggaggtgtctcatggcagctgctccagcggatatcccgtttcctcccagactgggggacagaatcaggaccaactcatctgcagggccgcctgaccttaaagcctattttacttgtgaaactaagacccagtttcctacccgccccccacttctgctctgattggctaacctcagggtggtccatggccacaatagtagctctcagtaggggaagtttttgcccttttgtgacatttggccatggctggagatacttttggttgtcacagtggtgggggtggaggccagggatgttactaaacatcctataacacacaggacaggcccccacaaccaagaattatctggtcccagatgtccatagtgctgaggttggtctagatgaaatcccacaacttgacgctctgcccagctccatagtgtgtggctaggaaagggtttgtggcagagatagcagataaggtgagagccagctctgatcgttggaagataactagagcactgctgaggtgtctgaggctgagtcttggctcagcagggaagaccctggtgatttcttagtgccgtggtggcaa

SEQ ID NO: 81221 - DNA, 1033 bp, Homo sapiens
cctgccaggtgaggtccagtgaagtgaggtccagccaggacagatcttgccaggtgagctcctgccaagtaagtttctgccaggtgaggtctagcaaagtgaggtccttccaagtgataaacctgccaggtgatgtccctgccaggcgaggtctagacaggagagtttcttctaggtggtatctctgccaggtaagttccagacagaggaagctctgtcctactgggttctatcctgtgcatccccatgagctgtagggcttcaagatatttatgacacagttacagatgtatgcatagaagaacctctcttaagtgtccatcctccaattcatttcactcattaaccccctcctcagggcctgtgcaggaagaatgaggaggcgcaggtataggaaggtggtatagccaaatagaaagagacttctccgcctggcatcattactccatctagaataggaaggtcagcttctgagccacagcgttgtcttctgtcagatgggatcataatgttaccatgatggctggagggggatggccgtcattgatgcagggcctgttccagtacaggggcttgggccacacgcccagtgtcctaggcccgcagaggccaggagccttgctcctgccagcacgcatcactctgatgtccaggaggatccagggtcctactggaatgatccgtaacttccctccgccaggagagccctcacttcctcccgcatctggctcccagaaaggcctttagggcttggccaattcctatcactgtccagtccggtcatctcagtgacagatcattcctcccacccctacccattgcctgttcttgccaggagggccacgtccctctggtccttatcctcctctcgccatctctgagtgcccctctgcaaatgctctggtccctttagccccgcctcctggagtctctgtgaactaagtctggtctccctgctgagcagaacatttggagtgttggtttcttgagggaaggacgcaagtcctccttaacatccggccctttctgtccc

SEQ ID NO: 81222 - DNA, 1051 bp, Homo sapiens
accacacctggctaatttttttctttttttttttttttttaagtagagacagtgtttcaccatgttggccaggctgctcttgaactcctgacctcaggtgatccacttatcttggcctcccaaaagttctgggattgcaggcatgagccactgtgcctggcctatcctatttttttaccttcatatgatctcgcccacctagccatctgtccctcccacccttccatccgtccatccttgcagatgcccacccatccttattttctcagttcaaatgtccaagagacaatatcgtggagtggttgagagcatgggctctggagcctgactgctcaggtttgaatcccagttctaccacttactagctatgtgtcgttggtcaagtttcctaacctctctgcctcagttttctgatctgtaaaatagggataatcataattacactttttgtaggctcattaggaccatttaatatacacagagctcttagtgtggtgcctggtgcgtaaatgtcgtagtatttaccattattagtatactgttattattattattatttttaatttattattattatactttaagttttagggtacatgtgcacaatgtgcaggttagttacatatgtatacatgtgccatgctggtgcgctgcacccactaactcgtcatctagcattaggtatatctcccagtgctatccctccccactccccccaccccacaacagtccccagagtgtgatgttccccttcctgtgtccatgtgttctcattgttccacccccacctgtgagtgagaatatgcagtgtttggttttttgttcttgtgatagtttactgagaatgatgatttccagtttcatccatgtccctacaaaggacatgaactcatcattttttatggctgcacagtattccatggtgtataagtgccacattttcttaatccagtctatcattgttggacatttgggttggttccaagtctttgctattgtgaataatgccacaataaacatacatgtgcatgtgtctttatagctgcatgat

SEQ ID NO: 81223 - DNA, 1464 bp, Homo sapiens
ataactgagcatggattaggagtaatcaaggcaaggttatttgataatctgttgaggatgcagtgaaggggatgcttacagcatgaaaggggttgattgaatcaggagaggttgcttccaactcttaaattttataattctgcctgaccacgctggagcatggccaagctcaggccacctgtcccatcctggcctcggccactgccttctccatcctagagcaccatcctccagctctggcaggggcctatgagcttccgggcctgggggccatgggccgtgtccagctgaagtggcaggaggccctgcggtgtctccccagcctccctccttgaggatgagcagggcattgtcccgagggccatggccgaggccttcaagctcatcgatgagaacgacctgcttgactgtctggtacatgtgtcctacctggaagtgtacaaggaggagttccgagacctgctcgaggtgggcactgccagccgtgacatccagctccgggaagatgagcgcgggaatgttggtgaggaactctggggtcctccactgacggagaggggcttaggggggcttcacctgtttggagtggagtgcttacctgtctgggaatggcaactcctcatggaaaacccaagccctgggaggttttgctttagcttcttgcctccactgagttcagtacatgcttctatacccagagtgagaggcactgaggtgggccagtgggaagccggagcccctcaagccggaactaggaagggcagtaccccgtgggcatggggagggagcagtgggtcaggaagggcaggtttggggctagttctgctctgcctgccctcctggctggtcagtctggcggcccctgccctggggctcacggccttctgtgcccgcagtgctgtgcggggtgaaggaggtcgacgtggagggcctggatgaggtgctgagcctcctggagatgggcaacgcggcgcggcacacgggagccacgcacctcaaccacctgtctagccgctcacacacggtcttcaccgtgaccctggagcagcgggggcgcgcccccagccgcctaccccgccccgccccgggccagctgctcgtctccaagttccacttcgtggacctggcgggctcagagagggtgctcaagacgggcagcaccggcgagcggctcaaggagagcatccagatcaacagcagcctcctggcgctgggcaacgtcatcagcgccctgggggaccctcagcgccggggcagccacataccctaccgcgactccaagatcacccggtgagctgccccctggctcctatgtggcctgggggccggggaggcggggagtgtccagcacaccagtgggggtggaagcccaggtcccctgaggtctccagcccacgggaaccgcgccaggagccggtcccaggtctggcccgctggccctgggcctggagcgtcggggcccct

SEQ ID NO: 81224 - DNA, 1030 bp, Homo sapiens
ctcctgagctcaggtgatccgcccgcctcggcctctgaaagtgctaggattacaggcatgagccaccacgcctggcgaaggatatgcattgtataatgctttgtgtattcaaggaaacttgtgcaccatctgtattggtttcctgagcctgtcataacaaagtaccacaaactgggcagcttaaaacaatagatatttattccctcagagtcctagaggccagaagtgtgaaattaaggtgaccagaagattactttttaagaaaaaaatttagccaggatcccataccatgggagaacaacctttcctaggttaacatatatttgctatagaagctgagcatgtttctttgacaagataaagtcccacagccaacccatgggttgttatctcctcaaatattggtcagaagaattctttaggtacatctttcccaattctaacccttcctcagacacacttctctcagttgctgattctgtatttgctgccctcctccccagacaggtaaaactgaaggcaaaatgtcagtggatgtgatcacttcagcagcacatatactaaaactggaacgatacagagacgattagcatggcccctctgcaaggatgacacacaaattcatgaagcatttctttttttttttgagatggagtttcactctgttgcccaggctggagtgtaacggcctgatctcggctcactgcaacctccacccactgggttcaagtgattctcccacctcagcctcccgagtagctgggattacaggtgtacacatcaccatgcccggctaatttttgtatttttagtagaaatggggtttcaccatgttggccaggctgagaactcctgactgcaggtgttccacccacctcagccccacaaagtgctgagattacaggcgtgagccgccatgcccggccccatattttttttaatgtcaatggaatttaccatttgcaacaaagaaaatgtgggggctgggcagaacaatttggttaaaaagctgttgcatgagtgctgttag

SEQ ID NO: 81225 - DNA, 1075 bp, Homo sapiens
atgcacctcacaggtaagaatgctagacccatcattcctccaggaaaggccttctgagcacctgctgtgtaccaggctgagccctgaggacacagaggcgatgcaggtgtgtcctcttagagtttctcataggagcacagggtagtcgaggtctgccctgggggctcgggagctggggaagtgagaggagattcctctcatcacagttgtgtggccctcagctatcggaagctggagaagaacccagagaaggaggaggagcactgggcccggcttcagaggtactccttgtcgctccagagagagaacttcaagaagtgaggctgccaccgccctgggatctctgaaaaggaggtttcagccacgaggcagctgctcccaggacactgaggccaagagaaatgtaacagagccacagctccacaggcctgcactcggagtctggggcctctgcagagccagcaaggggaaaagtataatctgggggaccttcaaccactaagcctcttgtcagagccctcaggcaggcagatgtgtcacccaaataaacagtgatattgtctccagactcccaagttgctgtggtatataactcatcgttcccacgcagtccagaccccagcagggcccagatgatggtttcaaccagagtcctcggcctggtgaggaccactcacctcctaggccctggagagccactgtcctcagatgagcaagacaccccgcccacctgttttccccacccatttctccctcccacggctggctcacacctttatagaatagctttgaggaggtgaggctcaggatggtggcgtaagggcctgaggccacacaggtacgagaggcagagtgggagggagaggtggcaggcaggagctgggccactgctgcccctggcctgctggctcaggaacgctagaggtggctgggcagagagatgccttgttcttctctagaaactgtcctcccccaaaaaacagacggaggggtccccagcagcccaagggatccgtgaggaccctgtgtggaaccttggaggctgagggggctcaagtgtcccagcctggtccta

SEQ ID NO: 81226 - DNA, 1021 bp, Homo sapiens
acccgggaggctgaggcaggagaatcacttgaacctggcaggcgaaggttacagtaagcccaaatcgctccactgcactccagcctgggcgacagagtgagactccgtctcgaaagaaaagaaaagagaaaagaaaagaaaagaaaagaagggccaccctcagtgtcaaagacgggagtgaccacccacctggtgccagggcttggggcgctaggactccttccttcattgattcattgtcaaatatttctatgtcaggcatgacactagcttagccagtgaccctgtgaccctgcttaggtgactcagttttccatctatagagggaagaaggaccaaggggtccctcagcccctggcaggccgaggggatgttgagaggatgcaggcataggtgatgtgcgtgggacagtccaagttctctcctgagtcacctgaattagcagtagctgagacagcatctggccctcttaggtacctgagctacaccctgaacccggacttaatccggaagcaggacgccacctctaccatcatcagcattaccaacaacgtcattgggcaaggtctggtctgggactttgtccagagcaactggaagaagctttttaacgagtgagtctgtggaatgggtgtcagggacagcgagcgccgaggctggggccccggggggtggcctgtgcgggtaagacacgccgggggcactaaccagaagtggacaaaaatcagccaagcctgggggctagggtggggcaggaatggaaagacaagctggggtatgggccgtcccttttcccatttggaaggaaaacgtggcgtgtgggcgtattctccagaagagaggggagtgaggaactcggcagtcagacctgtgttcaagctgtgactcccccacatcctagtggggtctcccagggcgtgtcatttcatctcctctataatcatggctccctacccagtaggtgtgaggatgagcctccttagttcccggcctccctcacagttcacctctctccctccct

SEQ ID NO: 81227 - DNA, 1024 bp, Homo sapiens
ggctgctttggggaccaaggaacctcaggcccaaggcacaaagcacatacagcgggggtcagagggccagttaggccacagagccttaggcagggtgccggcctggggttgtgtgtcaagaggtgaatcttggctggagttcgccaggtgtgctaaccgcgtgtcacccctggggcaggtacagcgaggttaatgccatcagcaccgcctgctccaacggagttccagagtgtgaggagatggtctctggccttttcaagcagtggatggagaaccccaataataacccgtgagtgtctcccctgcgcctcctctgccagtcttcatctgcccccaacagccccgtcctcagcagaaccctgtcccaccctccccgctgctgttccacacctgacctccctaccccacaccaggatccaccccaacctgcggtccaccgtctactgcaacgctatcgcccagggcggggaggaggagtgggacttcgcctgggagcagttccgaaatgccacactggtcaatgaggctgacaagctccgggcagccctggcctgcagcaaagagttgtggatcctgaacaggtgagtcttggcgcagggtgggactgcgagagccctctccccacctggagaaccaggcaggcctccacactcctcgccagatccttcacgtgacccccacagacctgttgaggtggaggcagtatttccaaagtaaccggtgcagactggaagctttaataagtgatagagacaagatatggactcaggtctgggtccatgtcctctgttcctagctgctgtggcctcttagcctttacctgacaacaactcgtcttcccttctgtcaaaggctctggtgtagctggacctgggtcttttcaaacatccagctgggcaccccctcaagcccttggatgagggtccccacctcccaccatgtgcctcatatgccattacctggatgcagtaaagaagagccacccttgggcagggtgtggtggctcatacctgtaatcccagca

SEQ ID NO: 81228 - DNA, 1016 bp, Homo sapiens
ctcaagcagatcaatgcaatgccacctggccgcttgctttgcccactgggcctacagccggaagcctgcccttcagccctcgggcctgatcccaggccgcctgcagcctgtaaccagacactgtttgcttccagcaggcaccccccgagcccagctccacacaccgttcctggatctcctctccccaggcggagcgtgcccctgcccagtccagtgaccttcgcctgttggagccctggttaatttttgcccagtctgcctgttgtggggctcctcccctttggggatataagcccggcctggggctgctccgttctctgcctggcctgaggctccctgagccgcctccccaccatcaccatggccaagggcttctatatttccaagtccctgggcatcctggggatcctcctgggcgtggcagccgtgtgcacaatcatcgcactgtcagtggtgtactcccaggagaagaacaagaacgccaacagctcccccgtggcctccaccaccccgtccgcctcagccaccaccaaccccgcctcggccaccaccttggaccaaagtaaagcgtggaatcgttaccgcctccccaacacgctgaaacccgattcctaccgggtgacgctgagaccgtacctcacccccaatgacaggggcctgtacgtttttaagggctccagcaccgtccgtttcacctgcaaggaggccactgacgtcatcatcatccacagcaagaagctcaactacaccctcagccaggggcacagggtggtcctgcgtggtgtgggaggctcccagccccccgacattgacaagactgagctggtggagcccaccgagtacctggtggtgcacctcaagggctccctggtgaaggacagccagtatgagatggacagcgagttcgagggggagttggcagatgacctggcgggcttctaccgcagcgagtacatggagggcaatgtcagaaagtgagttccggctgggctgcccggtggggtggatccgaggtg

SEQ ID NO: 81229 - DNA, 1153 bp, Homo sapiens
caggaggctgcggcaggagaatggcatgaacccgggaggcagagcttgcagtgagccaagatcgcaccactacactccagcctgggcaacacagcaagactccgtctcaaaaaaaaaaaaaaaaaaaataggttaaggttgtatagaatactaggctttcctttttttgtgagatgggggtctcacactgtggctcaggctggagtgcagtggtgtgatcatggctcactgcagcctcgaagccccggggtcaagtgatcctctcacctcagcctcctaggtagctggaaccacaggcacgcaaccaccactcctggctagttttatttttttagtagaataaggtctcactatgttgcacaggctggtctctaactccttacctcaagccatcctcccgccttggcctcccaaacatgttgggattacaggtgtgagccactggacctggccaaatactgggttttcagtgctcactgccactaataaaaatctgaaattctttcattatgcaatttctaagtgcctggtgagggccaagctcagttctaggctctgaagattaagagagaaacaaggctctgtctgctcctgttgtctctgtgagcatctttgacagagtgctcagattgttgggatatagtgcatcggactggcagcctgaatttgtggagaccgcagtcagtaactttgtgatatatggaatatttagaggacagtaacccatttccctacgccctacctgatcacatcgtgccctgctgggccataccccaaacagcccaccttcctctaggcctggccatggccctgtgcctgccacattgaggattaagtcaggatatcttgagccctctcaaatccctgtttattcaggcctctgccacatatagagccagccttctgtccccaccacttccactaccatggagcccacttagtaaaacgctctctgggcccagcttcgccagaaaagacaccaggggagcaaggctcaaaccaggggcagctaaatctgatcttgtggaccagtctctagtaagggctttcagcgtggctgtctgtccattgctttccaaataggatgcagcaatgattggtacatgggtattaagatcggtagtaggggctagtccaagtttagcaatagcca

SEQ ID NO: 81230 - DNA, 1065 bp, Homo sapiens
ttggccaggctgggctcgaactcctggacctcaagtgatctacccgccttggcctcccaaagtgctggcattacaggtgtgagccaccgtgcccggccaccagaatcctttggtatagccaagccttttggttaccgcctcatgaagaatatgcttcccgcattgtcctagtcccagttgtattctcacaggtgttatgtgcaggacacaatccaaatcataaacctggctcatgcccaacacatttctgctaatagggagagggacccaccacacacccacacatgccagaggtccctcctcacagaggagagggcctgtgtctgtagaaggttaaagctgacaacatgtgaaacatcccagaattatgactcttcccaagtttaaaatacattctcctcatgagagcagaaggtttgttgctgtgttgtgaatgatgagctgcctccatagggaacccactgccacctgggccagcttctggagcatgagaacctgagccagggtcacccttgtggggcctggacatgacgcacgctggctgcgactaggagcagggctgcctcttctccctccccaaggtctgcttgtgggcacgctctgttccctcaggtgccattctcccagggcttaggcgcccataaatgttctttctgtggtggagtagggcctcctgcttccatactgtcgcatgggctagatctcaggtgtggtgttgagccaccttaagatgagggctgcttcgcagtaaagtttccagcctgggcccctcttgggccttctggctggggaccctcagcctcctgatgctgttgcagggcaggtctgagagggtgcccagcagcacccggtgtcagggccaccttgttttccatttttgaacagcgctccctgtggtttgtgcccactgctcaatacagcctccgatcctcactcttgaaagctccatgataagcacagagatgggcagtgtgggtcagaaggtgggccgcttcctgtggaagagggaagtgtaggtgaatagatatcaaaacccctgatgtcattcttttgaggggttggatt

SEQ ID NO: 81231 - DNA, 1056 bp, Homo sapiens
aaaattaaacaggtaacaagtttgaaatctcagattttcagggtagaagagcaaatagaaaagccagatggcagaggaaggcaaacagcttctggcttgggggttatggcccatgtttgtggtttgtaattcctcctttgaaagccactcgttccctggagggacccagaaccctcttccctagtccagtgtggtttcctagtttgtgtgctctaagagtctgatctcccagcagccatttctcgtggtgtctttcagacctcagagttgccaatttccttatttccagttagctttataaaaaactacagtagagtttgggctaggcttgaaaataacataccccagtccacccccacatggtgctgggcttgatagagatgttcacataaattctgtcctatccctctgaggtctcgccgtccccttcctcagccttcccagagcacagaggttacagacgtatactttcacatgcagaaatagcagaacaaattacctctttaattatctgagtgtcttaaagagcttctttgccttgtatacggaacttgatcttgcgaaaccaggaattcttctttctgtgaggactggcagtcctgtggaagaagcttttccagaccacagctattggtggcagctatagttcttttagaaatgtaggctgggaagattccaggaatagtaagtgagtcagaggcaagggggttggaaatgagaagaaatggagacttgctgggtgagggcagaagcagagttggtatccggaaagaaggcaataggggaaaaatgattgtgagagagttttcatccacttttgccgttccctccacgtgggggtgagcctgccaggtgggggttcactgtagatgtgcatactctttgcgttttgtcaccagctcttctttatctgtgataccccccaccttctcccagcttgttgccacatgacacttccaaagccagctcttttcatctcacattattagttggcaagcagttgccctagagctgtgactgtccttttccttttaagaacttcccggtgactttgca

SEQ ID NO: 81232 - DNA, 1056 bp, Homo sapiens; identical to SEQ ID NO: 81231

SEQ ID NO: 81233 - DNA, 1056 bp, Homo sapiens; identical to SEQ ID NO: 81231

SEQ ID NO: 81234 - DNA, 1056 bp, Homo sapiens; identical to SEQ ID NO: 81231

SEQ ID NO: 81235 - DNA, 1096 bp, Homo sapiens
ttgtatatttatatagatcctgtttagattttttgtatacttatctttaaataggcaagtttttcagggaccagctgttttgcaggatgtttgttggaggagctaccaaaactctgttctgggctagctacagttgttcccttgatttagggttctgggtgagtccgtttacccttagtctctagccagccaatcgagataggcaaggcgtctcttagcatctccacaatgcaaaggatgtcttctctactaccacagacaccacctctgtgaggcaaatgtagcttgcgtgatttctcatttagcctcaacttcaggtccaaggaagttcctgccttccaaaaacaaggaattaatttggtgctggagtgtgtcctttacccacaggaagtacatatttttgcagatctttctgagatcaccagcttccctgtcctctccctgtagcatcctttcttctttttcttctgtgaagcaaaggagtccctgcctgagctccctgcttttgacagctttttcacctgtttgggggtttggaattttggatatcctgtagttataacaaaaatggagtttgcatttttatttcttctttttgcatttggaacatattttgaacagcatttgaaaatgctgactttatgatgcagtgttaaataagaagttttaactgactttttctgttaaccagccactagtctccacgacatcatgtgttaggccttttactataccttctccagaaagcccccaccaccacactgttgtctatcttcgaagtccctaaagcccaaggaatatgctacttagatatatggaaagcctttcattcatttagcatgcctactctgagcgttgttctaggccttggagataaagcatggaagaattaatacaagatattgacacaccaaagacaagtcttaaatgatttcatgtggactaggggtcagggatgaatagagtggaagacatagtttgggattctgaggaagtatgatataaagggtagaacatgagctccggaatcagcaccattctgctgctaatatacatgacattgggatcattttattgccttttcctcatatataaa

SEQ ID NO: 81236 - DNA, 1096 bp, Homo sapiens; identical to SEQ ID NO: 81235

SEQ ID NO: 81237 - DNA, 1096 bp, Homo sapiens; identical to SEQ ID NO: 81235

SEQ ID NO: 81238 - DNA, 1096 bp, Homo sapiens; identical to SEQ ID NO: 81235

SEQ ID NO: 81239 - DNA, 1364 bp, Homo sapiens
cccagatggggcagcggggcagaggcgctccccacatctcagacgatgggcggccgggcagagacgctcctcacttcctagatgtgatggcggctgggaagaggcgctcctcacttcctagatgggatggcggccgggcggagacgctcctcactttccagactgggcagccaggcagaggggctcctcacatcccagacgatgggcggccaggcagagacactcctcacttcccagacggggtggcagccctcattgattctttagactcactttttgggtaccatttataattttaacatctcaaatcaagatttttcttataatcaatggtatgtcatttttcttttgtagtagcacataaaaatagtatgttttacaatcagtgaagtcttagatttgatataatacagtaatatccaccattcaattatttgaggatcggaattagtgaataattgcttagttcaataaatggtgaatttgtctttatttttacttttttcctactagtctctctgcctcctatattgtgccttaagactatcctttacacaccttcctaatgatatatttaaaaatgtattttttactaactcccttgctgatgtatacccccagctgcagtgattcttaaggagaaggacatgcctcactcccctccaccaccttcctcaaaaccttatgatagttcagtgacactgagtgattgagggaagtgtgttatttaagtgaattttcatgaatttttttttaagttggggaccactgccaaaagggtgaagctgcagccccttcttatgtacaaagacctccatgagcatgcccagcctgcctgtctagcctcacctcttgctttgaactttacactccagtgatactgaactatttttgtaacttgtgtttagggatgttacagctttggaagtctttgagccagcatgtaaagggcgagcaggtggactggggcacagggctgttccatgggcagtgatttagaaggagcaggaactgtggggatggagatggtctccttagaaacagttttatgggatctaggtgtggcatttggactttttttctttttttgttttatggccaaattgtgcttcacttatctgcctgcctatgtggttgccttaggcagagtgatagaatcccagggtagagggcagggacttactctgtgttgctccagaagacacaggtaggatcgggggtggaaattatttgatgcttgttgtagctcagtacagttaaaaactctctgacagttgttgctgctcaacagcccactgagcagcttggaaacagtagtgagctctcttcatggaggcgaaggatctgtcaccagagtgaaggat

SEQ ID NO: 81240 - DNA, 1364 bp, Homo sapiens; identical to SEQ ID NO: 81239

SEQ ID NO: 81241 - DNA, 1364 bp, Homo sapiens; identical to SEQ ID NO: 81239

SEQ ID NO: 81242 - DNA, 1364 bp, Homo sapiens; identical to SEQ ID NO: 81239

SEQ ID NO: 81243 - DNA, 1055 bp, Homo sapiens
ctcttgttgcccaggttggagtgcaatgacgtgatctcggctcactgcaacctccacctcctgggttcaagcaattctcctgcatcagcctcctgcctagctgggattataggcgtgcgccaccacacccggctagttttgtatttttttttagtagagacggagtttctctatgttgatcaggctggtctcaaactcccaacctcaggtgatccgcctgtctcagcctcccaaagtgctgggattgcaggtgtgagccaccacacccagcaaagcagaatctcttgattcctaactaagaacccttttccaggcttgatttttgtatcaatcaaggtaggctaggtaatgcattactccaaaatcccaatggcttatgagagcaaggtttattttttcactcgtgctatgtggccattgtggtgtgtctgctgactgtagttcctctgaggtccaggctgatggaaatctcctcaacatatgcttctacctgggcatgtgtgtgttccggctcttgaagtgacacatcctcgtacactcacatttcagtgatcaaaatcagtcacatgctcccacccaagggatggggaaatgatcctattatgtgcccaagagggaggagaacctgaactagttgaatattaccaatgatgaccatggttttttcatggattttcttagaggaaaagttaatgtttgatttttattatcactttgtagaagggaagctagaaattttagtaacagaaaaatagaggagtgctctaataagaagaaaacatggttgaatcttaggaaaggtatcccacatggcagcttttcagtttctctgattattgggcatttatatcttctatacttcccaaatgaatttaagatgacttaaaataaaatttcttaacagaataaatggtttttatatgtgggaggcgagtgcctccctccttagaggctttctgcaaatcatttgtctttaccttggctctctgaccttgatgaagtactgatgtctgagagtgtttttgtcttttctctgattaccaaacaacaatcat

SEQ ID NO: 81244 - DNA, 1055 bp, Homo sapiens; identical to SEQ ID NO: 81243

SEQ ID NO: 81245 - DNA, 1055 bp, Homo sapiens; identical to SEQ ID NO: 81243

SEQ ID NO: 81246 - DNA, 1055 bp, Homo sapiens; identical to SEQ ID NO: 81243

SEQ ID NO: 81247 - DNA, 1027 bp, Homo sapiens
ctttcagatgtgacattgataaagctgtgaatgtgttcctatttctcttctttatctatttctccttgttttctaggtttttgtggaaactctggataagtgtttcgaaaatgtgtgtgaattggatttgatcttccatatggataaggtatattctcttgcagttctcttccaaactagggttactagaaaaccaagagccttgggcatctgtagccacctctacatcttcatattgtttcttgtttttttttactcttaagatagtcctagaacatgttttatttaatagatttaatagtttgggttttgttttgtttttgctaagatctactaacagttttaacgtgcataagattattactaggcctatatcgtggttcatctgttcacagactgatttcttgatataggagaatgatgtcactggctacttggccaaaggtgagataaatagttttatgctgattataaaattagtttcctagtcataggccagtgacaatgaaactttggaataatcatgacgcaggggctttgacttagatagtaaaatttatatctttcctaaagagtaatatagtgactaagagatctgtaatgtaattcaaggtcaggtgatattctataggaaggtagactatcagaggcagaattaaaatggccccaagtaggtgttctcagatttgttttgctaggataactgtgacatggcctatgtcctcatatgccaaattaaacttgggcaatagccagcaagggaataggaattgccatgtttattttattcaacttaccacatgctgtcccctgtgcagtttactggtgcgtctttggtttgcttggtcctggtttttcttcaactgattgttgtcattatgatccctggcccttggagagagatgattttttaggagactgctgctcattgctaagccatgatcctttattaaccttttcatcatgatgaagtaggagtttttagatccatcgttgctagcattgctgtctaaaggactttcttgtt

SEQ ID NO: 81248 - DNA, 1032 bp, Homo sapiens
tcctgctgtctaaagcactgtgtccaaagggtatggcacacttatatggacaggtcaccattccaaacaaggaggcccagtgtgtcaataggagaggtcctaaagcaacaaaaagggcggggtgtcttggatgggcttcaggaagggaaagaccattgtgtctggagctcagagaatgggggctggtgtttgagatgaggctggagattgggcatggcatcctcacgcatgttaaggaattggggactttatccttaacatcctggaagccagtgatcccatggagagtgagaagatctgatctgtgtttcaaaggtcacttgactgccgagcagctggaggcgagttgctcctttaggagactgctgcagttgcctgggtgagaggctagaggggtctggtctatagcagtggcaggggagatggaaagaagagaatgatttgaggggcattcggggggcaaaatcaacaggacctggggggagacgaagggatcaagaatgatgcccagattctgggtgagtggcagtgctgtggtgcacaagtagtgatgttatgtttccgggtgacctgctgtttagcaggagcccagcctgtggctaagaagtatagagaactgaaactagctccctagggatgggaaaaccaagtgggctgaggataagaacagggccccagggctgggtgcagtcgctcacgcctgtaatcttagcactttgggaggccgaggtgggcggatcacttgaggtcaggagttcgaaaccagcctgatcaacacagtgaaaccccgtctctaccaaaaaatacaaaaattacccggacatggtggcacatgcctgtagttccagcgccttgggaggctgaggcatgagaatttcttgaacccgggaggtggaggttgcagtgagctgagattgccactgcactccagcctgggcaacacagtgagaccctgtctcaaaaaaaaaaaaaaaaaaaagaatagggtcccaggctcagcaggtagggacactgaggtaaaatcctattccc

SEQ ID NO: 81249 - DNA, 1503 bp, Homo sapiens
tctcactgtgttgcccaggctggagtgcagtggcaatctcagctcactgcaacctccacctcccgggttcaagaaattctcatgcctcagcctcccaaggcgctggaactacaggcatgtgccaccatgtccgggtaatttttgtattttttggtagagacggggtttcactgtgttgatcaggctggtttcgaactcctgacctcaagtgatccgcccacctcggcctcccaaagtgctaagattacaggcgtgagcgactgcacccagccctggggccctgttcttatcctcagcccacttggttttcccatccctagggagctagtttcagttctctatacttcttagccacaggctgggctcctgctaaacagcaggtcacccggaaacataacatcactacttgtgcaccacagcactgccactcacccagaatctgggcatcattcttgatcccttcgtctccccccaggtcctgttgattttgccccccgaatgcccctcaaatcattctcttctttccatctcccctgccactgctatagaccagacccctctagcctctcacccaggcaactgcagcagtctcctaaaggagcaactcgcctccagctgctcggcagtcaagtgacctttgaaacacagatcagatcttctcactctccatgggatcactggcttccaggatgttaaggataaagtccccaattccttaacatgcgtgaggatgccatgcccaatctccagcctcatctcaaacaccagcccccattctctgagctccagacacaatggtctttcccttcctgaagcccatccaagacaccccgccctttttgttgctttaggacctctcctattgacacactgggcctccttgtttggaatggtgacctgtccatataagtgtgccataccctttggacacagtgctttagacagcaggatgtctaaagacactgggtgactctacccccagtcagtgtccccagctatccttctgctcaaccacctccctggccacccccatggctgaggtcccagcatggcctgcctgtgagaaagtcccattcagacacagaacaccagtgaagtggctaccacatcctctggcccctgtttccaagacctttctgaagggcaaggaagcaggggacagtggaaggaacataaggtttgcttttgacagctctgggtttgaatcctgattctgctactcattagctgtgtgactctgggcaggttgcttaacctgtctgagacccttttcctgctctgtaatatgaatagtccggtagttaagaatgtgggctttgaaatctgagtgcttggatgtaaattcctcttgccactgtatactatcctagagctctgagctttagtctcatgagaaaatgggaataataatcagtacctcatggactgttgtgagaagtacgatatcgcaagtgcttagcacaagtatgagtaattattatcatggaaatcatctagcattgt

SEQ ID NO: 81250 - DNA, 1051 bp, Homo sapiens
gagagaccctaggacagcctgagagtaactggacctggtattggtgcggagtggggaatatcccttgtctaaatgcagagcagctgagagaagttagcggggctcttcctccgttctcattgtttcctgctttccttccccacccaccccttcctcagcactctgtgttgtagcctgtactatcctgcttcaagcctccgtgtcccttgtaccttccccctaccttgagttgccagttctttactccctcaaatgttcccatgccacctctggggtttctgttatctgacatccctggctgctttcctggtagatgccattcccagagaggccaacagcgttcccaggcgtggctggctggtccgcatctctcagactcactctgccaggctacagttttgagaataccttttttgttgttgttttgtacctggagaactttttatgaatgagtaaatcttcagaaaggaattcctccacccttactgggttattgtcaggtgtaaacggcctttcagctgagcaatgttcctatgagaaggaagccatttctcttggctcatgaacactgccttttgggtagtatacccacacccagatctgtgaagagacctggaattgaagtctccatgtcgtcaggacttggtggcatgtggatcttgcttgacttgggaaaagagagggtggtggtgaactaataattatggagtccccctaatgtgtcgaacacaatgctagatgatttccatgataataattactcatacttgtgctaagcacttgcgatatcgtacttctcacaacagtccatgaggtactgattattattcccattttctcatgagactaaagctcagagctctaggatagtatacagtggcaagaggaatttacatccaagcactcagatttcaaagcccacattcttaactaccggactattcatattacagagcaggaaaagggtctcagacaggttaagcaacctgcccagagtcacacagctaatgagtagcagaatcaggattcaaacccagagctgtcaaaagca

SEQ ID NO: 81251 - DNA, 1100 bp, Homo sapiens
atgaaaagaaaagcaactgtgaataggctgaggatcaacgtggggactgactctcatcaaaagaaaaaccagtaaggaccaggtcagccattctccagacacttcaggcaaggagcccaaaccaaaggaggaaaaactacgcattcagttgttcaactgcctcagcatggttaatgtattcacttgaagtagaaatgttttgagacttaatgaccatgattaatatccctctgcaccccctccttcctaccacttgggaatctttggggaatagttaggttcagagccacctacaagaaaggtcccaggttgtcattcttcataccttagaggaattctcctgatgctaacacattcccaggtgtttcacagaattccactaaagctggggggtaagattcatcctgtcgtcttctcatcctacccacaacctcaaccagtatgtaccatgctcctgccaggagatacaactgcaccaacaccaggtacctacccactcctcgtcctctgccccatccccctgctctcggatctccgctgcagcccccttcgaacacttttgggccatgatgttgtctgtccaggatgcccctgtctttccatcaccagtgaaattacacttggtcactgttccagcctcaagtttggccaatgaatctgaaagaagagatgaaattgaatgtcctctgtccctgtggcagaaacatagtgagggctgggcccattatggtggggtcccctaggcctgggttaaaccactgttttctccaggcatagatgtggtcaatgagcccctgggtgggacccccaaggtatggtgggagagtcgctcacaggaaccatgggattgggtggcacccggggatccaggctgtcgagcccaatggccctagggcacttgtgcagggatttaggagtaaatctcaagggcttggtcgtgtccccatggaggccagcccttgcctgctcccatgagctctaggcagaagggaggccaagagcccccatgggccacacaggaacagtgggccacagtgagggttgcattgctcacccaggaagggaccatcgccccgagtcttcagccgtaccccggcccc

SEQ ID NO: 81252 - DNA, 1019 bp, Homo sapiens
tccaccccttctcctcatcaattcctcccacacttccctgctctccctggcttttcactgaagggtcccttctcccagggaggagcagatgctgagccccattgtctctcccccagtgactgcagcctcccggggacacgacctgccactcctcacccctccccccagccctgagccctgggcctttagaaacgagagccccaaggccacggcccctcgccccaccctaaaccagctcctggtgctctgagctatgactccagtcactcagaacacatttgtctctgacgaggagtgaggaaacagtagcctgagagtttggttcaacaagaaggacaccatggtcttttaacatcagcaccctgagcccccaatgaccccagggcctttgcccaggtctgcaggaaaccacatttccgtcatcacttgcagcctcccacttagtacacccaagctgcatcctccaaaaaagcagaatgcagctcttagagccaagcatgcacttaacaaatgcctactgagtacctaccccgtgccggcgaaggtgctggctgctgaggaccgaatcatcagcaagacgcagtccttgctttggcctttggctttgcaggcgaaggagcaagaaaagaagacagcaacctcagtgccatgcgatacaggcaagagtgaaccaagaaagctcctaagagggtgcttggactaaggtggtcaggtgtggcttcctggaggaggtcgtgtctagattaggctgtgctagccaaatgcatgggagagaacagtctgtccaaaggccccagggcaagacggcacattattacaggttcttagaactgtcaagagttgaagtgtttactgcagcttagaatacaagtgggtggggggagagtgaggatagagcacaagtgggaaaaaggggagggtgtcagggaaatattcagattttagcccctcccacttgctaacttcatgaatgtaaatgaataacataacttcagtgaataacttcgacttaatttcgg

SEQ ID NO: 81253 - DNA, 1197 bp, Homo sapiens
ccaggccctgggctcggggaccccgccagcccgccgatcccagcagctgccctgagccccttctccacccgggccctggcgctcggagcccgcgccgctccctcgagtcaggccgtccagggctctgctaacagctgtttaaaggcttttgctgttcagtgctctgcggggatgtttgttccaggcccatctgcctactttaaaaatacataagtgaagcacacacacccagcttgccacctctggctggggaggggcgggctcggcggccctcgctcgcacttgggaaggaaccggcacccaggagccgcacccgtgccccaacacccgcaccggctctcctctccagaggacgcccctggcttcccttggggggggcggggcgcagggcccccgggccccctttgtaccggacagggccgggccccccatttccaagcgaggtctgcctcttccccgcttcagttaatctttgttccccttttctgctgagaggagaaaaaaaaaagagagagagagaaagaaagaaaagaaggaaaaaaggcgtgacttgattttcaaacgaaactcccacagcaaacaaaacccttttagagaaataagaaaggaggaagaaggaagaaaagagggaagaaaaaaacaggagaaagaaaacccttcaggctttcaattcgagtgggagagttgaaccgaaagaaagagaaagaaaggaagaaaaatcctctgcggtagaaagagaaaagaaaacttgggctgacaagagggaggtgttgggggtggaaggaagtgagaaaacaaaagagagataaaagggctgcttttctgtctctctcttcctctgcgagctggcttaggaggagctgttttgcatcccttcacgtcagccctgcctcattcccttcttccagggagggagagagcgcgagcgagagagcgagcgagaggaggggggagagagagaaagagaggagccggagggagggcggcaggagcaggcggcgggcgcgcgtggaggcgggcggcgggcgcacagcagcagcccgggcggtgggcagccaggagcccccggcccggcccggcccggcccgccgagggccccagcgcaggagccgcgcccggacccagggtgagtgtcccgcgcggccccccgccccagccccagccccagccccgcagccccgcgctgccggccggcgg

SEQ ID NO: 81254 - DNA, 1179 bp, Homo sapiens
tggaaagatttaagaggccagggaggtgcttgtgtggattttaaccaacctgaaagggtcattcatgtatctctaggatttgcgagacggttagggcaaggcgtagcagtatccggggtgccttttcttttttcttgatatggagtcttgctctgtcgcccaggctggagtgcagtggcgcgatctcggctcactgcagcctccgtctcccgggttcaagcgattctcctgcctcaacctccccaatagctgggactacaggcgcacgccaccacgcccgtttaatttttaattatttttaggagagacggggtttcaccatattggccaggctggtctcaaactcctgacctcgtgatccgcccgccccggcctcccaaagtgctgggatcacaaggactcttcgaggtactcgtcctactgggtctgagggaggcctgccgggcaatccagtgagggaccaacgtcatggcccacccttgagctgcaggccgagtgcccacctgcaaagggcaccctgagcacctttcttgctgtgcaaaatggaaactcccggccggtatcgacctgcagtgtacataactagtccctgtgggcatctgggaaattcacaaaactcccccacaggtgtgcggagaaggactttgtgctcttgggggtcactcagccagctttgaagctgccctctcagtcctgcatttgtacacgtgtaagtaaaaccagtcaaagttcatttctgccaagtagagggctgggggtctgtgtccctattgcatcttcaccagggggcctagagaaccaatggggccacgtgggagaagggaagaagaaaaccgttcttaactcgttagataagagacagtgtattcctaatgtgatcaaagccgatggggctatctggttttgacttctgaaaacctagagtggccattcctttctcatttgttttaaagagaatgttattttctatactttctcattggttttattagctgaccctcaggccagggtaactgtgctgggtacctgccagtctcggagcagaacctctgatcggtcatctgtagctccagagaggtgcccacctggtgccccagtgaccttctggagctggctttcctgcatgagggccgtggggatagagctgctttcttttgggtagggggaattggatgtttg

SEQ ID NO: 81255 - DNA, 1806 bp, Homo sapiens
ttctcagagctgatacctgggtgagtcctcagcccacggtgtgtggtcagcgggccatttttccagggcttgggtcatttccattccaaccaggcatttcctaccagggagacttattttaggctcactgtctagagacaaggagacagacaaggtctggaatggtttttgagttggaggaagggagactaatgggaccaccagagattttgcacttctattttaggtttgccttgtggcccagagatatttctagcagagttgtgtttggaaagaagcacaacttctttctagaagggagtaaataaataaataaaggaggagtccagcgcatcttggaggagacaagtgaagtcagctccctggccccaccagtgctgatgcttggcgcaggctcataatctggcttgctgacccctcccataccctcgttcctcaggcctagccagggcctagcccgcggcaggactcattatgttgaaataaggaatctgtgaatgtgctgggcctgctgttaatggtgcttgctcccagccctttgacttcaaagctggaagaaggccttagagattgtctgaaagcaactgaggcaggaagaaagctctgtacccaggattacacagtaagtggcagagccagcactcaacctgagctttcagagcctgttcccagtgctgtttctacaaggccactgtctctgctactgctggggatcccgaatcaagctcacttcaaagaatgtagctatgagagcatgaaaccgtgcgctcacgccgcacacgagttgggtaaatggagcgcctcattttccagatgtgttacagaaactgtgctggaggatgtgactggccagtgagacaactagggggaactgggtgattcaggctgtttcaacactgacttcttcaaagtccaacaatcagagaagcagtttagtcatcgggattttctcacatcacaccattttttgatctggaatgctttcttcatactttgacttgtatgtgatttatttaggattggtcaggagagaagagaaggagtgtaaggacccaagacctgaactgatttccatctgtgggttaaatgtactagaacgtttgtgagggtagacgtctttgctttgttcattgcggagcccctgtgcctagaatagggtctgatctatagtgggccctcagtagatacttgctgaatgaatgtactggacattagggaagatttgcctgccagaaggaacccatgaatgacacaggcagggacagggaggtgattgatgggagctgcagagttgtgctgtgagtcattgcttcaaacaagctccagacaggtgaggcaggagggggctgggaagagaggatcctgaatggggtggagcccctgggtggagacttgtgcaaaacaataggtttttttagattttttttttctttttttgagacggagtctcactctttcaccaggctggagtgcagtggcgcgatctcagctcactgcaaccttcgcctcctggcttcaagcgattctcctgcctcagcctcctgagtagctgggactacaggcatgcgccactacacccagcctaatttttatatttttagtagagacggggtttcaccaggttggccaggatggtctcgatctcttcacctcgtgatctgcccgcctcggcctcccaaagtgctgggattacaggcgtgagccactgcacccggcctaaaacaataggttttgaattggactcagaatatagggagaataataataatcatgtgtcttaggccagaattatgctacgtgctttgt

SEQ ID NO: 81256 - DNA, 4622 bp, Homo sapiens
ttttaggggcctaactgttcctcaagcagagtggctgttgtgagattagggctattttgcacttgataaagatgtaggagatctttttatgggcaaagattgcttttcaggttaaagtttagttggcatatatttgaaactagtgggaattttaaaactaagaaatgtcctttttggccttgataccaccagaggctgtttgccacatgtgtaaacattacctgcctgctccaggatgctggcccagcctgttccagaccacagcagctcctcattcattggcagtctgtgatgtgctagacactgtgcaggtcccgtcctcgtgaagcttgcagtctccctgggaggcaggcattaaactaataattacacaaatactctttaattacagtggttataaatgcttcaaaggaaaaagtacagaggcatagaagccagtaatcatggagagggggaggggaggctttcctgaagaaaggacatttaaatagccacctgcagtgtggatgaagaggctttaaccagggtggtacagttcattaaccttgatgtgaaccttgccactccatatgtggtccatggaccagcatcagcgttacctggtagtgagttagagatgcagagccctgggctcctcagcaaacctactggatctgcattttaattcacatgcatggtaatgtctgtaaagcactgatggactcaaaagtactgaaatgacaggttctcagctttgctgggagctcattgggtgacgctgggaaagtcaccctggggtgacttctctgatgtttggctttttccagtttgtgctgtctacctgcttgttgagggtgacccacccctgtgttgctgttgatggagaccctgcagactctagtccatgctctggtctgacttctgtaagcactgaagatgggctgaaccatcagagcttttgataaggatcagaataattccctaaaagtgtgtggagctgcacacagagattgtcttaaggtgaccctgggaggatttggcctgaagcaagagaaaaactggcaagggtcaaaagggctttggggaggaaaggtgtaacgtttctgccaaaagcggaacctaaaacggggagagagaggcacctgctcaatagttccatgcatgggaacataatacttttaagaattgcctcagagttttatccctgagaccttcacatcactgtagagaagaccagacggttgaaatcaggggtcctggactcttgcagtgtgtgggtgggcttcaagggtcaggggtacttgaaactgtgcagaaggttacatgtgtgcacttttctgggaagaggagccgtagctttcactggcctcaagggagattgcggctctaagaatttgtcaaatgtcttactggactaacctcacccaactctcttgttatacagcacatgcgatatgccaggcataattgtaaacactttatacatactgttagctcatttaggttgaatacctttctggaggtcacagatctagtaagcctcagagccaggattagaacccaggcactggggtcccagagtcgctggttgcaaagcctaccctagtaacagggcaagcaggactaggggcgagctcttttttggtagcacagatgaagaggctcacccccacccccactttacaagtaagcatctccccagttgttcatgtaaaacatagaaagcattttcccaaggaagcaccttgtgaatagctccaggttgccaggctagcccatgaaagcctgtatcactgttgggcccaactcatgcttgtttgcaaagaaagtaattagaaaacaaaactgctgccgcaccaaaggctaaattaaaaattctagaattggaaagaaggcacttgaagaattgcacccttaaatcagggaggtaaggtggcaacaggaaattggggtagattctgaaagggagggattaaaggatgttacagccaaagcacagccaaatatatgttgaatcagcagcttcaaaaggtaaaacaactgttttttattacctactaattaatgtgtatggctcacagacctgacccttcccccatccctagtgcctaccccaagtacagaggccttttgtcttttctctcattcattttgtgttgtttgaatttttatccagtatgtattatctttattatatacatgtagtatatatatatgtatagtacatatgtgtatatatatgtatatgtgtatatatgtatatagtatacgtgtgtgtgtgtgtgtgtatatatatatatacatatatatatatgtatatatatatacatgaagtaaaagaactattagaagtgggttggaggccgggcacagtggctcatgcctgtaatcacaggactttgggaggcccaggcaggaggattgcttgagcccaggagtttgagaacagcctgggcaacatagtgagaccctgtctctacaaaaaagttttataaatcagtcggtggcacgtgtagctgtagtcccagctacttaagagactgaggtgggaggatcgcttgagcccaggaggttgaggctgcagtgagctatgatggcctcagtgtactccagcctgaaaaccctgtctcaaaaaaaaaaagaaaagaagtgggttggtctctttcgcaatcaccattgtaaaggattttctgatattaaatacatatgctctattgtgtgtttatttctgggagaactaagaaaactgttggaaatgtgaggatttttagtgtagtcggaagctgagaataagtgatcatattgcgacccaactattttccctttcttctttccctgcccccagcatgttatatatatggaatcgaaatgaagttagaatggtcactacagaaagcaggaatgtccaccctccgcatttaaatgggaaactataacttttgtgataactcttggttatgtgtgtttttgtcttctggatggtacctgaaatgccatcccggaccccatcccgttctcggtgggactgcaaggatatgggcttccagactgggaagactgtcctgcatgtgtttggtaaaagacaacggctaaaacctggggcacatcagaatgtcctcgcaaggaccaagtccaagctggccccttgagaagcatcaggtaccctttggaagctggtagtgctggtcagtttaatctcactctgtgatgtccgatcctcgggccctgggctcacaagccatcgcttcccatcgtggctccattctgtagctgcaaatcacaagactgtagacttgccattacccagaagcaggtcacctctgaaattcagaactcttcctgtcctcccactacacagcactccttgaagcagccctgcccacccctgccccaacctgggaaatctgtgcccacttccctggtccattccccatgtgcccaccatcagccccactgcttgttcctctgtgtcctgccctggcttcctccctaggtctgggcaccccacatcctcctatgccttaattctctacctacagctacagtcacacctctctctccctccccaaccccaacctgtgtcacttctctttaccctaggatttcacaaagaagagtccactctgtccccacttcctctctccccctcttctccttgccagctcaacaacagtggagcgtttcagcccagcccactctcactccagctggctctcctagaggtccctggccacctactcatgcccagtggcccatcttgtgtgacttcctcttacctgactgcccggtggcccatcttgtgacttcctcttacctgacttctccatagcagttattgtcatgaatagtcttctccaccttgggtctggctcatcactctgggtccttttcctacctctctcatctgtttttttgtaccattctttcctgttgctatgctttggtgccttggccacagttcattgctacttgcttacctaccatgactgtggtttcagcctgtataggactcttggcctatgatccctgtcctcatgtctcctgtagacagcctagggctggatttccttttgtttttaatctagtctgatatctgtgctctttaaccagagagttcaagccatttgcatttgttatggttttggaaatagatggatttcttttttttgagacagggtctcactctgtcacctcggctggagtgcagtggcagatctcagctcactgcaacctccgcctcctaggctcaagtgatcctcccacctccgcctcccaagtagctgggaccacaggcatgcaccaccacagctggctaatttttattttttttattttttgtagagatggggtttttccatgttgcccaggctggtcttgaaccctgagctcaggctatccacttgcctcagcctcccatagcgctgggattacagtgtgagccaccgcacctggccaaaacaggatgcagatttctttctaccatcgtatttggtgttttctatgtgttctttttctgattcttctgttcattcttttgaattgattgaaagatttttttctttccttcagtccgttttttctctactgctttgaaactcatatactctttttaaaaattttttatttttagagaaaggatcttg

SEQ ID NO: 81257 - DNA, 2980 bp, Homo sapiens
taagagatacaaaatcatccagctccggctgtccttgtgtgtggtgccatatttattttctaacttggagtcatcattctttaagaaagaagcagggtccttttgggctgaggaatgctctcgggggtaggaagttttcgggatctgtgggcctgagctggcatgtccaacatcctgtcactatactgcttggcatcttgcaagggatgcatcctaatgacccatcctgtccacttttgtttggttacttggtgaaggtgggagtgtcttgaacagcatggtgctgttcccctggaaagtttatactcatcagtgcccagttgtttgcagaattcgagaatggatgggaagcacccaggaaacggttcccaaatggatgcattttgatatctgaaatagactttaaagcttttggcttttgatcataaagggaccggcaacattgagacacctccccactgctcctcaggttttcctggtgcttgaataattaaggccatgccctatggaatctccttccttgggctccagggcatctctcttagcaaaggctagcttctcactcacagtgtgctgtgagcgctctggacgtcctacccagcattctgctccatcatcttcttgtgttctgtctcccccagaaaaacttctgtgtaacatcagctgtgttcttttgcttcaattacagagcttgttagaatttctcttccaaatccctgttttggggcttttcttttcttttttcttttttttttttttttgaaatggagtcttgctctgtcacccagactggaggacagtggcgtgatctcgactcactgcaacctccgcctcccggattcaagcagttcacctgcctcagcttcctgaatagctgggatcacaggcgtgtgccaccacacccagctactttttgtatttttagtagagccggggtttcaccatgttggcaggctggtcttgaactcctgacttcaggtgatccgcctaccgtggcctcccaaagtgctgagattacaggcgtgagccaccgcgcccagctggggttttcctaccgtggttgtaaaaattcatttcttgtcgccacctagattaacaaatctcagattaagaactggccttttttcgcctcctctttgaattcactgtctaaagaaacggccattgccctttccgtaaaccaggacagaggtcatgtctgctttgcctttttgcaccttggcccctgcctgcccctcacctccccactcagctacagtgactggaagggcccacacaggaaagctgggccctgggtcttcatggacgttgctggaggatgtgtctccctgctggtggctctcagtcttcctgtgctcagtagggccttctggaggattctaatttccctgtcctggaaaccaccttgaaaatattcttaaatattcttaggtggatttaagatgtctctgtctagtggttttttgtttgtttgtttgttttttaatccatcttagatttgaatgcccaaggaatgaacagtctcttggatcttgtatctcttccttttgttttttagaaaatagcttttattgatttttttttcttgctacaaagaggttgatgattattgcagaaaatttagggactataagtaggcaaaaaagataaaaaccacctataattattaatattttagtatattgtatagcccccccagaatatttttcaatttcaaaagatgagatcatactgtttgtaccatcttattactttttctttcttttttttttttttttttttttgcttttactttacaacatgtgattaaaatttccatcaggttaagcagcctccgtcaagtcactttaaagggttgtatagttcttttgaacagatggactatcatttatttaaccaatctcctacatttagcttgtttcctctgtttctgtcttgtaaagaatgctgtggtaaacatccttgggtatatttgcccacagacttggttatttccttgggatacatctccagaagagaatcactgggccaaggacacattctaaaggctgttcgtctagatgggtaaattgcccccagacacattgtatcatatttggattctgtttagccaaatactaactcccattcttttaaacatggttgtgagtctttcagacctctgtttcctaatgtttctcacgggtcatacaggttggctgagagtaaatggcaaggaagggcctgagagactccgggcacagctgacctaggaaagggagtctgtcatcctggcccgtcgctttacaatgggagtgcgagggctgggcccagagaccctgtcttgcctcccatgaccccaggaagctgcaggcctgtggctccccagggtaaccttctctggtgccagccgttagggtgcccgggacagagagctggctttgaggattccagagtctgtcagagaacttaggctggtctttcttccaagagaatgctcctaaacaaacatcctgccctaatccagagactaggttggtgcttattggggggcggtgagtgggggagccgaggatttcctgtggaggcctcagactctagcccaggagtccaggccaaggaagtgcctctgcccagactttcagccccttgaagcccagttcttcgtcatcacttggtgtggggaacagagggaagtttgatggaattactgaggaagtagcatttacgtggtctaaatcggaccttcctgttcccactgctgaccggctcttcctccttttccgctgtcttcctcctgcgtgacagcgcattcttcatggggcctctggggcccttcctgtgggctgagcttctttcttcccttttctctcctgccgggacctagactggtgcccaccttcaggactgggcacatccaggcacctcacagccccttccctcctccagctctgctaccaacgcccctgcacccttccgtccaggcagggctgtcccagct

SEQ ID NO: 81258 - DNA, 1743 bp, Homo sapiens
ccaagcccagcccaccctttcttctcagttctgccaagaaggccatgggggctggtggaggcccgaactgcctccccgcccccggggagacacagcatgccagctgctgccgggatgggttacaaaaaacaaaaacacaaaccccagccccttgagatgagggacgtttcggtttctgtgaacctgacgcctcatgtgtgttggaaatgagaggcgcagtttgggagaaggaggctgcatgtttcccctggggtgggctttgtttaaattttaatatgctcttcctttttctcaaagtgccagcaatggctcccagctcctttgtcattttagccccgttatctgtctggggatgagatctcttatctgcccggtcctccctctcctccctgaatggcgggtcccccacccgcctccccgcaacttgtgacagtgttacagatctcattctgcaaccttagattcagatgaaacttgtcactttgcttctttaatcaattaagatttggggaaagcaggggtccatttgtgatagtgttggacccaccaagggcatgagtagtgggcaactttggagtcctgtgagagagggtgtggcacccccccccccttagcagcctgggggacgtcagctccaagggtgagggtttcagccctgggttccttgctatggagtcaaacgtttctccagtgtgtgttcagacttctgacctggacccgccttagccttggggagctctctcaactgcgtcctttgttggatggaaactgcattagacacagaaacacagagctgctcttttccccacaggcaggtgcagacctgaaagagccccgctgaagcggctcagaggcaaggggaggacctcatccttaagtcacaggactcaggattagaggacctacagctttcagcctcggctcaccatctcctagccctgatgacccacagcctccccaagccttggtttcacagcctgtaaaatgggttcatgagcctacttttcatagctacactgtgtgtttgtatataacccatggctatcactattacctgcggaccgcggtgctatgaagtcaggagacaggcctgcaccatcctgaatcctctgttctctgaaaaatcgccctttgttctctcttacttccttcattcaatcagcaaacatttaccaactacctaccatgtgttaaactctgtcatattaaggtgaatggcatggtctctctccccagtgagcccccagtccagaaggggtactagatattggatatagacacaaaagcacaggaagttagctcttcgaatgtgctgggggcagggggctgtagggaagactgcttggtggaggtggtgtctagctgagtcctagcagacaaaggcggcatgggggaccaggcgtggtggctcacacctgtaatcccagcactttgggaggctgaggcaggcggatcacctgaggtcagaagttcaagaccaggtgaacatagcaaaacccgtctctactaaaaatacaaaaattagccgggcatggtggcgcatgcctgtaagtcccagctacttgggaggctgaggcaggagaatcgcttgaaccagggaggcagaggttgcagtgagctgagatccagccactgtacttcaggctgggttacagagcgagactctgtctcaaaaaacaaaacaaggctgggtacagtggctcacgcctgtaatcccagaactttgggtggccgaggcgagcg

SEQ ID NO: 81259 - DNA, 1249 bp, Homo sapiens
cttgaacctgggaggcagaggttgcagtgagccgagattgcgccactgcactccagcctgggggacagagtgagactctgtctcaaaaaaacaaaacaaaacaaaaaggaggcatgggggactcaaacatgcaaaggcagcaagggacacacttgaggagtccgagggggattgtgggtgagatggtagaagatgaggctgcaggtataggtagggaccaactgagaatgtgtcaaaaggctcgggcttcatcctgaggcctgggaggccactagtgggttctgagcaaagaaacactatggcggatcactctggcataagccgggagacttggggcttgtgttgttaaatccctatggggaaatccctttggaaatgttgacctgagagacgagaaacccctcagaggaatacatatggcacttttacttgaattccttttcatttcgcctagaatttctgctttgcaccagctgtttacatataatttacaaaagtacattaatgggcttgattgtgtttcttaaaactcactgagaagtaaccccaagtaaaatttttccactggggcatgttcttaatacatatttatagttactgaatccatttgagaatgtagaaagctcttttgaaatgttgcgggagtacatgacatcttcaggtagggttttccccagtcctggcaaggggaagagaaggagaattaatgtctgtcaagtagctgctataggccggacactgatctagattctttgaattcagtgacccactgagaaatagcattcctctccccattttacggacagggaaactgaggcttatgaaggtggctgctttcccaaggcctcgcacctataaggagtggtagtgggatttgaacccagatgcgatgagtccaaagctcacactccatccattgaaccactctgccacccagctcctaagacctaccagaaaagtaaagcaggagctacagaggtaggtgagccactggacagcctggtggcttctagataaaaatcagagctaaaacaccagctcatttccattctccttgcacaagttcttctgctggctgacaaactggaagccagcccttctttgggtagcactcttccaaagagtgatagctgcaagttcttggctacattctgagttggaggttcagcccactgcatggagcagcaggtaggaagttggtgcctgtaggtggcatcaaattgaacataaacacacttgcaggtgaacc

SEQ ID NO: 81260 - DNA, 2699 bp, Homo sapiens
caccgggtatttggccagagttcctctgaattcacttggtctctggcagttgaccttgggttgaaaatgcagttttttgagtgggctttagagatcatgctgaggaagaaagaaaatagcgtgcacggatgtgttgctgtggttggatttcactggctgtttttcatatacctgtcttttccctgtgagagaaaacagccatgacagtaagcaggggaagctcatttgagagtaggggacgtggagggatgagggcagttctccggggcacccctgaaaatgaatttcctcctccagagccagggtgaccgggtccctcacagggccaccgtctgcaggcatcaacactcttttgggtctaaatccaattattcctcaagttcttcttggtggcttccttcactctctggccagggggagttttgcagaaatactgttctaacagcagagcatgtctgtgaccaaaccttgggcaaatacatatttaaagaaatcttattattaaaatagtcaaccttatggtttatgtagacaatctgataaacacagacaagggtaaagacagtacaaattgctccataatctcacaagctggaaattaccaacaccatttagtacttttgtgtatttcctcacagcctttttcattgcatatatgtaaatacactgtattttaaacatggttacaagcacattgaactttatatcatttttctttttcatttgacataacattatggcaaacaaaaactttaaaaaagcacatgggctttacaagtgagcatatgctttgcaaacatttctgtcagctaccagtaaccaactgcaaaaactcatattctacccaaaacagaaattgtgccagtcggggagtcctttgatcaccatgcagtaaacctcgccaaaatattgtaaatttaaacaaactaaaacccaaccacttgaaaaaatttaaagcacttaaattgctattggttcaaggaagaaataaagaatgtactgacaaatatttagaaagcattgaaaactagaatgccacatacccaaacctatgggagacagctggcactattctcatagccttaaatgcttttattattaaaaagggagagagaaaaggcaaataaactaagcattcagcctgagtgcttaggaaaaaaaaagaataaaaacagcccctaaggaaaatgagaggggaaaaaaatagtaaagataaaggcagaaatcaatgaattaagaaacggaaacacagtgaaatcagcaaacgtatccaagagctgattctgtttttaaacaaacagtaaagtagcctaacccctggcaattctatttgagaaataaaagggagaaatgagaaaaaaaacaaaacaacaacaacaacaacaaaaaaaaaaaagggaatgagaaaggggacattgcaatagatacagaggagattttaaaataatagaaacgtatgcacaatcataggcataatttcaaaatctcaattaaatgcatgcttttctgaaaatatatatgttgctaattgagaaaaaattttcaatccttatcgaagcattgcccctctacccaccaaagacactggtcccaagtgtttttgctagttaattattttgaatttgataatactgataatgctaagctgttccacagcttagcaaaagatggagagctctccagttcattctacaaagcaaaataagcctgatattaaacatggcaaagagactattttgaagcatgaaaatgctgggtaggaaatagaattcaataatatattaaacaagtcatccaccataacccagtggggcaggaggaaagaatagtcaatattaggaaagcttaatatagtaactacgtcatgctaatgcattaaaaaagtaaaaccgtattgtttccaatatgtgctggggaaaaatgattaaattgaacaaccatgtctacctaaccaatacagcaaaaaaaaggaacagaagggtgcattcttagcataataaaaaatatttcaaaccaataaccaattctgtaattaacttaaacactagaggcattcttgtggaaaccagtaacaaaataaggaggtctgccatcaccatcactatttaacattgcttttaacactctagtcaacatgataatactgaaacagaaacatataaatattataaagaaagagtaaaagtattaaataacagtaagtacaatttaccctctgccaaatcttaggctagaggtttatttccaaagtttagaaccaatagcaaaagtcatcaaaaaattcaacagatttgactaccttaaaaaattgtaacttctttttcttcttctgttttttttttggagacagagtcttgctctgtcgcccaggctggagtgcaatggcgagatctcagctcactgcaatgtccaactcctgggttcaagcgattctcctgcctcagcctcccaagtagctgggatcacaggcgtgtgccaccaacccggctaattcttgtatttttagtagagacggggtttcaccatgttggtcaggcttgtctcaatctcctgaccttaaatgatccacctgcctcggcctcccaaagtgctaggattatagacgtgagccatatgcccagccattgatattttaattctaccaagatcctatatatagattagtttttaaaaatcaagatttaaatttgaaggccttg

SEQ ID NO: 81261 - DNA, 1917 bp, Homo sapiens
gtgatggagtgagacactgtctcgaaaaaaaaaaaaaaagatttaaatttgaagacaatatgcacagacgatataattagcaaacaaatgcccgacctaaagaaaatgccaaatggtgagctccatgaggctaggaaccaggtcagttctgcgtaacagatactaaattgagttaatatttgttgactctattgaattaatatttgttgaagaaattaatgaatgcaatacaagttttgaaagtataccatttttaactttttaaattagaagagtttttaaaagattttattatgaaagaatttcaactattgagaaaaattgaaagtatataacagtaaatacccatacaccaatggctgagatataatagatgttaacatttgccatatttgcttcatctgcacaggtatatatattttttcctgaaccattttgaagaaagttacagagcacacatcatttctcccttcaatagttccgcatacaaatcctctgtcacccagaacttagcaatctgaatgcagggtatgggaagctgctgcactgtgctccaagggtgtctctgcagattgtcccagtctctgagaaggtatttaggagtcaccaacatgacctgctgatatgtaagagaaaagaaaacatgcatttattgtggatcatgccctgtgctgggagtttaccaatggcctcctgtttaaatcctttttacaattctgcccatattacaggaagttgaggttcagagaggttaagtaacttgccccagttgacacagtgtcattattcaccaagtcccttctgacaccatcaaattacctgacatttgcctcttccctttatcttctctgtgcgtgaatgcatggaggtgatttgttgggcagtgtggacagacgggaagcaatctcaatgtcctccagtgcaagaattggcaggcaaatggggatgtgtgtgaacggtgtgactatgaacatgggtgatcgattacggacatgcaagatggaaaattgcttgtggcatccagataagggaaaacaagtaggacaccagattgtatacactgtgatcaaaaccatgtgaaaaacacatgcatgaagaggactgggaagaaatacacaagaagtggttgcattagggtgagaaggagtattcatgtttttctcatccgtctttttcaaaccttttgtaatgggtggttttattaattttataatggaaaatgttaatttaaaagcaagttatttacagtttagtaagctcatggcagggaaaggctgtgctctgtttattgctcttactttttcccaacgcctactcccatgcctggcaattatagagataataaatgtgggtgtggaatgagtgcccactgggaaacctctcagaggactttgacccaggaacatatttgcacagggtttccctcagctggagaaggtttctctgggagagcaccagccaggtgtgtgtcatgggatatatttacagggtggtgagctctcctggtccaacctaaaaggtcccagcaaggtgtaggggcccttctggccatttgacatcaccagggcagttagtgctgatacaaaccacagagaatgaacaaactccaactcaaacgggaatggattttatgtcattctgggactttcaaacttgataatagaccaagcatggtggctcacacatgtaatcctagcactttgggaagccaaggtgggaggatcgcttgcggccaggagattgagaccagcctgggaaaggtagcaagacccagtctctacaaaaaaattttttgttctgttttgtttttgagacagagtctcaactctgtcgtctaggctggagtgcagtggtttgatcttggctcactacaacctccacctccgggttccagtgattctcctgcctcagcctccc

SEQ ID NO: 81262 - DNA, 1050 bp, Homo sapiens
cgcggtggctcacgcctgtaatcccagctctttgggaggccgaggcaggcagatcatgaggtcaggagatcaagaccatcctggctaacacggtgaaaccccgtctctacttaaaaaaatacaaaaaattagccgggcatggtggcgcgcgcctgtagtcccagctacttgggaggctgaggcaggagaatggcgtgaacccgggaggcggagcttgcagtgagccgagatcccgccactgcactccagcctgggcgacagagcgagactccgtctcaaaaaaaaagaaaaaaaaaaaaatgcttaatggattgtttggtaacaaatggataccaacaaatacaaaatggccatttctttttctttctttaaagaaacatttgaattggaggcttaggctcatctcaagaggttgtggacccgacagttggtggtgatgggttttgttcataaatgagaataatagttgtgagtttaatccaacacattgattgaagtgaatgaaaaagaacacataagctgtgtgaatatagtgactaatcatagactctcgggattgaaatgtaccctggggggatccaggatgcagcatcacccgggagcttattattaatggaaacgaagtatctctcacagcaccctagacctgctgaagcagaatctgcattttagcaagatccccgggtgattcctcagcacatttgagaagcagcgctctcatttgtcctgtctcctttgaggaaatcggaagactagagaggttaagtgaggacacacaggaagttctaaaaaactgtaactctggtctctcaacaccaggtctttgcacagcacttgccccatgggagaaacccggttggttttgtttttgcttgttttgcattcccaagaccaattcttgtgagccactggtcatagcccatctctcttgttttcatgcagcaggggcatcttcagtggccacgtcatctctcactctctgctggggagcttgttaaaatgcagttgcctgggtccagccccaaatccactggatctgggtgggtggga

SEQ ID NO: 81263 - DNA, 1148 bp, Homo sapiens
tcaaaaaaaaagaaaagaaaagaaaagaaaagaaaacaggtgaacgacagtcactcctggaggggttcttctgccagatagaaacaagatatcacatgcaagaggctctacacatggtctgcactcaggaaagggaggaattctttgtgctgttttgtctatgttatttgaaaaagtggattgcattgtgggtccccagaagttgccagctgtccttcctgtttccaaattcctgtgtgtgtgtgtgtgtgtgtgtgtgtgtgtgtgtgtgtgtgtgtgtattctgtgcctgtggtggtggtggccatggtgtcggcagcagcagggttgtcaggaaacaaccatcggtttcctgctgattaactcagttcctggagggccctccctagcagcaggggaagcctggcagcttggctgagcctcctccggcctctgcctcacccgccagctcttctcaccccttctgagaggcccgcctgctctcctgctaccctagagcccaggacacccttgcaggccttctgagccttctttgttctggccgtgggtggggcacccggctccacctgcctcaggttttgcctgcaggtgcatttcctttgcacacctggcgcctgttggggacttagacctcttccacatcgccccaaggtcgggctgaagagatttggatcttctgagttgcaagctcccagaaacgatgctgttaggaccctctgttcactcagagaaagaggcttgatggccggagccccagggcttccctgctggtagaaggggtgtctggagggcctctgccttccgtcatcagaaggaggttctagcaaggtaaagaggcccgtatagtactgggattttggatcccttgagtgaaggaccaggcagagaaggggagcactgctggaggatgtcgggggctgggccaggctgggcacaggcacatggccatggtgattgaccgcatttgcctcaccacttcacgtggggacctggcaaccacacaatggccctggggcatggtgtgggggctgagacatgaggcaatggtcttggtctcaaacaccccagcttccggctgctgggcgtcactgacttgctgtggcttcctggcctggctcagcattggccgtccggctcctgcagcagtg

SEQ ID NO: 81264 - DNA, 2958 bp, Homo sapiens
atgagcccatcagctcttggtggacaggtttgcacagttgcccctgctgcctgtgcagtgagctggctgcggaaggcaggactcccagggctaggagggtattagcaggctggctttcgggcctcagcaccatcgtgcttcttatgtgccgggacaggatcaggaccatgttgtgcctaacatccggcagaccctggtagcttcttaaatgatgacactttccagcactcacatatctcatctgagttaggccgggctctctagctggggcgggaagccccgcacttcctaatacctggtggctgagtcaacaacatggggacgtgtatttggatagcaaacagcgatcagcagcggagccagcctgctgccttcctgcacccgccttctagcaaaaatgtcctctggaaaggtcagccaggactggctacataattttcaggaccaggtgtaaaatgaaaatgcaggtctcatgtttaaaagtcagtaaaatttaaagaacagcagagcacgaaaccaaatgtgagcccttccttctacacgtggggccccaggcagtggcaccattgcatgcccccaaggcagcctggagtcagcgtttcccagccttgtgaagtcctcatgcttccaagggtggcaggattgggtcctctttggtagaagagctgcttggcatcctgagacgcactcgccccatccggccccacaagcagctttctcaagagctggagtgacttccacttcgaagcgcaagcacttcaccttctcctttttgttcttctctaccctgtttccttctttctttgtgaactcagaaagctttgagactcccctcccgttcctcctttcttcccctccactcttgccgcccgccccccaccccctccgcctctgtttctctctccctctttcccttgcttttatctgggggaacccctttcacaggtttgctgtataacatttctcttccattcacttggcgctgttcgattttaatgttcctttgaatgacaccaggcgagtgctccttgggtttccgaagcctctctctgaagtggctggagccagcgtcttccccaccgagggacgtcccttcagtggcctctggctctgtccagatggtctctccccattgggagcctggaatgaattctcattgtgagcattcatcactcaccacctcctccccacattcagctgtcagtcctactggccgcagtggaaagaaagcctgctccattatttctagtgacagacctggccatcattcccaaggtctgtggctcccatgcaggcctcgagctgggggtggggcagggcatgggaaagggttaaatagataagcccaagacacagtcctggcccccctcatcctcttcacacaggaaccagaagggtcttcagcaacatgcatgggatcgtgttacttctggcttcccatgcctgagaatggcatccagacatggccttcaaggctctgtctgcctcggtgaccccatctccagccactgttcccagttcacatcggggaattctccggccctcctagagaggcagcccaggttgctaaagaggcacttcaagcacatttcaaagaacgcaagaattctggagaggtggagagcaggagaatagcacaagcaagagccagctccagggtcaggctggagatgggaggtcaggcatggtggggaggacgggaagtggggctgggttcaaagcctggctcagcttggaggacctggcaggggctcggggtgggggtggagtgtctcaatcctggtgcacactggagttattcgaagggcttttaaaaattatcaaagttgttccaggttcattccccgggtggcccacacgctgtttttaagtttagctctccaacccttcttcctggttctccccttcccttggaagaaagtccctggtccagcctgggtgttggcactggcatttgccctcccagggccactgggactgggaatccccaggagggctttcgaaagtgtcaggaaccgctccttccactggggcttttctccactgatgggaaggctgccttgctcagtcagccccaggcccctggacagaaggaactaggggagcactaagcataggtgtccctagagagtcagctggaagggacctagttcagaagaggaaactgagtctcagtcaccagcgagtaccaccactggtggtactcagagcttgggtagcagagcttgggcttttcagccttggacaccaccagctaggatggagtgagggctgagctggaatgcttctgaggaaatgatctctgacccaagcatgccacaattatgagagcatcttcagcactcataagcatcgcaggctggatctctttctctgacctttggatgtggggtgccagaatctgtgcttaaagatgagggatgtcgggcttctgccctcaaagaactctggatctcgagggagcagtgggcctaagcatagagtattctaatacggtcgctaggcttccagagctgtaagagacaggcttgagcagggagagacgaattccccgagggaggccttgatgaggaggtgaagaggcagtgagggtctggtgtctactcccctttaaccacaggcctggccttccagccagggtgctgtaccaaagtgagtgctggggccgctaagtggtgcccaggtactgatttcccctcgacccgcagtcggctgggctgggtgggtctgtggatggtttggaccagccttgcccgattaccccagtgtacggtccaaatatgattttctatgtgtgccatgcagatcaggagcactgtagcaggcccctctctctatcaccagtgcatcactttcatcatggagcaggttgggaaacaagccaaaggctggccccacagacacaaagaataagtcacaactcacccacgtggtgtgtttcctcctaactctttagtt

SEQ ID NO: 81265 - DNA, 1867 bp, Homo sapiens
gccagaagttcaagaccagcctggccaacatagtgaaaccccatctctactaaaaatacaaaaattagccaggcgtggtggcaggcgcctgtaaccccagctactcgggaggctgaggcaggagaatcgcttgaacccaggaggtggaggttgcagtgagctgagattgtgccactgcactccagcctggatggcagagcgagactgtctcaaaaaaaaaaaaaaagtgcttctgatgtgtacagatgatttcacctgatgatttcactggcagggcagatgttctcttcatttcgtgggtgggattctgagaggttgaggccatgcccaggtccactatcttaggcaaaagtggaccagatccctgccttgtgacccactgtggggctttctgcagtgacagctgggagtcttgccccacgactggatgaggtggtctcacctcatttcactcctggatccaatacgtgcttggctgagtgctcaaccgagtattgaatgtaatctaatacagtccaatccatcttgatgactgcaagtcatgattaggagccctcggtgctgagctcaggtatggaggtgtccaagctgcttgccccacccctaatggccataaactgtcactgggtcattttcagcctgcaccctagccagccaccatcatagcctccagcagcgagtggcacctctttcacctccttgggtttcctctgcatctgccgtggtctgggaaactggataaccgtgcttgttagaactgagtccaaagcctccaagcaaggggcgctgtcccataaagaaaaaagtgcctgggacaccaaagtcccctcttcgagtcacccacatctgtttcattctggactctcaactttttcatatgctctgcagttctctaagtcttttgggggaaatttgaggtggccagagaagagatctctggacaagtgtaatcttgctatcacatattaggaaagaccataatgtacagcagaggtgcctggtgaggaaacagtcagcatgccagtgagaaccagagcctgggggcactttgtgcatggtggccatactgctggatgaccatgccagcttgggctgtggctgggtgaggtcacccaggcctcaggcctgtgcactgtggccactgcctcctctgcacgtagatcataccgcctttgttgaggaagtcgtgtctgaggatctggtccccagctctaggcaacagcagaaaccctggtacccagatcccccagtctccagggaggtgtccttagtgctccggatggggttgttaaagccacatgtgaacactccgcagattttccctgcaaggtacaagccctccagcctcttccacccaaatgtgtcaccttgggcagcagctccctgaattctgttctttcttgaaggaatttctgttctcatcagttcataagcacagtgccccttctgtttcttggcttaatgctccgggagttcacagtgatcccgatttgacttcacagtgactcctttaccaagccttttttgcttgtttgcttgcttttaattttgttttttatcagagtaatatatgcatctttttttacatcaaacaatactgatgggcttctagtgctaaagcagcaggccccgccccacctcgctccccaactccagccctccagccagttaaccatttgcaaactgcttacttcctccttcctgttatttacgtccatgttctgaaataatatgttactccagtgatttcttgatttatcaatttcggacattatcttttgcctccatattgttgcaagtgaggacttatctctccaccaccctatcattcctcctcctcctctcttagttttatcattaggtcgca

SEQ ID NO: 81266 - DNA, 1093 bp, Homo sapiens
gggcccgagggctctcatagaggagacctgcgggcacccagggggccgagctgcctttggagactgagccttgtgcacagcatcacaggccagggctctctcccttggctcacccaggaccctatgggaggaggccacagccaggcggccagggcagggagcagccgaccctgtaataaagctgatggctgccggcctgtggcgcccctggagagggagcaactccccttgggggtgtaacctgtttcggggaagcctttacagcagctctttgatgtttctccagtggaactgaatttattttttgtacttttaggaattaacttgcagtgctcagcctctccctccccagaaaggagagaaggagaaaagaagaaagggtttgcattgtcaccgtgattggcaccgcctgtgaatgaggggtcactgcttcaggctgctccttttcaagcaggcctttctcccctgcacgctgcattcacgctagaacattctttctttcaaagcttctgtctttctctcccccgccctttgtgtctctgccttccttcccttcacttttgcctttcattctgagccctcaccacctcccttaggcttcactctctttccctcttttttcccctttttcttcttctattcagttcctttttttttcccctcttgcctctctctctcccttttaaatttcttttttctttttctttttgaatagtgcttctgttttcaagggaagagaccagtagggaagtgggtttatttgagagagggagaatatgttttttctccattgctctaaatgtgtaaaacaacaacaacaaacaacaaaaacctgttgaagacactgttttcttttaggctcctgctttaaagagggaagggtgtttgggggtctccaccagccgtagggacctgttcgtcacacaggaggagtcctgagtgggtcagcagggataggtgactgaaggcgtgaggtgggactggcaggatctagacatggccttggcatccttcccttctgcctggcccaatatggggctcaagatgagggtgaaggcagaggcggatgtggtcccacgggcctccccactct

SEQ ID NO: 81267 - DNA, 2403 bp, Homo sapiens
caggtgtcacctccccctttgactcccccacataagacttaatcacatctccctttatccatctcctgggagttgtatgtcatagctgtcaactcactaaggtaatcatccatttactgtggctgctggagggcggagactgttgtcttcatctctctagctcctaggagaatggtgtgctgtccatgtttgccaggcagaaaagccttgcaaaacctcagtcactctacagtgacctcagagcttgagcctggtcaactggaacagcagaaagaaggaagctggaaatggcggatggcttcaaggacgtgagccatggagaggttagacagtgacggctgacaggtttgccgtctgggaactgttgcggacctgggtaagggtgcagctctagtgaggtcaacactgaggtgagcgcagaagccatgagagatggtttctctgagggagtccactcaggccaaggcctgagcccaggggccgctgggatgcaggaggccagggagtggtggtggtgcgtggcctgtgagctcagagagggttgtgtggctgctgccagatgaggaggaggcccagctcaaagctcctgtgtttggcaaagggctgccaccttccagaggacagctgagctctggtggaggggacagatatcatagagtagagcttgaggaggtgatggaggacatagatctggccccagtttagggggtggagagaaaacaagaaatcggacattgccagggttgcagcgggctgtggtgcatgaaagctttgagctggaggccagagagggaagagacgcgaggtagcaggggccaggtctcttctggaggacctaccgcatgtctcggcacatttctgccctgtagaaggggcacgtcgggcagcgggcctggaagaccctgggtacctcctcaaagcacagaaaaagggacctggtcacactctgggtcccccagggccacagagaaagcttgtggggctcccgtccagccagggttcccaggggccccaggaaaaggcatggtctctggggggacacagggctctctgcagaaggaagctacctctgggagggagccctgagatgtcagtggcctgggctatgtgagatgagggctccaggcccaggtgtgctggcacaagccatcaggcctggaggtgtggccggcaggaccctcccaaggcagaaccctgtgtgcccttcctcctgcgtacccagctcagtgcccagcccatagtaggcgcttcatgaatgtttgctgaagtgtgaattgcatgttgttagcagatgtagagtggaaacagtacagctcacagccaagtgctgtgtaaattgtaaagccttatgcaaaggggagtcctatccctgccccgcagagcccagggcctcagggaaggggccatatcctccccaagaagactagaggagggtggaggagggcggagggacgagtcagtgccaggtatggagggcggcaggagaaggaagggctagtgaccaagccagacacccagacgggtggggacaatgagcccactcatcagtagtgaccagacccaggtagaggaagagtgtcagttggatgtggaaatgagggaggtggatctgaagccccgtgatatggtgctgagcccctactatgtgcaagttgggtgctaacacccacttcccaggaggagggtctggggctccaaaggggttggggaaaaggctgtcctccctctgagtctgggtgaccaagacaagatgagctgtggtgtgggtaaaggtagcagggagtctgcttatctagggacgtttgggatttatgctccaggaaagggatcaagatggctttggggcaggcaccatagagatttgagcctgggcccaggggaggaggccaccattgctcttcctggccccacctgcttctcagcatactgctggcaacccggaagctgccagggcaggcctgcaaggccatcaggtttttccagtttgggcaagaacgtctccttacgcccatgaagatgcccacgcacagccacgctggcctagagatgaaagaggttctgggggtgggtggggacaggacgagggtccgagtttgaggcaggcatgtttccagggccccagtttcccaggtggcagggcacctagcagtcgattctcccctaagaactggcatcaaggagtccagctcctcccgtaactaacgtgtggcccaggcgagctgctgagtgctaataatagcagcaaacaccacaagcgtgccaggttctgctttcagcactttacatattttaactggtgaggcaggtgctcttggtaccaccccactttagtaaggagaaagagtcatgccattgggaagtagcagaggatgcaaactcaggccttcaactctagagtctgga

SEQ ID NO: 81268 - DNA, 1023 bp, Homo sapiens
ccctgtgacatccatggtcctgccctcgagaccctcttccgtctctccttcccaggccccactgccctctggttctcctcccgcctctcctctaccctgcagccaacaggctgccttggcctcctcctttgtgagctcctagtaatgagcagacccaggagctcctggctgggatgcccatcatgtggctcccgccttctctgaacttcttatctgaggcgagcatctccctccgcagctcaactgcagggtccagtgtgggtacccaggcttccaccccttgcataggtcctacccctcagctcactgcatgaaagtatcattgttaggtgactgaggaaggcatggctttgcgcgctgctcctgcctgcctctgatgatagcctgtgtggacggccgcatgtgtctgatgtctgcgtgtgtacgctatcagctgatacgttgcaccagctgtccctccccccaggagatacatgaaggcattacgtgaatgagagaggcattctttactcctcctggcataaatccgtactcgagctgggtgtgtgggtgactgcaaaataaatgttgattacagtagtggcttcgggaggcagctgctgccaggggctctgctggcatggaggcccagggaggagtcataacactgccatgagaacggagagggcttgtgcccaggccatactcttcacctgccctcagacctcagcaccttccctacctcctgcgcttctgtccgctttcccttcccttctccgtcccatgcttccagcctgggcaggccctcctctctggctgggtctatgggggaaggggtcttcctaatcagcttctcccttctctaggcctccctggacccctccacccaacctttgggtaataaacaccacagatcatcctcatttgtctaacgggctcagttaaaccccctaacaactccaggaagtgagaaccattatctcatgccacagatgaggagactgaggcacacacagaccaaggtgtgagtggtggggccagact

SEQ ID NO: 81269 - DNA, 1076 bp, Homo sapiens
ggaagggctcagtgattagacccttctcctgtcactatacagacaaggaaaccaaatcccagggaggttgagacacttgcctgagggtgtacagctcctaagtggcagagctgggggtggaggacaggtctgctggactgagaaccatgtatccctcccttctaccacctgcagaggaaggggctgtccttccccatttcctccccacctctgctgcttctcatctccccctcctcggaccttgctcctggggcccaggaggtgctgagccagccttttagtggaggactaccaataccatggcccctccctggcctgatccctggcgcagcaacgcttctcacctgcagccagacactcacacagctcgagggctcctgaagacctagggcccctttcttcatccccatgtgacttttttttgtcgcaggggacttgatcccattttccaccagtgcatctcttctcttggtcactttgagatgctggggccacagccatcatcggtttgcttcattttctgcagtcaatctccattcccagatctttgtttctcctgtcatttctgatcactcgagattaaaaacagcaatggagaagccaggaggaggctgagctaaggaggactcggagtgatgtgacctcagtcctcccaggaacacaggaagaagaggagtaaatggggaagaatgtgattataatcagctccaatcctgcctttatctcttactggctctgtgacgtagacaaatcacagcttctctaagactcagtttgctcatctgtaaaatgaaaattaaaacgtctatcttgggcctggttcggtggctcacgcctgtaatcccagcactttgggaggccgaggtgggcagatcatctgaggtcaggagttcgagaccagcctggccaacatggtgaaaccccatttctactaaaaatacaaaaaaactagccaggcgtgttggcgcatgcctgtaattccagctacttgggaggctgaggcaggggaatcgcttgaaccggggaggcggaggttgcggtgagctgagatggcgccactgcaccccagcctgggc

SEQ ID NO: 81270 - DNA, 1039 bp, Homo sapiens
gggggctgcggggccggagacctgcattctagcccttgctcccccaccgtctcactgtgtgaccttggaccattcccttcccctccctgggcctcagtttcctcatctgttaacagggccgggtatggtgcgcatcacgggggtttgtgggttggtggccctgtgtcaggggcccagccactctgactcccagaggtggggctcagtgaatctgtccacagagaaaggggaagcaaggcagagacaggatcgcaggaggaagagactctcgaacttcccctgcccctcccccgtgccggcggcagctccctgggcctctggctcctgaggcctgtgggctgggcagaagtgagactgtggcaaggggccccgaggcacaggccttccagctctcgcttcctcttcccttctgcgcatgtgagtagagtttcccttgaagcctcctgcgaggaggacaacaggggaaaccaagaggctggtttccttaggcggtgaaatcccgtgcatgtttttcacagcgggtgtacaggcctggaacttcctcttctcctcccacctggttacctgtcccgcccactccagcttcagcctctccagccccagggccctggactccaaggggcaaaaggcccagagccacatcctggagggcttgaatgccagacccagggtcaggagccccctccccgctcttgctctgttgggtcctgaactgcctccacggaagccagtcctcagtccctgtccccaccccaccccacccccatactgcagcccccgcctcccagagatccgggtgcttcatgtggactgagcttacgcaagtcaactccccaagggtgagaactttaatttgccccttctatctacccacaagcaagcacctaataggtttagtaaatgtgcattaaatcagtggctcaagcctggcacagtggcttaggcctgtcatcccagcactttgggaggccaaggtgagaagatcgcttgaccccagaagttcaagaccagcctgggcaacttagcaagactccacctc

SEQ ID NO: 81271 - DNA, 1029 bp, Homo sapiens
tgagcctccgcgcccgcccttcagttggtgtttgagatctccctggtggtgggaactagtcaaagagtgtccaggtggccacaaggtcctgttggttcttccttcaaaatggctcctgtcgtgcgagaccaggttttgggtgtcttcacccactctctgccctgagatctgtgtcccaagggacaccagccaccctgatcccacccgaccctcctctgctcctagagtgatggggtccccatgagaggaaaggagcactgttgtgagcagtgtgggatgagaggaggtgctgtcacagcttggggaagggaccctggtaaccagcaggtaggtcaatagttcccgttccaagtaggctcttgtgcccattttacagatcaggaaatggagacaggtggaggagccaggcgacttgcccagcctttacaggacccatggggcaaagccgtaggtgaagtcacagttagagattccagagctctgaggagacggcgtccctgcttgggtggggaaggtcccctgctggcccccagacgatgagtctttgttccctccccaggggctggcctggccctcaggcctgggaggtggaggtgccgagccctgggaaatagggcagtcctgggcttccggtgtcactgcacgcccctccccctcccgcctttgtttcttggcctccacagcctcattctctctccctccccctcactcaggctcctcctctgcccccccttccctgtctcttcatttcttctctccctctccctttctctctctctctctctgatatgtcctcccttcccccactcccagcacaactacaatcaggcagctcatctgtgtctatttccccgcctttcacattgactttctccccaccctggggaccgagggcatcctggtgggaggccacgccacatcccagccagtggtcgcccctcatcttgccagcctggggcagtctgagctcccctttctcctggacatggggggagcttttgttctgagtccttagcacaagtggtggga

SEQ ID NO: 81272 - DNA, 1071 bp, Homo sapiens
tcctggggcgtgaggtggggagcgcactaccccacccctgccccccgggttgttcctagtattaaatggctgactggggacctcgtgagtgtctgtaatgagaagctgtaggtcttccgtggtgtttgtcgtcagttgttggcagctctctgtgcccctgccctgcccccacttaggcacaaaccctcaggaacaaggactctgggttagtccctttctacagccaagcacaggctcctgacacagacgcaccttctcaagtccaaactacctgttcatatgggaaggggtttgcttcaggtgtcctggtgtgactataaggagtggccccttgtagaaaggggcccggtgtggacggtcagctccatggttacccttgctgtagggaaccacacttcagctcccacaggcagttcgctggctgacgtttttgccctctcctcacctctaaagcagtgttaactgtttccttatgcccgcgcccttgaggttggcgggagggggctgattcctggtattaggctgcaggggaaaggagagggaagggaactaacgacactgacatcctcatctcactgtcccatgagtcaggagcctcttcccccccatagagatgagaatcacctgatgtcacacggctagtagacggcagagcctggattgaactcagcatccagggccaagggggaagcactggcttggccattgatgctcagttcctccttcttgctggtcctgcctttggggaagtttacaaaaactgctgaacacatcatttgcccaaaccccacaacagacaggagggttgccgctgggtgctgtgtcagacggactgtcgcgacaggaggcagccatgctcctcagcgtgctctgcaaaactgacagtggctggagggcactgggggtggctgtggtgggccccaaggggcaggacccctgcctcattcaccttgctgtctccaggcacaagccctaacccatagcagggatttagcggctatttattgtacaaatgaatgaatgagttctctagtggttgtcctcagaatcacttaagctttgctgaatttg

SEQ ID NO: 81273 - DNA, 1040 bp, Homo sapiens
ctcactgcaacttccgcctcctgggttcaagtgattctcctgcctcagactcccaagcagctgggattacaggcacccaccaccacgcccggctaatttttgtatttttagtagagatgaggtttcaccatgttggccaggctggtctcgaactcctgacctcaagtgatctgcccgcctcagcctcacaaagtgctgggattacaggtgtgagccaccatgcccctgccaacagtgattctttacagttggttagggccttataatgaaccaagctgcttcacctgtgttaggaccgtgggccctcacaacccttccatgggtgagtgttttcatccccgtttttcagatagggaaactgagccactggcatgactttgcttagtcacttgcaagtgactgagctggcactcgaggtcctcgctgactgcatttcccagcagctggacattggggtggggtgtggtggtttggaagcacgtttagcccctgcggcctattccagatgcaccctgaccccccaggccgaggtttccttctatctgatcccttccacgagagcctcactctaagcttaatagtttaatctttggtgtccgtttcaaggaggctaaattcctgtctggggtatttttagccgtcctcaggaaggggaagctccgctgggcgctggggggagggggacgccttgcccggagccggtttcctgaggaagggccgccgaccgtgtgcctgaccgtggccctgggagaggctggtagttggtccgttgggagccctgggagcaaagcaggcgagagtcgccccagtaatgccatcccctctcctcagatgtgccaggtgttgaaccagggcaaggggtataggcccaggaggaggtcgccactgcctggcgtgctgcagtccttggaagcctggagagggcacgagggcaggccaggagagccgggatggctccaggagcaggtggacctcgagccacgcctcggaggctggtgggaggagcaggggtcagcagggttgggaaaaggctgccccag

SEQ ID NO: 81274 - DNA, 1060 bp, Homo sapiens
ccggccaccacgcccagctaattttgtatttttagtagagacaggatttcaccatgttggccaggctggtctcaaactcctgctgacctcaggtgatctgcccatcttggcttcccaaagtgctgggattacagatgtgagccaccatgcccggtctttttaaggaattcttgaaggacctgtagaacacaatttgagaacaattgaggaaatcccacctccctgttgtacagatgggaagactgaggccagcaagggggcagagcttaccccaggatctcccagggagatggaggagatggtcagatacacagcaggaatcactgctccctataataacaagtgtgccctgttcccaaggccaggagtagaaaagacatcagagccagacacacccaaaatcagccaagcccttgtctgtgctgtgtctgttgtctgtctgtgcaggagtgagccagcaatattaaccttcccttctccacccacagcgatgccctcctagctagccgtcacgggatggagggcttcatggactcagggacacagacggacgccgtggtggtgctgtccttggctcaggccgccgtgcttggcctggtctccgaaaatgagctctttggagctaccataagcgccgaggccttctacccggacctggggcccgagctttcaggggcagccatgggagagcccgagccaccaggccccgacgtctaccagctggcctgcaacgggagggccttggaggagccggcggaggaggaggtgctggaggtggaggcagcctgtgagaagcacacccggcggaagacgcggccacctgtgcggttggtgcccaaggtcaagttcgagaaggtggaggaggaggaacaggaggtctatgaggtttctgtgccaggtgacgacaaggacgcagggccagcagaagcccccgccgaggcggccagtggcggctgcgacgccctggtgcagagcagcgccgtcaagatgatcgacctcagcgccttcagccgcaagccccggacgctccggcatctgccccgaaccccgaggccggagc

SEQ ID NO: 81275 - DNA, 1059 bp, Homo sapiens
accttgtgggtgagggagtgctgcttgaggtggtgaatctggctgaactccatgccgcattcagtgcacacgaagggtcgcacgttctggtgcttgagcatgtggttctgcaactggctgcggtagtggaaggacttgtcacactcgaggcactggtagagggtggggccctggtgggaggccaggtggcgcttgagctgggtcagggtggagaagtccaggccgcactcgacgcagacatggcagcggccactctcatgcttcacttcgtgggccttgagctcgctggggtaggcgaagccgcggccgcagaagtggcagctgtagggcttgacctccgagtgcagcagcatgtggcgcttgaggtggctggtctgcgtgaaggccttgtggcatacctggcacttgtggggccgggtgccctggtgcgtcagcaggtgcgtctgcaggtggctgggctgcttgaagagcttgctgcagtgtgggcacgagtgtggcttgatgccgttgtggcccaggatgtgcgtcaccaggttgtacttggacgtgtaggacttctcgcacatgcggcactgccagcgcttctggcggtcgcccgcctccaccagataggagtcgtcaatctgcacgttgatgtccagccgatccagctgggccttcttgtggcgttccacggtcgaacccgccgtgtcagcctcgaactcactggcctcctgccacacgaagccctgttccggcttgacaggctccggggactccatgctgggggcctcggggtcactcaggggggccaggtggggtggctcgaacccacactctgtgggcaaggcctctggcccaggcagcgccatgctgggctcggggaagccatcccgggccggggccgggaagtgagggtcatatggggccacgttcagctccggcctcggggttcggggcagatgccggagcgtccggggcttgcggctgaaggcgctgaggtcgatcatcttgacggcgctgctctgcaccagggcgtcgcagccgccactggccgcctcggcgggggcttctgctggc

SEQ ID NO: 81276 - DNA, 1377 bp, Homo sapiens
cacatggaaaagcataaagagagaactgtccataaagaacaggattctgggccaggcatggtggtgcatgcctgtaatcccagcattttgggaggctgaggtgggtggatcatttgaggtaaggagttcgagaccagcctagccaatgtggtgaaaccccttctctactaaacatacaaaaaattagctgggcgtggtggcacgtgcctgtagtcccagctactcgggagactaaggcaggagaatctcttgaacccaggaggcagaagttgcagtgagccgagatcatgccactgcactccagcctggacaacagagtgagagtctgtctcaaaaaaaaaacaaaaaaaaaaaacaaaagaataggattctggcccagccatagaggtgggagtgggctggggtccggggaaagcaggttccccacaggctcaggacaccgggttgatgtgttctaggtgtgcgggaagtccttcaaccgcatgtacaacctgctgggccacatgcacctgcacgccggcagcaagcccttcaagtgcccctactgctccagcaagtttaatctcaagggcaacctgagccggcacatgaaggtcaagcatggcgtcatggacatcggcctggacagccaaggtgggtgggccaagcgcaatggacagagcaggaatgataccaacatgacgcactcaggagcctcctgcccagttagaggagtggggaggctggccaaggctgagacttcgttggggtgggctcaggtctggaaggggggtaccctggaaggccatgatgacaataacgatgggatatttatgtcttcttcaaaggacttaaatgagatcacgtaaacaatataataaaaatcataactaacatttattgagtgctaactgtgtgccaggcctttattaactcatgtgatcctcaaagcgaggttggctctgtcattgtcatcgttttacagatgcagaaactgaagaacagagaacttagatagctcatgcaagatgacaacacagcaggaggtgacagacactttatttcgttaccgtgagataatatttcaaataagtgtatgggaaagaaagttagaaaggggaaaaaatggcagccggaaagataagggagagccaggtgaggtcccaactccaagtacaccatgggaggtcctaagcaagggacatgcagaggggagatctgagcttcccagcaaccaaggcaaaaaagtgtcaatcagtcacactcttcacaagtgcctgccagagactataacccacatactcatgaaagggccagacagccctgacgttaagatctgggagaaattttaggagaggatcctatgcctcagcagttcgtagaagtttcagaggctgt

SEQ ID NO: 81277 - DNA, 2090 bp, Homo sapiens
tgacagtctcttcatggtcccagttatttccaaaagggcacgttctgctctggttccttctggtgggttagcaacagggcagatccactagaatacagctctcaaaatctactgcacatggactcacccaaagtgctttacaaaaatcctgatcccaggccacattccagatcacttacatttgaacctcaggtccaaactcaggcatcagcatttaaaacattcctcaggtgactcccaacatgcagctgatttgccagccagccctctgcagtctggatcaaaggttctcaacatgaggtccctgaaccagcggctgctttgctaagaactgggaacttgtgggaaaggcagcgtctcagaccccaccccagatctactgaatcagaaactctgggggtggggccagcactttgtttcaacaagccctccaggagactctgaggcactagtctggtccagtgggtctcaaacttgactgcaacaaatggcccagagatctttttgaagtgtagagtctgactcagcaggtgtgggtggagctgagaggccagcaagatcccaggtggggccgaggctgctcatcctcctaccacattttgagtagcaaggagctaccaagagcagccgacggggtttcattctcgtctactggaagcaaccttaatagacaactgaaaaacaaaacaaaacaactgagatacctgtttctgccagaaaacccaggccattcactggtcagctgttccaaaaccagagttaagctactgcagctgttcccgcgtgcctgcctgcattccagtaaataatcccacgtggcaagtcagctcacctggttactgccaaagcatgttcccagctggtgtgactcagaggcacaccagaatttctttattataatttggcgatagggtcttgctttgccacgcaggctggagtgccgtggtccgatcacagttcactacagccttgaactcctgggctcaagtgatcttcctgccttagactcccaagtagctgagattataggcacacgccaccacacccagctaatttaaaaatatttttgtagagaccaggtctcactatgttgcctggtttggtatcaaactcctggccttaagggatcctcctgcctcggcctcccaaagtgccaggattataggtgtgagccatcatgcccagccagagcaccagaaatagctcccaactgtagaaggagcctccctgtagcgctgttggctccctccttcctgtggagtctccacagcagtccctccccaccatgaggccagagaggctaacagctttgctgtcacccaacagaaatgctttaagtactgaccactgctggagggaaaggctaccgctaacacttgggatgttttctgacagcctctgaaacttctacgaactgctgaggcataggatcctctcctaaaatttctcccagatcttaacgtcagggctgtctggccctttcatgagtatgtgggttatagtctctggcaggcacttgtgaagagtgtgactgattgacacttttttgccttggttgctgggaagctcagatctcccctctgcatgtcccttgcttaggacctcccatggtgtacttggagttgggacctcacctggctctcccttatctttccggctgccattttttcccctttctaactttctttcccatacacttatttgaaatattatctcacggtaacgaaataaagtgtctgtcacctcctgctgtgttgtcatcttgcatgagctatctaagttctctgttcttcagtttctgcatctgtaaaacgatgacaatgacagagccaacctcgctttgaggatcacatgagttaataaaggcctggcacacagttagcactcaataaatgttagttatgatttttattatattgtttacgtgatctcatttaagtcctttgaagaagacataaatatcccatcgttattgtcatcatggccttccagggtaccccccttccagacctgagcccaccccaacgaagtctcagccttggccagcctccccactcctctaactgggcaggaggctcctgagtgcgtca

SEQ ID NO: 81278 - DNA, 1015 bp, Homo sapiens
tggtaggaggatgagcagcctcggccccacctgggatcttgctggcctctcagctccacccacacctgctgagtcagactctacacttcaaaaagatctctgggccatttgttgcagtcaagtttgagacccactggaccagactagtgcctcagagtctcctggagggcttgttgaaacaaagtgctggccccacccccagagtttctgattcagtagatctggggtggggtctgagacgctgcctttcccacaagttcccagttcttagcaaagcagccgctggttcagggacctcatgttgagaacctttgatccagactgcagagggctggctggcaaatcagctgcatgttgggagtcacctgaggaatgttttaaatgctgatgcctgagtttggacctgaggttcaaatgtaagtgatctggaatgtggcctgggatcaggatttttgtaaagcactttgggtgagtccatgtgcagtagattttgagagctgtattctagtggatctgccctgttgctaacccaccagaaggaaccagagcagaacgtgcccttttggaaataactgggaccatgaagagactgtcagtgttacagctcttttagaatttgttaggctgggcgtactggctcacgcctataatcccaacactttgggaggcaaatcccaaggtgggcagatcacctgaggttgggagttcgagaccagcctggctaacatgatgaaaccccgtctctactaaaaatacaaaaattagctgggcgtgttggcacatgcgtgtaatcccagctactcgggaggctgaggcaggagaatcacttgaacctgggaggcagaggttgcagtgagccgagattgtgtcactgcactccagcctgggtgacagagtgagactttgactcaaaaaaaaaaaaaaaaaagcattcatttagcaggttttccagtttttaccagaaatcgccccacccccatcccaccacccaaacaagattttttaaaaagactgt

SEQ ID NO: 81279 - DNA, 1069 bp, Homo sapiens
caactggggtgatgctactggcatctcatgggtagaggccagggatgctgtcaaacatcctacaatgcacaggacagcctcacaacaaagaattatggccctaagtgccaaggttgagaaagtctgccttagacctgtcagggctgcccccagcctggggtctgtttcccccaaaacacgcacatctcagcggacagggccagaatgcactttgggggccagccacagcccctgccagcctcccagttcccccagatcctaccctgggcttcccctgtaagagctttataatgagatttcaattttataaaattataaggggcctcttaggagtttttgcctgacatatctttatgaacctaccctgagtgtttgtccctggagagccaggcccaaggataccaatggctagaaccaacagaaaagcacagctgccggcaggaggcctcaccctcccgcagtgtgaggcagagcagcacagtggctcagaacaacagcatgtgctgggtgacctttggcaagttgattcacctctctaaacctcagccttctgagctgctaaatggggctgttgtgattgctggatgaggcgaggcctgcgaagtggctggcatgcagcaggtgctaatgagtgctgcaaaggtgatgtcacgcaggcagcttcccgtggccagagaaacattgcagagaagggataagtagggcttagtgactttgacgggtcaatggaagaatgacccaaagaaggcttcaaggccaggcctgcagttctccaccacaaaggccctcactgatagcacccactcccccacactcagctttggggcctaggtctggtcacccagctagaagccacaggaccctgaggcgtccgagggtgggaaggctgagaggcagctgagactcctggaggccgtgactgggaagccctctctttagaaaggccatcagcttcctgcgtgggggtgactggctcctcccgagagatggcagccaggtctgactgtgcccctctcttacagaccccatgatggagctgacaggcactgacccttcagagctcgacggc

SEQ ID NO: 81280 - DNA, 2196 bp, Homo sapiens
cccagaagacccctgtcctacatccctttctggaagtgagtgtccctacagtggattgcaacacatgtcgtccacttcgaccctagctggagtgcctcaccagggggccccactaggaacaaagccaggacaggccccgcgtcaggcacacactaacaaaaccagaagcatggggcagggcagggcggagtgagggcatcacaggggaccaagaagggctgtccttgggggaggcccaggaccacctgtcggggagggggaccgcagtcatttctcattcctcagtgtccaccttgcgacggggatagccacgagtcagcagcttcccggaaagagcaacgtattttaaaaaggaaagtaaagcccacagagggaaatcaagggtttttttgagcaaagggggtcttctgaaggtaacttattatttttttctttccaactgtgtgtcacctatgaccttttctgatggagatgcattttctttttccaagcgtaagcttcctaatgtgctgtgcgtgcttcctacccacccaccccgagcagcctggccgggcaggactggggctccatggggactgtcaccctggccctggaggtgcagccgctggcagcagcctcagcaggctggggtgggaggcaggagaaggcagagctgggaagccctccacccctgcctggctcctgcagtcgctgacttgctctgtcccatgtcccatcctcggctgtcagggctgctgactctgctcagccaacagctagctccctcgctcgcctgctctcttcccctctgttcccacgccagctcctgcccctggaaccagagatgacaggcccagggcagtgaaatagcacattcaggaactctagggcacccggacccccccacccacttgcctcctgaggcctcagtggggaggggcaagcaggggtcttccccaaaggcacagatgaagccactagcttcagcctagaaacccggagaagggaacagcctgcggtgggaggaaccaatctgcagcgcagccacccccaaggctggatccttaagtgaaggaccaagccaggcctcagggtgactgtgatcaggactgaggggtggacaaggtggcccaagtatggcttccagaccccgaagccccacgacctcccaggtgcccgccatgatgaccctcaggtggcagtgaccccgtcactgtataagacattttctcctgctgagcagaaggcatcatcccctgcaactacctcttcccacgtctttctcccctggtaccaaaaagaaccctgtacctctcctcctcctcctccctcctgccagtgcagtggccttggtcttggaaactgaagggagaaggtctggcccccagggtggggctctcctttccctcccccagccccgccgtcagcactggccctctgtgaggttcgatacttgaacgccccctgccctgtgccttggacctgggcaaagctaggaggaggaaacagcacaactcacagtttgagctggggggtggtcttggcaaggctcctgtctgtacccctccctaaccttctcaaaagaggtgcacagcctctcgggtgacttggaaactcctggacaaattccattctaacttattttgacatgtatacaaaccaactgtttagagattccacttgtgcaaagccctactgtgtttttatgttcctgtttaaaagagaagtttacttagcaataattataaataaatgaatattctttagtgaggtgactgcaaatgcttctttccccagctcttggggacctggccctcactcccagcaggaactcccagcaaaacttcccagccccacacagcagggctgcactctcccagggcccgggggaggctgagaccatcctctgcactggaatggccccctgcagggccaggcgcctatagccagctgccccgggcccaagagagtggtgtgggccacggcccctgtattcccaccacttgcagagaaaagctgcttcccctccctacccacccacatggcttcaggaaagaagccagctcccgatgccaggctgggcttcagaggctgcgttctgcagagctgccagccccgtgctggtgacaggcaagaagaggcaggaagccttgagcttcctcccaggggctgggcctgctagagccagcagtccacgtttcttcttatagccctgag

SEQ ID NO: 81281 - DNA, 1040 bp, Homo sapiens
ctgcaagtggtgggaatacaggggccgtggcccacaccactctcttgggcccggggcagctggctataggcgcctggccctgcagggggccattccagtgcagaggatggtctcagcctcccccgggccctgggagagtgcagccctgctgtgtggggctgggaagttttgctgggagttcctgctgggagtgagggccaggtccccaagagctggggaaagaagcatttgcagtcacctcactaaagaatattcatttatttataattattgctaagtaaacttctcttttaaacaggaacataaaaacacagtagggctttgcacaagtggaatctctaaacagttggtttgtatacatgtcaaaataagttagaatggaatttgtccaggagtttccaagtcacccgagaggctgtgcacctcttttgagaaggttagggaggggtacagacaggagccttgccaagaccaccccccagctcaaactgtgagttgtgctgtttcctcctcctagctttgcccaggtccaaggcacagggcagggggcgttcaagtatcgaacctcacagagggccagtgctgacggcggggctgggggagggaaaggagagccccaccctgggggccagaccttctcccttcagtttccaagaccaaggccactgcactggcaggagggaggaggaggaggagaggtacagggttctttttggtaccaggggagaaagacgtgggaagaggtagttgcaggggatgatgccttctgctcagcaggagaaaatgtcttatacagtgacggggtcactgccacctgagggtcatcatggcgggcacctgggaggtcgtggggcttcggggtctggaagccatacttgggccaccttgtccacccctcagtcctgatcacagtcaccctgaggcctggcttggtccttcacttaaggatccagccttgggggtggctgcgctgcagattggttcctcccaccgcaggctgttcccttctccgggtttctaggctgaagctagtggcttca

SEQ ID NO: 81282 - DNA, 1984 bp, Homo sapiens
tcccagttgcagctgggggaggctgagtagagccacgaactatggcagctacaatattgggttgtagagggcagcagggctcagctgggtggccccaggagaggcgaggccctgagagaaaggctttctaccctccaggctttggctcccttggcctgatgacgtccgtcctggtctgccctgatgggaagacgattgaggctgaggccgctcatgggaccgtcacccgccactatcgggagcaccagaaggtgagtgcagggcatggggcctcacaatgcccctctaccccaggggcctaaagcccactgggctgagggctggaaggacgagcctgacccaccagcccaggggcgggcagctgtatctgggcagcctcctcactagctggctcggctcttgatctccctgcaacccccgtccccagggccggcccaccagcaccaaccccatcgccagcatctttgcctggacacgtggcctggagcaccgggggaagctggatgggaaccaagacctcatcaggtgagcatggagggagaggccggagctgcccaggacaggctctgggtcctgcccttgcacagatggggtctcattctgccccatccccataggtttgcccagatgctggagaaggtgtgcgtggagacggtggagagtggagccatgaccaaggacctggcgggctgcattcacggcctcagcaagtgcgtggcctggggtggtaggcagaccctggggccatgtgggaggaagccaggggacccctcctaaagtccccctcatgagtcagcttagctgcaagggggcctggggcaggacatgtccacagccctgagagactgctcaggccagcctctgtagaccaggtctagtgagttcctccccatccctgaggctggctactcagagctccttccgaccctgcccacacccctttcccagcttctctcaggagagcagttacctggcaagacagaccctgcgggtgcctgccgaatctcggtggcctcatggtagggggctatagctggcctctggcctgtagtctgggtggcaggagatggctgttctgatgcccaagctcaggctgttccctggaagggcctggctgatggccttggcaaggcctggagccacccctgatgtgagtggtgctctctctgcagtgtgaagctgaacgagcacttcctgaacaccacggacttcctcgacaccatcaagagcaacctggacagagccctgggcaggcagtagggggaggcgccacccatggctgcagtggaggggccagggctgagccggcgggtcctcctgagcgcggcagagggtgagcctcacagcccctctctggaggcctttctaggggatgtttttttataagccagatgtttttaaaagcatatgtgtgtttcccctcatggtgacgtgaggcaggagcagtgcgttttacctcagccagtcagtatgttttgcatactgtaatttatattgcccttggaacacatggtgccatatttagctactaaaaagctcttcacaaaattgtctgctgtgtttgtccctgaggggaggaggtagtgggaccctgaggcagaggccctgctagagctggcaggttcccctggggcagaccagagcacctcaggaaggggctgccacggcagggaagggaccaggcagccctgggagcccgcattccacaggggcccactgcggagttctcggacactcagggcacaggcctgtgggttccctggaattttctagcatgatccagtttctgtgtccagttctccattctgagagtcaatcagttcctgataggttgtcattgatttttttcttcgttggttttaaccttctaaacatctccaggccactttcttagcctttttctaggtactaaaaagaggtcctacccacacctgcctcacacttctcctttccaaggctgcctgagtttggaggggcttgggtg

SEQ ID NO: 81283 - DNA, 2493 bp, Homo sapiens
cagctgctcgggaggctgaggcaggagaaccgcttgaacccaggaggcagaggttgtggtgagccgagatcgcgccattgcactccagcctgggcaataggagcaaaactctgtctcaaaaaaaaaaaaaaaaaaaaaaaaattggcagactccagagcccacacatttgcactctagactctactgccttcctcatgaagaattttaggacccccgtctggctgtgttgttgcttggggttcaaattctggttgaaagatggcggctgcagtgggaccactattatctctgtcctcacagagttcaagctgaagaagatgtggaaaagtcccaatggaactatccggaacatcctgggggggactgtcttccgggagcccatcatctgcaaaaacatcccacgcctagtccctggctggaccaagcccatcaccattggcaggcacgcccatggcgaccaggtaggccagggtggagaggggatccactgacctgggcaccccccgactggagctcctcgcctagccatcctcttgtctctgcagtacaaggccacagactttgtggcagaccgggccggcactttcaaaatggtcttcaccccaaaagatggcagtggtgtcaaggagtgggaagtgtacaacttccccgcaggcggcgtgggcatgggcatgtacaacaccgacgaggtgaggctggcttgggcatcctgggcccctcctctcccagcttgtctcttcatctctgtctcgtggctttcctttcttctgtaatggcctcattcttaggccacaaagaggcagaaatggccaccagggctgggcatggtggctgacacttgtaatcccggcattttgggaggccaaggcaggattgcttgagaccagaagtttgagaccagcctgggcaacagtgagaccccatctcttgaaacaaaaagaaaagaaaagaaaagaaaagaaatggccacgagcagctccaggcgtactcctgcctgcttggctaccctatcagaagagaatgcctctttatccccagttccagctccaatgccaggctgagtcacatgaccacctctgagccaatcacagaggccctggggagaaaggcttctgattggataagccagggacacactgtcaaccccagcgctaggcctgggaattagccctgccccagccacatgtagtctaaggcggtgctttccaaaaaaaagttgtttccaaaaaaaaaaaaaaaaaggcggtgttttccaaaaaaaaaaaaaaggcggtgttttacaaagcaaagttgagagggagaggctgggccagcagaaacatcgtgtgcactgcacggaggctggtgttaaacagtcgcgtgggcggcggggtaccgttcctggagagctgggccttgccctgggaggtgggaggttgccggcaatcgccaggctagggcaccacgccagggccctgtctctccccctgcagtccatctcaggttttgcgcacagctgcttccagtatgccatccagaagaaatggccgctgtacatgagcaccaagaacaccatactgaaagcctacgatgggcgtttcaaggacatcttccaggagatctttgacaagtaaagcctcatccatgtactctgtggcctttcttcccttccccccatgctgttcccatcctaccctgggaaggtcgctattagagtgcatttggctcagctccgaggctcagggagggatccccaacctgtcagccttctgccctctccccataacagacctttttactcccaggcactataagaccgacttcgacaagaataagatctggtatgagcaccggctcattgatgacatggtggctcaggtcctcaagtcttcgggtggctttgtgtgggcctgcaagaactatgacggagatgtgcagtcagacatcctggcccagggtacgctgggaggacgctgctccctgtgggggtggactgttggtcttctctggctggagggattttcagacccttttggtagaaaactctagtggagcaggactcattgcagggtcctctgtggacagcagggggcaggagctccctggcatctgagtgagagaggatcacaaattaggtttggactggtgtatgactgaggctgctcttagagagaaaggagggcacaggaattccagggctaggttgacagccctaaggttgctccagtccatgatggagcctcatgactctttggttccagtaggaaaatgggatcaagcgggactggaggttctttaaactacagcgaatgcattttgcatagtgaacctaatggatggaagagaatgttggggaagcctgcaaacccccaagccctagggtgtcctaaaagacaaatcagattgcagtaaaaagtataggtgatgaggtcaggagtttgagaccagcgtggccaacatgacgaaaccccgtctctactaaaaatgcaaaaaaatttagctgggcatggagg

SEQ ID NO: 81284 - DNA, 1701 bp, Homo sapiens
ggaggaagaaccctccaaaagactgcggcctggcctgccaacctctctccaaagccccagcctctgccagctctggccaggccccactgagaaatggctgactccagctttctgctgcgcccctccactggccttcactcatccctgttttgactgactgtcccctgccatggcctgcagacttcttatcctgccctttgttgtcatgtccctgagtcactggggtgacgccttgctctggccctctgtccccagctcatcctgccccacgtggacatccagctaaagtattttgacctcgggctcccaaaccgtgaccagactgatgaccaggtcaccattgactctgcactggccacccagaagtacagtgtggctgtcaagtgtgccaccatcacccctgatgaggcccgtgtggaaggtgcgagggtgtggaggtgggcgggccagggagggtcacaggcttctcccaccggcctctccagacttggggtggggcagttggccatgtcactcatctcgggactgggaggttgggaggctccagagctggggctttcctgaggccaactgcacctgaggccagtctccctgtgtgtgcctggtggacagtggggcctcagaggtcacctttgatgaggctggggcaggcgtgggtaaggggctggcctcaggttccacggttagggcacagcagagctgagaacagaatccatgtcttccatctcccaggccagtggtgtttctgcttcactctggctctgacagtggtaggtgtcatcggtgacagggctgaggaggaggaggaggaggaaggtaatgctgatgtggtcacagtaaggatggcttctttgggcagtagtccattctggcgtggacagtcttgcaggcaggtatgcagagagattgtgcagaggagtgctgtgtgtaaggcctgtgtccttcagagcctcagcagcctctggggaacattgctgttgccctcctgccactggcttggccttgcaggtctgcctctgtccccatggtcatgcagggtcactgagaggtgcccccaccaggcctagactggcttctggtccttggctgttggggccgctctcgagggttccatgaagtcacagcagtgtgtgtgcagaggggccaggtttggataattcgagaaaggatggttgaggagttttctgagctctctcttcctactttccacagttggagggagctggcggaaagtactcgagatacatctgcaaattccccaggcctgcccctgtcctgcaggtcatgcctgacccacagcactgggatcatttgagtgttgagctcttcatttcacctgaaccttgggagttgtgtatccccatttatggacaaggcaggagagggtcacagccttaggaactggggtggcgttggggccaggaccggagcatgtggagtgggcagtgtgttgtcaggcttcgtcagacaagtccttcccccggactgtactccctccatgtgtgatgtgggaatcataatggccaacagagcacttagcatggaccgggcaccgttctaggccctttacacacgagctcatttcgtcctcacgacaacacttaggctggttatttttccagtaatttttttttacagctttggttgagccacttttgtaagcctcaccattaaaactggcagacttgctgggcatggtgg

SEQ ID NO: 81285 - DNA, 1030 bp, Homo sapiens
ggggtcctgagcttgctttcctgcaactagacagtcccatctggaggtgctggaagacagtgacagatcatcaggcattagattctcataaggagtatgcaacctagatccctcgtgtgcgcagttcccaggcatgagctcaggtggtagtagtgctcactcacctgcagctctcctcctgctgtgtggcccagttcccaacagtccgtggacctgcactaaaggctgtggcctggtctgctgacctctctccagagcccacggtactagtccatggcctgggagttggggacccctgctctaagcagtgagggagctgatttgcagacgggggagtggacaccgggcagctggagccctggctttctgccactgtctcctggtgaagggcgggcctggctgggaggagagggcccccctccagcctccccaggggcatgatgcgctgtgtgtccctgcttctagatgccgacaaaaggatcaaggtggcgaagcccgtggtggagatggatggtgatgagatgacccgtattatctggcagttcatcaaggagaaggtagtgccccctcctgaagtgggtggctctccaggtgggctggccagggattgttctgtcccacagggtcttctggactgcaggtccctaggacccccccgttgtcctggtaggcagcagcagctctgtttctctccctctgtctacccttctttcacatctggtccactaattgttcagaagtcgtcaggcgggggcctgtccccagcagtccgtgttgtgatggtgccagatcccacacgttctgtcaactttgagaagcttcaaggttaatcctgtatcatttccatcttgatcccctacgttttgcctcacttcttgaaaaggagtgaaaagggaacagggctggtgtgtagggcagtgacccagcctgcagttgtgacgagccaccatggcaaaggggtcccagagtggccgcttggcttctccaaagttgccgtggtctatgtatgtccaggagagcatgtagtcct

SEQ ID NO: 81286 - DNA, 1053 bp, Homo sapiens
tgactctgctgttttcaagctctgtaaccttgggcagtaagctgttaacctctctgagcctcagtttcccacacttaaaatggagataatggccaggcgtggtggctcacgcctgtaatcccagcactttgggaggccaaagtgggtggatcacctgaggctaggagttcgagaccagcctggccaacatggcaaaaccccgtctctactaaaaatacaaaaattagccgggcctggtggcgtgtgcctgtaatcccagctactcaggaagctgagacagcagaatcgcttgaacccgggaggcagaggttgcagtgagccgagatcacgccattgcattccagcctgggtgacagaccaaagactctgtctcaaaaaataaataaataaataaataaattaattaattaaataaaatggaggtaatgatacctccttggggttgtttttgggattaaatggaatcacattgtacagcattggtacactgtaaggcacatagtaggcactcaatacctatctatactatttcctttatcaccacaagttagttgagggctcttgggttgcacgcaacagacaaagttagtgactggttaacttggagaggattttattatgagctacacagcgtagctcatagaattgcagggaaaactataaagaactaagtcttggacaaaagtaatatcttggcatgggcctgtagccccagctactaaggaggctgaggtgcaaggattgcttgagccccggagtctgagcctggcttgggcaacagagagagataaagagaccctgactctaaacaataagtaaatacataaaagaggacccaggccctccttaggaactggatggcaggagcccctggacaacctcttactgatttggtgctggatgaggcagccgcagctagccagtgttctttgtgttgatctcctctgccttcatattccagggggagagggtctgacaggccagactggcccccaccctcttggccactggtgggctgggcatgtttttgggtagttctacctagccagatta

SEQ ID NO: 81287 - DNA, 1086 bp, Homo sapiens
tcttgaccttgaactctcctagccatgcctgcctgaagcccaaccgtggagcccaggctgaggctgaaacctgaagaactggccccaagtgagtctctccttagggctcctgattatgatagttcatttttttttttttttaacaaatttgattagctgtcctcaaattaactcataggagatgctccccagaactaaactagctctgcaacagctcaacagactttccgcaggttctgcagctctttccactcaagcttcagaaaaaagtgaaggaatattgtagattgggttcaaaatccccatcgcgtcttgggaaaggcagtagagccagcagccagccaccttttgttctctagggaatggaatagtccaaggctgtgtttgtgttctgcttctctacatctgacccacgggtcttccagaggctgcatttgggtcagggacctgggctctatcttgcctctgatgcagaccacactctctgagtctcattattccccctaaatgatctctaagattatttttagattaaaaaaaaaaaacaaactctttgcatatctttggaaagtcagttgtttgaggtctgttaggctttaatcacttttgttttaaatgtgccgaggtggtttctaggcctgcttttcacaggtattctgtcccttgtcagttcttcccacccagttttttttgtttgtttgtttgtttttttgagatggagtctcgttctgttgcccaggctggagtgcagtgccgtgatcttggcttactgcaacctccacctcccgggttcaagcgattctcctgcctcagcctcctcggtagctgggattataggcacgtgccaccatgcctaatttttctatttttagtagagatggggtttcaccatgttggccaggctggtcttgaactccttaccttgagtgatccacctgcctcagcctcccaaagtgctaggattacaggcatgagccattacacccagccccaacccagtgttttcaaataatcattctcttcccttcacctgatttgctgtgtctaatctagagtggagctgaagacacatcaccacctctctaa

SEQ ID NO: 81288 - DNA, 1078 bp, Homo sapiens
gcatcttttcctattttgcaacgccataggcttccagcgactgctggtgatgtttctggtaagttagagcttggggcagtgcggaccagttctgtgaacggctcagtggcagaattacttatctagccttccttcactcctaacccagaaacttcttaattcttgccccttaagtgtgcagatctttctgccacgtcagataaggccctagctgccctgccagagctgattggggtggttgtgtttaggcctagtaggtactgaggaaaagcctctttggaatggctgaggcctgctcccacatcttctgtgtgaagttgagggcccttgggctggttccattcagggtatgaggtgctggaaactgctctcagattactggaagccagggtctgtggccttccctggggtttatactctgtaaacccatgttaaaaataccagcagattgcaaatattagtacactgtaggttgtaagcttcttcagggcatggggcctattgctggagagagatgccacccgtgtacatctggtgcaggctgctggtaagaactcactggcccctgtgtggcaatgcataccagatgggtgagaggggaggaaacacattcagtgaaacagaaggtgagggcagggcagccctgaccacagatggagttgacttcaacttgacctttatttatgtctttgacaaaagtagtatactcctactttgtgccagacaccatgccgggtgctggggatagagctgggaataaaaccagcagagactctttcaaaacccttaggagctcaaattctgatgtgggagggggcagacagtaagcaagatagatgttgactagtatgatatatgggtacaagagctaaggaaggccaggcactgtggcttacacctgtaatcccagaattttggggggctgaggtgggaggattgcttgaggctgggagctccagaccagcctgggcaatatagtgagaccccatctctacaaaaataaaaaataaaattagccaggcacgatggtgcatgtctgtggtcttagctactcaggaggatcatttgagcccaggag

SEQ ID NO: 81289 - DNA, 1042 bp, Homo sapiens
ggcaggcgcgcgcccccagctgcgacgtggcggcttcccaggctggggccgggaagcacgtcccgccagcccgcagcccggggacggcggggtcaggcgcacaaagggccgcggggcagcttcgctccgcgctcccccgcccggcgcttcccggccgtgccaggcgctggggtggggacttgagggacggtggcaactggtggcccgggcgacggccagctctgcgcgggcgggggctcggggctgccgcgcgcccctaggtatttcgggagggggtcctgagagtgtcccggacccgaagggtggcctgcccgccctgcgcccctggaacgagacgagcacccgtggggggctggagcaccccgcgcgctcccctggcgagagggagggtcgtggctcggcccctgctcagacaaaggctgggaggcgggagacatgcacttccccttccttttcagccaggcgcgcgctgataccaggcccacgtcagctatttttggagccttttacacgacagctggaggagcgtcctttttaattttccccttttgtttggccgcccccacccccaccccttcgccttcatcgctgcacttgaggctccatcctggggcctctccttgacttgacctgccttggcaggcacatgccctccctgcctggctcactcgccgcagagacctggcagcccgcgcaaaatgtcactttgcggaatcgttcccacggcttctgggtacccttagttccctgcttaggagggaagacagtagtcgggtcgtaataagcaagacttagcccgagcctccgttgccaacgcaggctgccttgcttggcgtgtgggcatcggcctgccccctcaccctggctacccaacacagctacaaaaggcagggaacaatgtaggtcccttggccctgcctaatgcctgttgccatggaaacccctatcctaatctggccaggagccccttgcagtgagccaggagagtgaggaagaggggatggggcccgctggccctgacctggccagaggaggtaatggt

SEQ ID NO: 81290 - DNA, 1031 bp, Homo sapiens
caggggtgctgagccccccagtggatttccatgctggtgggactttctgggtgtccagtttcccatcacctcccctctcccaccagctctgggcccgagtacctctgcgttcccccggagtccacccacctggggtgttgtgatcactctttgccatcgtcactctcgggttttctccttaggccctgctcttctgaggcttgatctgtgatgccgggagaggtgggacgctgccagaaggggctactggcaggctgccaagaggctgcccacagaggcctttgccctgacaaattcacccctggggccctgggtctgccctccgcctggcagctggtggagaggagagccaggtcccagctgtggactcagactaatcaattgctcaggaggccaatatatacaccaggtggtaagtttccaatgcatttagcagggtgagaccggtttttgtttaggaaaatatcttgatagccacttttgttgaggaaggggaggtgctaaggacatagttgaaggaagatgtttaaacacaggaggaatcaaacggctttacagagaacgttaaccggaacttgggggcgagggaccccaaaagagaagaagaaatggaaagatggtcatagaaatgaagggtgaaggagggaggagggagggagaaaacaaaatggcaagggcagagcctgggaggtatgtgtccactgagaatttcacagtggcggggagaccaaagggctttttttttttttttgagactcttgttgcccaggctggagtgcaatggcgtgatctcagctcactgcaacctccgcctctgggttcaagtgattctcctacctcagcctcccgagtagctcggattacgggcatgtgctgccacacccagctaattttgtatttttagtaagatggagtttctcgatgttggtcatgttggtcttgaactcccaacctcaggtgatccgcccgcctcagcctcccaaagtgttgggatcacaggagtgagccactgcacccagcctcgaaggact

SEQ ID NO: 81291 - DNA, 1169 bp, Homo sapiens
ggctgccacttggcctctggtttctgcagtcccttgacccgtcagttcaggccagctcagccacttacaagtccagaactggttgtttcagtaaccgccctgaaagctgccgttgctttcctggaagatagcaccgggacgcaagagtggagagggaggagccaaggtcacctcataaatgcgggatatttataaccctatctttcacccctcctgcagatctccgtttcgttttactctctgagcacgcccgcccactgcatgttaagggagcagtgagcagcatttatctcgggtggagacgtgggtggtttcacagagtgtggatctgccctcctctctctcacttgcctccttctgtaaacaatattaccattcttgagagctgaccatgtgccaggtgtgtgcctccaccattgcatttcccatcacagccttgtgagatctctagtgttctgatgcccactttacagatgaaaaactccaggctcagagaggttaaggaactcgtcctacgtaacacagccagttaggtaagagtggatctaggatttcaacccgggccagcccagactccagctagtgaggccgccccctgtggcccaggtccagcgaggccgagtctcccaaggtgaaggaccgcacagtcccttgggctccacggctaacttgggccgaccagcggtcgtggggaggcggacccgacaggccagggtggtcgtggcatcgagtccatcgttggtgcaaatggccgggggccggtggcggtggtggggcggggggcacggcccgcatcaggcaaatcccggaggcgccctctggacaattcccgtaaacacgggcagagcggggcggggctgggcggggcttggcgggggcccagcatttccggggacgccgcgccggactgaggctgtgcgcccgagactccgggtccccaggggctgcgccgggccggcctggcaagggggacgagtcagtggacactccaggaagagcggccccgcggggggcgatgaccgtgcgctgaccctgactcactccaggtaggcgcggggggtgcctggcgaggtgggagccgctgcccgggaggtggcggaccaggcgaaaaccgccgcgcagccgctgcccccacccttgcacccgcacctcccgcccggcccctctcc

SEQ ID NO: 81292 - DNA, 1021 bp, Homo sapiens
ggctcctcaccacagcggacgcacctgggacttgggctgggcgggccggttctttctccccatgagagttgcagcctcagcaccagctttgcaggaggtggctgaacttgagggagtacccagaagggggtcctcagagatgggcatctaagatacttcagagttgttgacgccatggggcaactttcatggggaggtgaaccaataacatagcaggcatggccttgctcactgagcattcactacatgccagtgttgcccgtggctttatatgtactctctccagccacccatgaagtgctgttcatagcactccgtcctagatgaagaagctgaggttcagagtgattgtgtggcttgctaaaagtccacaaaatatggaaggtagtgaattcttctgacagaagaacctgtgtgctcaaccactggattctaccacttccaggagcaagaaaaacaagaggccggtagcggggaaaatggtttggggaacggagatgaagccatttatttacatctgttgccagaccctgggtaaaagctgccagtgagttttgaaggcagtgtaagtgctgacccggggtggatgccctctgctgcagaaggcgctgccccaaggaagctcccagccctgaggacttggcagccattggctgatttgaaagaatacacagggtgtgccagctggtgtcgcttcctcttcaacatgtactgatgctgcagctgagctgctgcccagcccctggggagaagacaccagcagcatgcccagccagggcagggtggagagctgcagctgcaggttggcataagaggagagctcagggctacaaggggatggtggtggggggccaaggcctggagagctgggctgcagccagtgtatgtctgcgaggccttgctgggcagcctgccagtcagcacccgagaatggggaggagcttgagtgctaccccaggagggggcgggtgggacctttgggttcaagctccactgggcttggcaggaggcccctccccca

SEQ ID NO: 81293 - DNA, 1809 bp, Homo sapiens
attattattgttattttgagatggagtttcgctctgtctcccaggctggagtacagtgatgccatctccgctcactgcagcctccacctcccaagttcaagtgattctcctgcctcagcctctcgagcagctgagactacaggtgcccgccaccatgcttagctaatttttgtatttttgtagagatgggatttcaccatgttgtccaggctggtctcgaacttctgaccttaggtgatctgcccatcttggcctcccaaagtgctgggattacaggcatgagccaccacatccggccttaaagggagttattaattccctcctgccccagaagtgccgggcgggaaagctctggacgcagtatttctgaagcagattggacagaaatctgcaggcctgcaaactgcagtcaacaaaacgccattgagcagagagaatggagcatttggcacaaatcagctgcttgccctctggccctggaggaggcagccagggtcaaggctgccctgggaagccctgatgctggtcgcttgttgagccctcagcccggttactggcttccctccttgacatggtctcaactggacatgagcctttgtccccagctctgtcctatgggccagcatctctttggctctgcagaggtgagtggaaggcgctctaactgcggatgctcagagcctggctttgtaaagtagcttgccacccttactaactgcacaaccttgggcaagctcctggccttctccaggcccattttcacattagcaagagaggaataatggccatcttcacagtgttctgagaggattacatgaaataatgtatgtaaagtgtttggcatggtgcctggcacatgctgcatccgtagtaaaaaggtagcttctgctctggtgtgctagaaaccccctgccagccttgcttggtgaggttatttgcatccatttttgtgcacactggtggtatgcaggccctctgctaggtgccaagccttgtcaggcttagtgcctgccctggtagaaaagacaaagcaaggcccccaggagctgattggaggtcattaccaggggtcctgcttaattatagcccagttattaagtgctcctgattcagccttttcaaagtcctcctttgcctgaagaacctcctctgcatggggctggaccatgcctctccctgcctgcccttcactggttctgctctgccttcagcacaacccacatccagctggtgttgaaatacctctgtgccaacccaggagagcgctaaacttgcacaacttttggggcatatctggatataccagcatgttcatcctctaggcaagagacagagggtggcacggggcctggagaaaaggctagactcgggtcatgtcatcaatcactccttcctttatcttcttagagcctgttgcctctcactccacccccatgggtgctcaggctggcgcaggactcagggggcctctgatgtggccctccctggggatcggggcaacaggaacaacacaacgcgagactcctgtggtcgaggcctgccttccctcagattagctttttgggaagtctgctcccttggactgcattctccatgcttttccccagctggtttccctgcccctcctcttcacattctgacctccctgtgctggatgtgggacagctatcctgtctgtaagataagataattaaaagcctggtggctctttccctgctgccaccaagtcatgcagagacggaggctcaggctcagttgcgttcaagattcggcttcacccgtaacccactgccatggccgaggaaggca

SEQ ID NO: 81294 - DNA, 1054 bp, Homo sapiens
gcagagctggcagacatgtggcacacaggagactgaggcacacatctcagacagaagtttgcaaactgaagggtagtgggccacagccagcctggagatacattttgtttgacttccaagttctttagaaaaattttaattaggccaggtgcggtggctcacgcctataatcccagcactttgggaggccgaggcgggtggaccacttgaggtcaggagtttcgagaccagcctggccaacgtggtgaaaccccatctctactaaaaatagaaaaattaactgggcatggtggcaggcacctgtaatcccagctactcaggaggctaagggaggagaatcacttgaacctgggagacaggggttgcagtgagccgagatcatgccattgcactccagcctggaagacaagagcaaaactccatctcaaaaaaaaaaaaagaaagaaaaattttaattagttgctgatatttaaaacttaggaaattttacataaaaatctaggtttccagcttttctgaaggtctggtaaggttggacccccattccgtgtagcagcacgtgtctggggcctaagtcttgcgtgtgaaaaagggctagagtaaaagtagaaggcaagaagcaaggggaggagtagggagcatggggagaacccatcttgattattgatggtcactgacccctaatctttgcagagctttgcactgccacgtactgtgtttatttagtcttctcagcaatcctgcaaggcagccctctcaggactgagaatttgttcggggttgcacagtgggtcagtgatcaagtgaggattcacacacatgtcttgtgccccttccagtccgtgaagcttgtttcttgtctccctaccatactttcagctgtcatacttccacctgtcatacttaattctttttttctttttcttttttttttttgagatggggtctcactctgtcacccaggctgcagtggtgagatcttggctcactgcaacctccacctcccaggcttaagcgatcttcccacctcagcctcctgagtagctgggacctc

SEQ ID NO: 81295 - DNA, 1036 bp, Homo sapiens
aggaagtgcacccaggttggcagtgtgtcccagtttcctgctgactgtggccccgtcagcactcctgccctggaggtggggctgctgctggggtaagtgggtccaaggttctggtgacttatcgtgacatccctggggacgaagggctacaacagcctttcaggaggctctctggggacttgtcccgcccagacccctctctgagagtgggggaggccactggctgcctccttgcattggaggccccttccccaccgactccacagggaagctggtgttttctggcctgatcctgctggggcctgtagagggtgggatgttagggccaggtcagcgtcttgctgccgtgcccggagccacagtagagagaaaggtggggtggggttctgagtcacagcgctgctgcagctagctggctggcctggggtggggactaaccagggtggggatggtgctgagccctattcctgtctcaccccagagagctccaggcttccggctgagtcacagggaaggaggacccttacatggggctgagggctgagtattcccacatcacttcctactcagaaccccacttcctactcagaaccccacttcctggggtggggagtggggaccctgcaggtgactcttatgtgcccattccatgtgccgtctccctccagggagggacagggcagccccagaccagccccggtctgcctttttgaaggatgatctgcctagtgggatgcactggccttggtgaagcccctggctgaagcctgtcggggtggagggagagggttcaccctgaatgggaaaaccggccgcagcctcggcgtgccctgctttcttcatactggactaacccactggatagatggatttagaggatgtccgagcagcacaggcagcccaggagagcgagcgagacactctttgacacaagggagagcataaaagcttaagactgaccccaaggtgcgccagcccctcgcaggaagtaaagtgcagaaacacctccacccctgcacaaagagcacctaggagt

SEQ ID NO: 81296 - DNA, 1048 bp, Homo sapiens
aacaagagagaaactccgtctcaaaaaaaaaaaaaaaaaagggctgagctgctgggcgtggtggctcacgcctgtaatcccagcactttgggaggccgaggcgggtggatcacatgaggtcaggagttcaagaccagcctgaccaacatggagaaaccccgtctctactaaaaatactttgccgggcgtggtgacatatgcctgtaatcccagctactcaggaggctgaggcaggagaatcgcttgaacctgggaggcggaggttgcggtgagccaagattgtgctattgcactccagcctgggcaacaacagcaaaacaccatctcaaaaaaaaaaaaaaaaaaaaaggctgagcttcccccaaatggctgatatgtgttcctccttatggacattgaggatggagtagcttcatttcccatttttctttggccaccaggaggcccagcactaaaggctcagcccttctctaccagctgtgcgaagactcattgacctactcgtgaatttttacttccttgctgatggagatgtttttcttcagatttgggttttctctgctcctgattttaatgtttatatttcactactttcttttcttcatgtctccccaccctttatggaaccaggctgggggtatgtaaaaacactccacaggtaaacacacatgaagtcatcttcacagctgcttgattgggcgtgttgcactttttgcttcctcagcttcgtgagactgtttgtgtggtcataacccactggtccgctacaacgtgcctgagggtggtcagggtgctgctctttgcttgtttttgtgttctcatcagctgcttagaattttaaaaataatttctctccaaaccctttagttacccaaagcataaacagtaccctggtgggtaagtgtgtgtgtgtttctttttttttttctttgatttatatatttcacattatataaggataacctgcttattagagaatctaaaaatgataacaagtaaaaaagaaaagaaagctacctgtaattctaccagggagcccatgttttag

SEQ ID NO: 81297 - DNA, 1044 bp, Homo sapiens
acctgtatttattattccattagccattggcagcagcttgtgacaaccctgctaccatattatgatgtctgtctgtcatcagttctggtttctgaggtcaaaattgaaaacactcccattctgtgtaataaccatcagtctcaaagaccagtgcttttttgggaggctgacgcgggcagatcacttgagttcaggagtttgagaccagcctggccaacatggtgaaaccccgtctctactaaaaatacaaaaattagctgggtgtgatggtgcatgcctgtaataccagctacttgggaggccgaggcaggagaatcacttgaacctaggaggtggaggttgcagtgagccaagatcatgccactgcactccagcctgggcaacagagcgagacttcgtctcaaaaaaaaaagaaaagcccatgctcaacatttgcattactctgtcaatgcaaatagcattcactgcagggcccacttaacatttccttctctttgggtctaatgtcactcaaaggaaagtgttaaatgtattttcctttcttaatattctattatgtgctcaaaactcatcactttatattttagtttgcttgatattttgaccatgcctttcttgcctgtttttctggagcttctaatacatcattttttttcccagctgtatagtattcagttggattgaggcatcataatttattttgacaaggtcccctctggttggacggactctttggttttcagttttttattaatgtgaagggtgccgtagtaagtatccttgtacatacatctctgcatcatttcttatgtaatgtttgagagtccaggaatgctgctcgcccatcaaacctgatccccctgcccccagccccttgccattgccaccctttgccttgctgattaccttcctttaaaccagtccatctaaaggttggtgttaagaggcttcccatgggaggggtggccccaggtaatacccatcttcctctccccaggctctgaagagcggccattcctcagattcgaagctgaacacatctcc

SEQ ID NO: 81298 - DNA, 1311 bp, Homo sapiens
agccaggatggtcttgatctcctgacctcgtgatccacccgcctcggcctcccagagtgctgggattacaggtgtgagccaccgcgcccggccaggctcacatcattttctaagcctcacctcctccgccaggtgggtctgataatgtgtcccgcgtcgggtcactgtgaggcagtgtggcactgtgtctgggtgaggcctctcctgaggccgactgtccaggttcaaacccttcggcaccgtgtcctggctgaggaggacggcgtccctgacacctgaccccttctgtcccacacacctcacctgcctgcagagttgccttctcctgcacgcctctctctttctcaccaagcctgctcctcattccctggagtgcccctgagcccatgtgtccaccctcctgcagaacatggagaacttcaccctggcaagggacgagaaggggaatgtcctcctggaagatggcaagggccgttgtcccttcgacccgaatttcaagtccactgccctggtggttggtgagtgttgagggcaggatggcttcattgaggttccatgtaggggcacacagggctagagggctagctttggacaggctgagtccatgccatgcttatttccaaggggacagaatggccaggggcttgccttgggtttggtttttccaagttccagcttccttctctgcccaccacaggcaaaacgggcagtgctggggtcactctgggccctgagcagggagaaggggccgtgctgaggagcccattcccatgggaatgttttcttggcagatggcgagctctacactggaacagtcagcagcttccaagggaatgacccggccatctcgcggagccaaagccttcgccccaccaagaccgagagctccctcaactggctgcaaggtgaagtcctcttgccaccacccagagggcagggatcctgttcacccagccctagaagggggcactttcccccagcttggcctgtctccagggttcctgggctgactctgagctcctgacctggtccctacagacccagcttttgtggcctcagcctacattcctgagagcctgggcagcttgcaaggcgatgatgacaagatctactttttcttcagcgagactggccaggaatttgagttctttgagaacaccattgtgtcccgcattgcccgcatctgcaaggtgaggggaacgggctgacagggtggccaccccagggacctcaaagcctccacagctgcaagatcacccacatccatgcatggcctttcccatcccgccaaggagtacagcttggctaaca

SEQ ID NO: 81299 - DNA, 1021 bp, Homo sapiens
ctcaaactcctgagctcaagtgatccacccgccttggcctcccaaagtgctggaattataggcattaataatataagtaccatcccgaccttgtacttatattattaactcactcaggaacatggcattaggctatattggggtcctttggcttccttgtttgctcagcagtgaatcgcgtccatatttaggaaggctctgcttagttacagtaaggaccatcctcctgatggatgcgtacactgctcttcctgactttagatggaacttggtcctggccttctcctgcccttcagtcctggtgtctggggtgggtccattgaggcagtcctgtgccgtgcatccccgtcatggctcagcatgtgcctaagcccagcccatccgactctccctccagggcgatgagggtggagagcgggtgctacagcagcgctggacctccttcctcaaggcccagctgctgtgctcacggcccgacgatggcttccccttcaacgtgctgcaggatgtcttcacgctgagccccagcccccaggactggcgtgacacccttttctatggggtcttcacttcccagtggtagggcctccagacctcgctggagatggaagggtgaagggtggctgggactggggcccccagggctcctgggttaatctggttatttcctctgcaggcacaggggaactacagaaggctctgccgtctgtgtcttcacaatgaaggatgtgcagagagtcttcagcggcctctacaaggaggtgaaccgtgagacacagcagtggtacaccgtgacccacccggtgcccacaccccggcctggagcggtgggtactggctccctgcacccagaaggggtgccgggaagatgtgggtccccacaccatgctgggagcaaggctgcctagcctcgggcagatcacttggcttctctgaatctcttttctcatctttaatatggggatataggcccaggcctgcttgtgtactgggttagatataagtatgaatgtcagaatat

SEQ ID NO: 81300 - DNA, 2250 bp, Homo sapiens
ggcatagcccagagggaggcaggggagcttggagctactgtggacgctggcacccccctaccccatgccttttctgcctacaggggagaagccatgtgagcaagtccagttccagcccaacacagtgaacactttggcctgcccgctcctctccaacctggcgacccgactctggctacgcaacggggcccccgtcaatgcctcggcctcctgccacgtgctacccactggggacctgctgctggtgggcacccaacagctgggggagttccagtgctggtcactagaggagggcttccagcagctggtagccagctactgcccagaggtggtggaggacggggtggcagaccaaacagatgagggtggcagtgtacccgtcattatcagcacatcgcgtgtgagtgcaccagctggtggcaaggccagctggggtgcagacaggtcctactggaaggagttcctggtgatgtgcacgctctttgtgctggccgtgctgctcccagttttattcttgctctaccggcaccggaacagcatgaaagtcttcctgaagcagggggaatgtgccagcgtgcaccccaagacctgccctgtggtgctgccccctgagacccgcccactcaacggcctagggccccctagcaccccgctcgatcaccgagggtaccagtccctgtcagacagccccccggggtcccgagtcttcactgagtcagagaagaggccactcagcatccaagacagcttcgtggaggtatccccagtgtgcccccggccccgggtccgccttggctcggagatccgtgactctgtggtgtgagagctgacttccagaggacgctgccctggcttcaggggctgtgaatgctcggagagggtcaactggacctcccctccgctctgctcttcgtggaacacgaccgtggtgcccggcccttgggagccttggggccagctggcctgctgctctccagtcaagtagcgaagctcctaccacccagacacccaaacagccgtggccccagaggtcctggccaaatatgggggcctgcctaggttggtggaacagtgctccttatgtaaactgagccctttgtttaaaaaacaattccaaatgtgaaactagaatgagagggaagagatagcatggcatgcagcacacacggctgctccagttcatggcctcccaggggtgctggggatgcatccaaagtggttgtctgagacagagttggaaaccctcaccaactggcctcttcaccttccacattatcccgctgccaccggctgccctgtctcactgcagattcaggaccagcttgggctgcgtgcgttctgccttgccagtcagccgaggatgtagttgttgctgccgtcgtcccaccacctcagggaccagagggctaggttggcactgcggccctcaccaggtcctgggctcggacccaactcctggacctttccagcctgtatcaggctgtggccacacgagaggacagcgcgagctcaggagagatttcgtgacaatgtacgcctttccctcagaattcagggaagagactgtcgcctgccttcctccgttgttgcgtgagaacccgtgtgccccttcccaccatatccaccctcgctccatctttgaactcaaacacgaggaactaactgcaccctggtcctctccccagtccccagttcaccctccatccctcaccttcctccactctaagggatatcaacactgcccagcacaggggccctgaatttatgtggtttttatacattttttaataagatgcactttatgtcattttttaataaagtctgaagaattactgtttaatcctggctcttcctcttcaaggacagttgctttttgaggtaggtctagtcttctgagttctgagaggttctgaacctcttctttgcaggctcaagtgagccagagtcagcctagcctggtcagcaacgtctccctgtggggcggctctgaggtggggagcttaacgcactgataggcggaggcagggggttcattgcgtttacctcaaccccttcattctgcatccccaattcagtttagcaagggtagggacacaagggaagggatgggatgggatgggggccctgtattaaagtttttaattcttcagatcatgcagtaaaatagactttactgatgtacggttctttacattttgatgcatgcagagactcatctaaccaccaccccaatcaggatacaggcgagtc

SEQ ID NO: 81301 - DNA, 1030 bp, Homo sapiens
ttagcctgggtttatcgctaggtgatgggtctgaaccctaggtgcggcccggggctggaggccatccaggagacaatgagcccctttcccagagaagccgagtgcccaaggcactgggctgtcgccgtcagaagactgccgagcggaagccctgcccaccgaggtggcggagacaggcaggcctgggcagccgctggggcggagggacggctcttggaaacggaatccgtactttaattaaagtttatgcagttttccaggagcgtcctgtacctcatttcggccctcacgtttcagggaagccctctccacagttacaggcagaaagggtgggccactgagcagcgtgagcccagatcttacccccaccaagtgaagcgggaaataacttgctactacccagcctccggcccgccccttccacttccggtcttacccggctacttccgctgctgtttcgtagccgactgctgaaggctggtttgcgtcgacatggcggttaccctgagtctcttgctgggcgggcgcgtttgcgccgccgtcactcgctgtgggttcgcgacccggggggtggcgggcccaggccctattggccgggagccggaccccgattccgactgggagccggaggaacgggagctgcaggaggtggagaggtaccggcttctccccgggccctcagcttgaagcagggcctcgtgccccggcgctccaggccgcgcccccttggcgccgggtgtcctgccgctgcttgcgcagcggcccttgtttcttcttacccgttgttaggggcgcagcgtcaggtgttcagctcccctgggaccactggtcccttcattagtgacgtatttcatcatcagtttagagagttcggcatgcttacaggcagttattgttctaggtgttagctttctgggtgtacggagcagctctaagccggcaacatggcccggttgcccttgcgatcaaagagaagagggctgggcgctccatgatttagcctgaggctcttcaaacatccattctgctt

SEQ ID NO: 81302 - DNA, 1480 bp, Homo sapiens
gtcttcaatctggcctggagtacaggcctgcctcctgcctcacaactgctgctaatcaggatgtatactgagggtaacttgactctatgctcccagtttgcaatatctagcttggcccaaatagatcctctgtcttactattgttatttatttttttttaagagaaaaggtcttgctcctgttgcccagactggagtgcagtggcaggatcttagctcaccataacctcgaactcctgggctcaagcaatcctcctgcttcagcctcctgagtagctgggactacagacatgagccaccatgcctggctaatttttaaattttttgtacagatggggtttcactatgctgcccaggctgttctcaaactcctggcaagcaatcctcccaactcagcctcccagaatcctcgattacaggagtgtaccactatgcccagccccagataaattctctacttatattaattttgcttcagcttccttctaggttgacagttcccagttgactctcaaaatgtttgtgaaattaagcaatttcactggggcatggtggctcacacctgtaatcccagcactttgggaggcccaggtgggcagatctcttgaggtcaagagtttgagaccagactggccaacatggtaaaaccctgtttctactaaaaatccaaaaaaaaaaaaaaaaaaaaaaagtcaaccaggcatggtagcgcacgcctgtaatcccagctactcgggaggttgaggtgggagaatcacttgaacccaagaggcggaggttgcagtgagccgagatcatgccactgcccttcagcctgggcaacagagagagacttcatttaaaaaaaaaaaggcaatttatttagtgatgtaaaagttttcatggatatataagggaatcagggagtcctcaaggcggaagaaggtgaaggaacagagcaggggaggaagaggagggaggagaatctcccccaggctgagcagaccagggcactgagctccagatgtttgcacccctcctttgttttccccatctcttccctactctccaggccagtcagatggcaaggcctggacaactggaaggaaagagaatgaaggatggaactggggcggcagctgtgttggccacacaggcccttctgactgggcagcatggaggccacttctgccagcctgagagttgcagaagtagatggcagggaatcccctgcttggggatgacacagtaggtagattagaaagttggagaacaggaaccgtaagccactagcaggaacatggttgaagagccgaccgtggagtccagactgagggaggaggtagaaaaggaacaataagcaaggaagcagaggaggctgtggcaaggataatgggcagccccagttattctaagggaaaaggagagatggagttgagaggctgaaatggaagcagctctgtgatgtggctggcctttcgaggttactggagcagaggagg

SEQ ID NO: 81303 - DNA, 1049 bp, Homo sapiens
aagacaacctgggtcacctcaaagggtgtcttctccaaatattggtgcagaggttagctgggccggcaagagaagggagatgacccactattttgatttcaggcagcagacaccggcagcctttcggttagagttgcggatagggcagtggccttgggggcggggctataaacctgggcgggcattcccggcagggcaagctcagcgtgagcccgattggaggatgggctctaccttcttccttccgcctacggagaccatagcgggatgcagggcggggccgggctgagggggcggagttaggggcggggcacggtgactctggccccgcctctttccggccgctcagggcggtgtcgctggggcggtgccgctggggcggggcctgcggggtggggctgacggcacggggcggggcctcggggaccccggcaagcccgcgcacttggcaggagctgtagctaccgccgtccgcgcctccaaggtttcacggcttcctcagcagagactcgggctcgtccgccatgtccgccgcagacgaggttgacgggctgggcgtggcccggccgcactatggctgtgagtgcggggctccgcggcgcgggggcttcgggctgggctaattgcagacgaggcgcgattttcctgggggctcggccgggcgggtggggcagggcggctgccggcagctcggacccggaagagccgtcccggtggggcggcgggcggcgggcggggaggcccctggttcgcgccccctcggggtccgaggcggcggagaggacccccgaggcctcccgccttagctggggccgcggtagggggagccccacccagcgcctctcgccgcccaggctcggccgagattggggaagacggcctagagtgaggtggcaggatgaccgcgcagggcgtgtcccggggattgggggtctgggtacgcgggctctgcccgtttcgtggaaaggcgctgccctagtgttgcctgcggggtagacccaagggatagaccagggtccagacctgtccggtcccaggctagctacgag

SEQ ID NO: 81304 - DNA, 1613 bp, Homo sapiens
gttcacccagcctcagtttcttcgtctgtaaaataggagtgataatcacaggattgttgtggggtttcaatgagagaatgcgtgtaaaatgcttcgtacaattactgccacttatgtctcaataactgctggctttggtcattaataaaagagggaaacaatattatcagatctgtatttagaaggagttctggcagatagggacagatttgtgccaaaatctcaagacagtatttttcaagattacactgaaacttagtacatatttatattatcatacatttttaaaaaggtcaagatgattatagttgaaaccacatagttctttttttaagaaagtcattgtagtacacctggctggctacacactcattagttatcctgactttctaggtgagtggcaggaaattgattctgtggcaatcttttatcactcaggaaggctacagatcctggtgtttacattctttcttttatgttgtagctgtcctggataatgaaagacttactgcagaggagatggatgaaaggagacgtcagaacgtggcttatgagtacctttgtcatttggaagaagcgaagaggtaaagattggctggctggagagaagattaagagaagggaactgataatagtgtgaatacaaataaagattgctttgaggctgaacacagtggtccatgcctgtaatcccaacacgttgggaggccgaggtgggggggaatcacttgaacccagctgtttgagaccagattgggcaacatagtgacaccccatctctacaaaaaaattttaaaaattagccaggcatggtggtgcatgccagtagtcctagctactcgggagcctgaggagggaggatcacttgagtccgggaggtcgaggcagcagtgagccgtgctctcaccactgtgctctagcctgggtgacaaaactcctgtttttggtggggggaaaaaaaagaaaagatttatttgagtatgttatagatgtaactgggaagctggtggttgagggaataagtataggtagggtatttatttatggcaataagtagccttgatgagagtttatcatgaatcactgtgatgggcatttaagtgtactgaacggttttccaggtttctattgttcagtcttatgcttattgtgcatgttttgggcgttaccaactgtggggtggaaatagcatttttaggatttgaagttattggctttaatgtttcacttatgcttcatgaattttgatttatatatgaattgagtctcctcctcctatgacctgcggagtggctgcttggtttgggaggcttagaagcgtggtgctgttggtgtaggtccatctgtttggcaatattcagagtcagcatcctctgcattctttgtgaagtgaatgtaaagctgctcttttcctttttcagatgccccacaaccttgtggtcttaattttagagtgtcattttgttatcagtgattcatttcttttgttctggtgcttgtgttcttttgcagagtcccagggtagatgtaattatagatcatgtattctataagtgagctttggtggaaaagtcaagtgagggataatgaaatatttgtaattaacgtttaat

SEQ ID NO: 81305 - DNA, 1963 bp, Homo sapiens
tgaaccggcctgtatcttgtgtgttccgagggcccctctttcccctctagcgctagacccagtttgcctttttggtttggttccatcctgtttcctccataacctccacccctcccaagttggaggagccccaatatctgggatttacagtaactctaaggccaggaataaagatcatagagattggagggagaaaagcttcccctcttcagttctatttataatacctctacttctactaaaagctccaccttttagtacagtggccccattgtgtatcctagggcactccattttctcctctgcctgtaacagagctctttcttgggaaaagagaggagtgtgtagagagtgaatatgactgtgtagaggcagtgagtataagtaagagagtataagtgtagagagacgaaagttttctgtggctgtgggtttgtgtttccctgaaaggttaactgggaaaatttaggggtaattcctataaatgagcactgggagtggttgagaaatagaaaatgtagagatttctgcttttcttcattgtttggagagcagcttcaatattgaaattaagccgctgttctaatgagatatcacctaacgattcaaggctttttgctaagggctgcacaatagatcaaggatacatcttaaattattatttatgcttaaattgaagcttatttttatccttttgcctgttcttattgagttttacatttgtttaggctaaggagcggggttttttttgtttttttgtttttttttgaaacggagtctcgctctgtcgcccgggccagagtgcaatgacgctatctcggctcactgcaagctccgcctcccaggttaacgccattctcctggctcagcctcccgagtagctgggactacaggcgcccaccaccacgcctggctaattttttgtatttttagtagagacggggtttcaccgtgttagccaggatagtcttgatctcctgacctcgtgatccgcccgccttggcctcccacagtgctgggattacaggcgtgagccactgcgcccggccggctaaagagcagttgtataggagcaatgaataccgtttcactcagttgaaggaggtaacatttaaatatgtgaggtatgttcagtgcttaggtcttggacaggaggaagtaacagatcagaataaggttcaggtgaaaagaaccaagaagagaacgtgtcaggcaggacagaacagggaattctgcaagtgagaagaaagtacgattagtactggaaatggaagaaaattcagctaggttaaaggtcacaggaagaaagttaattccagcattctctgagtttcagacaattcctggtgtgcgctttcaagtctgtcatgggccacctttctgctgctgagtgcccgtaccctagctcaaggaatagggcacacccctcttgtagaagggaaggtaggaacgctggctggttggagactgtcagcaactccacggtgataagtcgagcttagcactaagtagaagtatgtcactttctgtaatttagaggaattgaaaaggtatcttggaaagaaattagttcttgggaacaaagtcttttttgtgcatatgtctttactgttggcatagagcattttctgggatgggctcttcagatctcctctccctgtaagtgatttcagaattccatgaatgttgggatatgtccaggctggcaccctgggatcatgaaaatagaagttaagacatttaagaagcaagaaaacaaaatgggtaggtgaggtgactaggaagaatatcatgcccagcacttctagaattctcaaaatgaggagcatcacttaaattttgagggggatcatttttaggatggtgacccaagctctctttgtacagatgagaagtctagttatctcatgagacccagtgtgactaaaggaccatagcatgtagctgcgtaatggcacggtgg

SEQ ID NO: 81306 - DNA, 1034 bp, Homo sapiens
ggttgcagtgagctgagatcacgccactgtactgcagcctgggtgatagaaccagacattgtctcaaaaaaaaaaaaaaaaaaaaagtgaatataggaaatcttccttgaaaaaacaaagatactcctacctcagcttctcaagtacctgggactataggcccacttcacctcacctaactaattaaaaaaaatttttttttttgtagagatggggtttctctatgttgccaggctggtcttcatctcctggggctcaggctatccttcgctaaagtgctgggatacaggcgtgagcagccacacctggcctgtattgtcttaatttactattttcagtggccatctaatgttcataatttatttaggtttattcctgtttaaagttctattgctttgattgctggagagtttaaacattttcttacatatttgtttatcagtattattttcttatgcaaattttctgtttttgttatgtgcctggcttctagggtcatgatgttaacttttgtgagctcttttataacatggacttgactttctctcgtatttgctacaaacattttcccttgatgtttcattgtatttgttttcttcattgtagttttaaattttattgagtttaaatgtcagtctttcgatttgtaatttcttctatcaactcgaagtctagatagtttaatttctctaaaaccttgccaaaattttcagtttaataatcgattggcttactttttatatatttgtagagatggggtcttgtaatgttgattgtaaggggaacttatcccgaacttctggccttaggtgatcctcctgcctcagcctcccaaagtgatggaattacaggcctctaatatcctttaaaaaccagctgtttattacctattagcaattcatgtctgttttgtcaaatattatgtatatatatatttctagttctggacttttaaattatggtgaaccatatttcatttttttgagaaaaatatatatgactttgttatacttcttatcattgagaaacaacat

SEQ ID NO: 81307 - DNA, 1250 bp, Homo sapiens
catgttagggttgctattggcttagcaattttgcctgcaatgtggagactcttcttggtttataatgtctcttgtttgtttattttagctttaggaaattgtccattatgcctgtggtgattagttagatctgtgtagtctattttatggctcttcttcattttgtttacgttaaataagcgttctaggtatgtgtctcacatacatcttttgttgcactgacttgattttctacagtcttgatattttttccttggttctgttaatggtagttgctttgtcctattgtagtttatatttttaattaattccttttccgtctccattcttgttaatagcttaaatgatctctttttagttcatgaagaagagtgtggcacaaaagatcctttcaaggtgaaaaaaaggagcaggtagccaagatagttgggttacatagtttaccacttccctttataatccgtaggtgttgaaatagatgtggccatgaaaaaccagtgttaatcgggcagctgagtgtatggattgtccaccagtcaaggttggggaaaaaatctggctgggctaagtgtggcccgttagtttgacctcatttggcatgtatttcttctggtcttacaggtcagagcaactgtttttatatattttaatgtccctaatgacaaaatagtaaaaatacatttgaggacccaagttggcatgttctaggaatttcattttccggcttagtgtggtgacctgcctctgattgctgtacaattccttctgcttcacagtgtcacatctggggataccagttggtagtggaacctgttttggacatttttaagccttgtggtatctgatggactcttggttgtttctagctggtgctaaataaaccccttgacaagaagtatttgtgtaagaaagcgctggtaggcaaagtgagaacatccggaagtgattcatattactgtggttgtttgcttaactcaggacttggttgcctagagaccatatcgttgagttagccgagtgaagtgccagtggaacctggagggcctgtggcctaccggatcaaatcagggctctgctccttaatttttctcctgaagtctcctagcaatctgattgatctctgtggtttgacagtgcgtgaattaaaaaaatcttaaacatattaatgtttaagaaagatctggttaatggtttattttgaagagtaagagtttacttgctgaagtttgaatgttgggttaaaatttttt

SEQ ID NO: 81308 - DNA, 1069 bp, Homo sapiens
gcccaggagtttggaccaccctgggtaacatggtgaaaccctttctctacaaaaaaaggcaaaaattagccgggtgttgtggcacatgcttgtgaccccagcttcttgagaggctaggtaggaggatccagaggatcgcttgaaccctgaaagtcaaggctgcagtgagccatgatcacaccactacatagactctgtctcaaaaaagaaaaaaaaaaaaaaaagccagagtatgggcttcagaatcacaccaacttgggttcaagtgagagtttacttgccagataatcttggaatatactttttggaacccacagtttatctgtaaaataattacaataatacttcagaggttgttgcaaagattgagataataatgcatgtaaagtatttggcttcatgtctgccacatggtgtgaagattattttttaagtgtcatttatattgaaaatgagtcattctatgttacttctttcctgtttagtacttgtgtttcagatctgacatcacctttttaaaaattttgcatttgagtgagatttgctaaagcagttctggggttaaacttgaagagaaaatattgaatatttatatttaatatcccatgtgagaggagagattaagaaccctgttgtctgcttgttacatctcttgtgaaaaacataaaaaatataagagttttgttactgaactctacttgtggttttggtcgagtctatcatgaaggtatgttgtggagattagtgcaaataatgatttaaatatggaattataaagtttagcagctctatattcggggaaaaacgagtctctgttgattgaaaaagcataataaaataatttattctgaggctttgtggttatgcagtgtcagaatgaaaaagatgatactcctgttccatttcaggctggtcagaccatacctggaacacagtgttcagttggagaaagttcagagatgagcaaaagacgtgagggggcagagatgatgtctaacactgctaatataatacctggtaacgttttgagtacttactctgtgccaggcactgttcttagtattttata

SEQ ID NO: 81309 - DNA, 1071 bp, Homo sapiens
agaatccaaacttctgctaacattaaaaatgttaacatggcactttacttttcaaagcagtttggtcctgatttgttcgtttgtgacagggtttcactttgtcaccccagttagagtgcagtgccaccatctcaactcactgcagcttctacctcccaggttaaagtgatcctcctgtcttagcctcccaagtatctgagactataggtgcacaccaccacactggcaaatttttgtatttttagtagagatggggtttcgccatgttgtccaggctggtctggaactcctgacctcaagtgttcggcctgccttggcctcccaaagtgctgggattacaggtgtgagccactgcatcctacctagtcctgatttattttataaacaaaccaggtgatactccattgtgaaatagctcagattggtgggcaagccacatatgtggtgaggtgacttggaaggcagcttcaggtttgagcagttgtttagaaacaatgtattttgcctccctgtttattctagctcattctttctgtttaataactttcaccaaatcacagttggcctttcttctctgacctgacacctgtgttatataaagagcattctacccagctataggaaacatctaagtcaggactgttttatagcagttggactagggaaaggaaatataaagaatgctgggagatgttaccatgggctctccttttatttttgtctagaaatctcagaaaagaggaaaacctaaatacctctggtaactggctctgattcaaggcaaaagtatctactgtgctctttatccgtagttttccctgtgtgtttacttcattttaaaaagaaaaataagtaactttttttttttttggtactgttacgtgcttgagggccatttttggcttaggctgaggttgttaggttttcactgttaatgagaacccaagttagattgtcccctgagagctggagttgccagtagttgtttgccagaatgattttatcaacatcctttttagcagtaaaaagatgagatgtgtccttgaactacactattttccgtaccgacaa

SEQ ID NO: 81310 - DNA, 1050 bp, Homo sapiens
tttttcaatgtctaaatgtagcaggttgcacaaactaaagcacttagtaaatgttcattgttgagttgtttctccatctaggcatggtagatagtaactaggagcattgtagttctgaaagcctcatactcagatcagtccagtgatttaaactggactagaacttggtcttcatatgcctgtgtctgggtctgaaataagtaaatcaccttctcacacctaatgaaattcagtgggttgtccaaatagagattttccaagtagtactttttattctgtattatagcactttattccttgcaattcttatgatgaaatgtctgttcaccctaatgaagttatttgctgaatgccaccgatgttttctaagaatgccaccgatgttttctaactgtccatagtttgatttggattattgatgattggtgaatgtcagatgaacacagtgaatggatatcttactctgtttcttttatttctccctagattttttacccagaaactacagatatctatgatcgaaagaacatgccaagatgtatctactgtatccatgcactcaggtagtcaaattttcttggcaaaataaggaaattatgaataacatctgaattgagtgtgtagttttttatccttgaggtaagaatgaaaaagttttttgattagtttcaaaagttccaaataggataaaatactattatccgaacaaaatggtgagaaacagctgtgtttttctagggagtttggagaagggatttatttatttaatagcaggtaattttcttctaaaaacatggtatctttcataattgatctagtatttctgtgaactatgcattcacttggggtgcagtctcttgtttagttaggtaggtccttgccattgttaagccatttgttcattcattcaataatttttataagccggatgcggtggctcacgcctgtaatcccagcattttgggaggccaaggcgggtggatcacctgaggtcaggagttcaagaccagcctggccaacatagtgaaaccctgtctctactaaaaatac

SEQ ID NO: 81311 - DNA, 1032 bp, Homo sapiens
attcctctctgctagttgtgtagccactactctgcagtgtaacctgggttccaggccctcaaattctctgtagtagagcctaaagaattaactatgccttcctagtggtagagtcagaatgagaaagagaggaagtctgctattgttttccatttctcttgaatatgtagtctgtgcttagaaagtatatatagagcagtgtgtttcgtgatttatggtttcttttttatggtgtttttcctgaagggtggattggcaacatttgataatatgtaggaagtatttataattgctgaaagtgccttcttttaccacaaaacacagccatgttcaaagcaggttcctcaccttgctatattggataaggctccatctccctttggatcaacagtgacagaaaaatactacctctctgtctcctccctgcttgcctttttttttttttttcctctaaagtcttgattggcattattccagagatagtcactgtactttaatcatactaaattacttttgtagataacattccactctcagataagaccccagttttccattctcaaaatacttgtatactaagtttggtgtaagctcatttgtctccttagtatgattatgtttgtgtgtttctctgcagaaagtaatggattggattgaggatgctgccccagggcttgctggggatactttatgataccatatacactgtaaatagaaatacactttctaatatctgagaaattcaatattcagacatatctggctccaagaatttggataagggactgtggacctgtagtagattctgtttcctaatcacctgctgtgtttcagggtctttattaataatctttgagattggcatagtgacttctaggttactcaccattcacagaaaagataattagaatccagatagattaacatagcttccttctgcccattgctacaaagtacagcttaagtaggaaataagaaaaataaatctaagtgcagttacaggctgacgcattatagtgcctaacagtatat

SEQ ID NO: 81312 - DNA, 1047 bp, Homo sapiens
gaaactctgtctcaaaaaaaaaaagaaaaaaaaagaaaggaagtcctacatttccgtggctcattgagtttcttattgttttatggtgtttacttggtaattaaggcagatatctccagagcaagtgttccttgcaaggctctcttatgagtgtttctctgtgagattctaaattcaccatcccagacatggatcacagatggagctgtggctttgcatactgtaaggaagaggctaggctcatagcctggcccagggagccagtcttcgaaccccagttgttatttctctgtgaaaaggagcctctgtctctaatggggggtgcaatgttgctttctgttgtgatatacatcctgtaatctatataatctcagtgtttttgttggtttgtttttttgtttttttttttagtacatgctgctgttattgctattaatgaagctattgaccgtagaattccagccgacacatttgcagctttgaaaaatccgaatgccatgcttgtaaatcttgaagagcccttggcatccacttaccaggatatactttaccaggctaagcaggacaaaatgacaaatgctaaaaacagggtaaaaatgcaacatctattctttctaattaatttatattattccgtcatttgatatggctccagtttaaacatcagttttattgagatgcagtttacatacaacaaaattcaccggattttaaatgtacagtttgagttttgaaaagtatatgtgatcatttaaccatcactcccagaaagttccttagtgcacttttgcaattagtttccaccttacccacacccctgagcccaggcaactaccagtctattttctattgctgccattgacctttttaagaattttatacaaatggaatgatgcagtatctaatcttttggtgtgaggctccattttgacctctgcttcttgaattttatataaataaaattctagagcgtagccattaaaattaatagtgccctttggaaagattatctctaaatattaacatagtctttcctctttcccagat

SEQ ID NO: 81313 - DNA, 1001 bp, Homo sapiens
ggcactgactgttgtgggtggagtgtgttcaggaagtatcagggtaatgagaggattcaaaatggtgctatgtaagacatggttaaaggaaataaggctgctagtaaggcatttgctgtcatagggaggggcagtggaatgtattcagtgtgaactttagggttggagctttaaaaatatttttgaaacaaaattgtccaaagatgtagtaagtggccacgggagatactttctcctgtttggtagtctgtaagtataatctggacaactacttggcattttaagggaatttaagcgtcatgttggtctggattggtggctccatattggtgctgagctgtctacatttggaagtttttaagtaggctgggagtgtggcccaggaatctgtatgaaatctgatgaatagcttgttgggaacccctggacttgatgactctaaggttcttttccaatcccaagatcttatgcttctgagaatcacagagtaaaggctctctgagttatatttccttatctggaactgagattggttttggggaaggaaaactattctaggctcttctgttaacatagtcctttcacaagcttttgccttttttcctcagcattttctgcattagcaaatatcgacctggctttagaacaaggagatgcactggccttgttcagggctctgcagtcaccagccctggggcttcgaggactgcagcaacagaatagcgactggtacttgaagcagctcctgagtgataaacagcagaagagacaggtaaacatagtctggattgaagctgcaagagtttgtatatatccattcgaatcccatgctgtcatttaaagatatatatgctgcctttgtttttcccccaatacgactttttcctctgcatataaattagtttaaaaaaaaatcctcaggtaaaatacacattgtcttcagctcacttttgcttttagagctatgaatcctcttttaagataaacagacaatacccacc

SEQ ID NO: 81314 - DNA, 1034 bp, Homo sapiens
tcttggtgtctttgtcaaaaaatgttctcctcatggctgtaaatgtgtggctttgtttctgagttctctatggtgttctgttggtctgtgtgccctttttttttttttttgagacggagtctcactctgttgccaggctggagtgcagtggcacaatttcagctcactgcaacctctgactccctggttcaagcgattctcctctctcagcctcctgaggagctgggattacaggcacgtgccaccacacctagctcatttttgcatttttagtagagacggggtttcaccgtgttgaccaggatggtctcgatctcctgacctcgtgatccacctgccttggcctcccaaagtgctgggattacaagcgtgagccaccgtgcctggccaagttactccagttttaaaggtagaactggagtcaatatagcctcactttggctcgcacacacttcatgatttgttagggaaatatctggaggaggtgagacttaagggatcgctaagatttggatggtgaaagaggtgagaaaagaacgtcctagtgcaggacaatgagggaaaaaggaggtgggagcggaagtacaggtagtgaaagatgtctttgaggaatggtggttagaatacaaattttgtaaatgttttgggctgagttgtgtaagatcaaggggtggaaagattgtagaaagctttgaatggtagcttaagaagccaggcagtaggagaaggaagaggtggtttagatgggaagtagtggtagcatataggatgaattgaacgggaagaaaatagggatgaggagaacagttaggaggctgctttttgaagaaaacatcttgattgagacatggttcacataccgtacagttcacccttcttcagacaaaggaggctgcttttttaaagacgaaagttccacttcaaacttcatggctgatagccacagaatgtgatatttttcccatgaagattggcaccttcttcccctgagggctctctaagcccactgcgtttctgactcctgttttttacac

SEQ ID NO: 81315 - DNA, 1021 bp, Homo sapiens
ttccctcatcactagaacatcatctcttttgcaccgtcaaaatatctagttttccattaagcattcacgtgatatttttaacccaattgataatctttcctaaatcagtaccttcagtaaaagttgctgaatgatgatttgttgctctgtcattcctcctgcatttattagctcatgtgtagcctttttttcttgtctatggaggaattgcttgaactgctgcctttaattctagagttagtcttaacatggaatttagaatatgtaacaggatattgagaataagtgatttctgttgcatttttgcactttgtttaaagtaactgtgcagttccaaaactggtcttgagaatatatcaaatggttgggataccctagcaatctttgttccttgaatatttaaacatgctgtgcttaatgctctttttacttgggggtctggggcaggtatctcgatgagttgatgaaactgaaggctcaggcacatgcagagaataatgaattcattacatggaatgatatccaagcttgcgtggaccatgtgaacctggtggtgcaagaggaacatgagagtgagttatcttcctgtcctccccaaataatgtcaccattaatgatgatgtgattccatgaagtggttcaaaatactactcctagaaggatttttgggtgagagattgaaaatatctatataacacaaaaggctaaagttggatattgttttgagaacaccaggcaattgctataattaggtatatgtccagtaagaactaaattttgggggaggtgaattgaacatgatctgttatttttaaatgctgttataacaagtagtcctgacactacatggaattaggttgaattgcacaggttgtaggcatggtcctccacaagactcctctcacttcagacacaagctgaaagctgcagggttcccaggccactgtacttctgaacaactggctgcaaatttggaggatcccttctacccgctcaggtttaataatttgctagaatgact

SEQ ID NO: 81316 - DNA, 1682 bp, Homo sapiens
tgtttgtttttggagaccggtctatactcttgactggagtgcagtggtaagaacatggctcactgcagcctaacctcctgggctcaagcaatcctgcctcagcctccctagtagctgggactataggcgtgcaccaccatgcctggccaagctatgtttgtttgtttgtttgtttgtttgtttgtttgtttttagagagacggggtctcactatgttgcccaggctggtctcgagctcctgggctcaagcattccttctgcctcagcgcccccaaagtgttggattacaggtgtgagtcactgcatccaactttttaccagttttttgatgcctccttcttccatttgactaacccacgtgtctcatattttttaagcctgttcttccatatttaattgagtctaggaagcccccttcttcacatgtatgttacatgtaccctgatttcatgactttaatattttgcttttaatgatatgtaggaaatccaggatgagtcagctgtgttatggttggatgaaattcaaggtggaatctggcagtccaacaaagacacccaagaagcacagaagtgtatgtatcacctgttttatttctgttttggtggaggctggggtgacaaggtgctccgtacagcttgaccaagataggtatgggggaacaatttgccagtagatatagttaggtgaagcagtatgtgaatttagacactctctaaactattctggtaacagttctttcccgaaatagttgccttaggaatctttgccattaatgaggcagtagaaagtggtgatgttggcaaaacactgagtgcccttcgctcccctgatgttggcttgtatggagtcatccctgagtgtggtgaaacttaccacagtgatcttgctgaagccaagaagaaaaaactggcagtaggtgagttctgggataatacatatgtgccctgaagctaacccttgagtatatgaggggacagatgtagaggaaagggataagctatagggaaagaccttttagcatagatgtacagtacttaggctcattttaaaggagataaaatccctatttttgaaaatatccttccccccccccttgtggacagctgtgttaataaggccaattttctgagaatgtgggaaagattaaaatatttaactgtttatctttcacagagtagcagtagctctgattaagcctataggcaattaaaagtagtttgtctgtaaaaagagggaaagaaataagatttcttaccccattttatggacttttaaaaattaaaaaactgggccgggtgcggtggcacacgcctgtaatcccagcactttgggaggctgaggcgggcagatcgcctgaggtcaggagttcaagactagcctggccaacatggtaaaaccctgtctctactaaaaatacaaaaattagctgagtgtggtggcgtgtgcctgtaatcccagctacccgggaggctggggccggagaatcgcctgaacccgggaggcagaggctgccgtgagccaagatcatgccactgcattccagcctgggcaacagagcaagactctgtctgaaaaaaaaaataataataataaattgaaaaactggagaggctgaatggttgcacattttttaagacagacaggccttaaactttggctttggagtgaacaaagttaat

SEQ ID NO: 81317 - DNA, 2665 bp, Homo sapiens
cgtggcacacagccctgttgggtacctgtcactctgttcttgtctacagtgaccccagatcagccagcacagtgcccagcctagtcagtgttggataggtagataagtgagatgacatatgaagtaaaagaagatcaagtttttgtttatgaagtgttttctaggtgggaggacgtgtgtgagaacaacctagtcctaaaaaacagacctgagggctttattcctgttatgtagctaatgatctagtatagacttaggaagcaggaggtgttagcttgtgtgctgtggatgatacttcgtgaaaacctgcatccattcttgcctgtgaatgtctttgaatgtgaccactgctttttcagagttctatctctggggtgactgccgcatataaccgagaacagctgtggctggccaatgaaggcctgatcaccaggctgcaggctcgctgccgtggatacttagttcgacaggaattccgatccaggatgaatttcctgaagaaacaaatccctgccatcacctgcattcaggtatttcagaacctatcacacagacagcaagcgggcatctagagcaggggtaataaacggtcagctgtcaccattgactgtctgagtgtgttttttgagtgctggactcttagtcttctctttcctttgacaggtacctcctctttactaccatttaactgtagtgtgcctacaggtgtttaatgctggcacagtggcagttcttgggtacctcttcctctcttcttctaagactgtacctttctgtaagatttgaaccttgagggaaacaactgtggtctggcttcaatgataaggtagcacaatgtcctggaaagaattctgagttaggaatgatggctgcactactgccagacagtggtgaatctccaagtctttgtccccatctgtaaaaggggaatgccccattgtatcttatcttcctcacctggtttgttgtaagaagccagtaaatgaatctgtatggctgcactgtaaaaggtgtgcagggctgtgctgacgttggggaagtagaatgtagccatcgtgttcttccagtggagggatggcccgtgcccttgttcccctgtcactgctggaagtggtccttcctaaaacttcatcatgaaattgcacttggatcatgtatcaagatgaaagtttttttttaacttccattgatgcttgggaagtaatatgtcttctgtaacatttgactgtttcagtcacagtggagaggatacaagcagaagaaggcatatcaagatcggttagcttacctgcgctcccacaaagatgaagttgtaaaggtatggtagcctgaacagggtttctccatgaggggcacaggtataacacgtgttgagatgaaggactcttctaatttccaggatcccttttccacagattcagtccctggcaaggatgcaccaagctcgaaagcgctatcgagatcgcctgcagtacttccgggaccatgtaagcacccttggatcatacaggccattaggggcaattttgccatatttttggtagacagatgaacagagaaatttcttcttttttgttccttagataaatgacattatcaaaatccaggcttttattcgggcaaacaaagctcgggatgactacaagactctcagtgagtaactggctccgcatgaagagttgaggcagtggctgggagccaccaagttcagggtattctccacagacctcttttgttatcctgaaggcaaggcttgggggagagggtgtgacctgtgacataagcccctttgctaacatgtggctaggtgtcttgttggcttgttgcattaacctttatcataacatagcaatagcctgacacagaagactgcacctgatagttgtcttagcacatctcaaaattaaatgtttatgaatagactactttttcaagacaatgctatttcctgagacgtagtactttttctgctaactccattctttgatgcatactttctgtcagtcaatgctgaggatcctcctatggttgtggtccgaaaatttgtccacctgctggaccaaagtgaccaggattttcaggaggagcttgaccttatgaagatgcgggaagaggttatcaccctcattcgttctaaccagcagctggagaatgacctcaatctcatggatatcaaaattggactgctagtgaaaaataagattacgttgcaggtatggcccagtgccagcgggggccttggaacggttcatcctgctttgtaacccctgcattcccctttctgactggtggggagggtggaggctgactttctcctcagctactgccataagagctttttttttttcttttgactgagtctcactctgttgcccaggttgtagtgcgatgtgatctcagctcactgcaacctctgcctcccaggttcaagcaattctcctccctcaacctcctaagtatctgggattacaggcacgtgacactatacctggctaatgttttttgatttttggctttttttttttttttttttttgctgacggagtttccctctcgtcgctcaggctggagtgcagtggcgtgatctcggctcactgcaacctctgcctcgcaggttcagcgattctcctgcctcagcctcccaagtagctgggattacaggcgc

SEQ ID NO: 81318 - DNA, 1050 bp, Homo sapiens
ctttgaaagctttctgatctatttattggtttttgtttataggatgtggtttcccacagtaaaaaacttaccaaaaaaaataaggaacagttgtctgatatgatgatgataaataaacagaagggaggtctcaaggctttgagcaaggagaagagagagaagttggaagcttaccagcacctgttttatttattgcaagtaagtggctcctggaatcagtgttataaaaatttagtgaatttatttttccacaagaaagccttaccatcgatctctctggaagtatttttgacttccactgaggggtgagtgaggggcactgtaacatgttaatttattaatcttttttctcatatgtattgtagtccttcaattttaaataattgaatatatcttgccagcctttatattacctacaaatgacttatcccttggttttatttcagaccaatcccacctatctggccaagctcatttttcagatgccccagaacaagtccaccaagttcatggactctgtaatcttcacactctacaactacgcgtccaaccagcgagaggagtacctgctcctgcggctctttaagacagcactccaagaggaaatcaagtatgaacagatttcctcagggcacaggccccttcccactatcagaggggctcccagtttgagattcatgccttcctgatcttttcttgatctcaattaatttatgaaaaatacttactctaaagaagcatctaatttttaaataactgatataaaatcttgctgcttctagggaagggataaattaactttaggaacattctgtattaaggtataatttcaaaaagtaatctgaacagaaagaattcacatttttatctagtagcggacccaatcatgaccacgattgagcgtgcagctgcaggaacattctgtgagtgctggggaatgtttcgagagaaactgtttcagggagataggatctttaagcaggaaggatcttttaagttgatgggttttgtgacaagtttaaatttttatctgatgttttataggtcgaa

SEQ ID NO: 81319 - DNA, 1092 bp, Homo sapiens
tcaggcaatccatctgcctcggcctcccaaagtgctgtgattacagctgtgagccaccacacccagcctcaaatagtttttctttagaaaactgtgctttctaagttgttgacctagtaataaattcacttatttagcaaatatttattgagtattaactatgtgccaggcattgtgttagagatgtgtacagtaatgcaataatgagtgaaacagacatgcttcctgccctctcttcatagttcattgggtggaagagacaccaaccaggtacataaaaataaaagcataattaaacattgaagaaagttttatgaagttttatgtacggttctttaatggagactttataagagggagctaacataaggtggttagggaaagcctatcccggaagataaaatttcatttagctgaggccctaaagctaagatgaacccagccttactaagagctaggtgcagagtgtttatgtctgaacactctaagctggagggtgtaggacttaaatggaccctggcataactagggatacagttgaatgagaaggttcatatagattgggtgagatcactgtgtttcattaaaggaaaaagaaaacggtgtggagtgagcttccctgaaatatcgtgagttgggctaattaaattaacgtattacaggagatagctgagctagggccatagcgtaaccaccaacattcatttatctaaagcaaaagtgtgccaatcaaatattggtaatgctgggaaaagggagttcagaatgccaaaacgtttctggttttatttgtcttgggtgaggacccagaggggtgggagatggaggtgtgagcagcatggtctgttgtggttttttcttgttgtggagtagagttagatcatgcatgaagctctctgggcataggtggagtagcagctgtccacaccattgctattcaaagtgtggtttgcacaccagtaatggaaaatcatctgtgcacactgtttagtttaactgatactttttttttcatagcaagattttcttaatgaaggaagtaatgtattgatttacattctgactcattgtctttatcttgtctttgatcag

SEQ ID NO: 81320 - DNA, 1307 bp, Homo sapiens
gcttttccactgtcatttctcctgtctccccttccttcctagaagactcttcctctccttttttcctgagttcaagcatcccttcgttttggaagctttccttgctttttccattctgagttgaagccctttccctatggtcctgtggcacttttggtgaactgatttacagcacaataggtttataatcatctgtttgtgtgtcgctcccaccagactgtaaaagactgaagagaaggtgtcatgtcttgtataacttttattcccaagtgcctgttattgtgcctggcacacaattcaggcacctgattcacagttaaaaacctgcgttcagattctagacttatcacttaccagccccgtgaggatgagcttaagctatctaatatttctgggtcttatagtttatgaaagataagacacttgcttcaggctgttcctggctgttagtctaacatagttgggtataatttctgtcttcccagcaaactgccctatgatgtgacccctgagcaggcgctagctcatgaagaagtgaagacacggctagacagctccatcaggaacatgcgggctgtgacagacaagtttctctcagccattgtcagctctgtggacaaaatcccgtgagtgccatcagttgtcatgacccccagtagaacccagcactaagtgcctttctgctccttggcccttctcactaagttttgtccatcccgcagttatgggatgcgcttcattgccaaagtgctgaaggactcgttgcatgagaagttccctgatgctggtgaggatgagctgctgaaggtaagaatctcatagccggcagactcctgccctttgaggacaaagcaataaaaccagggctgaccatagatcattactaactgcctaagtgtaggttctggcagtagcttaccattgattgtgagcttttgaaagcaattgtaattggtaaatggtacctctcttaggatgaaacacttcctatagtttggcacacaaacatcaaacaagtagaaagatggatttttcctgttttcagatgagtttctttgagtcctatcttttcgctgtagtattgttccctctgctggtgacctggcgaatagtagcaggcacagttgtttctgctaaggctgttgctgataactctttcttactcagctatgctcttctcttttctttttttttttaatctgaatgcttttttcttctctctcctagttctgtgctttcctacagtgaggcctcgattctagactttctgttcaggtgaattaattttatttcttctgaatgaaact

SEQ ID NO: 81321 - DNA, 1037 bp, Homo sapiens
aacttggcctttgaagtctgcagcatgagaatgttgggaggtggggttactctatgctgattgggtcatgttaaggaatttagctatgtttgttagctttttataaggaaagcccatctacatgaaagtacaaagtgcatgtgggtgacagcagccttatttgctaccatgatatgtgaacaaaagatgccctgaaatacttaataacagactttaagtgtgtcatttttaccttctgaatctgctctttcattaactactggcagtagttttcagttctgttctcattgttttcctgtattgaacaaagggatatttcatttagttccaggccatgagagagagtgtgtatatgtgcatgcatgcgtgtgtatatgtattttttatttattttttcctcataggactgcattttctgcttttctttgctagcaaagtcatttatagcttccttggtggtatgtcttttaatacccatctttctgtttcgtctgttccagattattggtaacttgctttattatcgatacatgaatccagccattgttgctcctgatgcctttgacatcattgacctgtcagcaggaggccagcttaccacagaccaacgccgaaatctgggctccattgcaaaaatgcttcagcatgctgcttccaataagatgtttctgggagataatgcccacttaagcatcattaatgaatatctttcccagtcctaccagaaattcaggtaaggggaaaggcacaagtgcttaagagagtctgtggatgtatttttattgttgaggggaaaaataagattaaaaaccacctctcactttccccggactgccatatgtagaagacgtgtttgatgtgcccaggattccagaagatgatccatttactttgaagagaattttcatatgaaatagatagtagttaacacttatgaaatagatagtagttaacataaaaataatgatgattatgcatttagtacatgttaccttgtaatcagagaagaattggagaatgcttttaatttttgtaaa

SEQ ID NO: 81322 - DNA, 2005 bp, Homo sapiens
gtagctgggattacaggcacacaccagcacgcccagctaatttttgtatttttagtagagacagggtttcatcatgttgtccaggctggtcttgaacgcctgacctcaggtgatccacccgccttggcttcccaaaatgctagaattacagacgtgagccactgcacccagccagtgttctttctcaaacagggcacatttgaatcctttatggccatgaggttaagagaataccagtatttcctcttcttatatcataacataagtcattcaacagagcctggtgtggtgccttatatatcatattgtttatttgggttagtttgctgaggatttgcttgttgtttctttgaatataggaactttgttggaacctctttgtgcagatcattgttagacattctagggagggacgggctgaagagttgaatgtataaatggagttgatcattggtgtttgcagctcctgttggatcaccaggatgccattgctccggagcacaatgatccaatccacgaactgctggacgacctcggcgaggtgcccaccatcgagtccctgataggtagagttctaacttttgcctggaagatcaaaagggaatgtgacagaaaagtgttgtaattgtcacctcctctattttttgcactataccaaactctggatatacattgagaaataaaatagatgtgatcctgatagtttcataagagagaaaacaacaacaacaacaaaagcccagatgtgatcaatatctataaggaactggagtcagaggaaaagatcattttaaacgcagatacatactgccagcttgtgtttttttaaaaaaattgcagatacataaattaaaagtcctctaaaggaaagaatttttttgtttgtttgttatgagacagggtctccctctgttgcccaggctgaagtacagtggtgcagtcatagctcactgcagcctcaaattcctaggctcaagtgatcctcctgagttgttttttttttttttaatagagatggagtctcactatgttgcccaggctggtctcgaactcctggcctcaagccatcctcctcctttagccttccaaagtgctgggattgcaggactgagccactgcacccagccagaaagaatgttttcagagagaattgtgatattgtagtgttgaaatgatttctcaaacatttatggagttattatggatcccttgcctttatcatttggcataacattttatttctcagtaaaagttgttctcgtcacactgtatgtgttaggtgattcaagtattatcttagacttgcatcatcttatatttgtattatttccccccaatatctcctctctttattacgctgactctttccaccctcccaaaacttcaggggaaagctctggcaatttaaatgacccaaataaggaggcactggctaagacggaagtgtctctcaccctgaccaacaagttcgacgtgcctggagatgagaatgcagaaatggatgctcgaaccatcttactgaagtgagtatcaaaagaaggaagaatgaaatgaatgtaatctgaaggtttcttggcctttggagaggaacctgctgggtcctacctgaaatgaccatcctgacctctcgtacttgtcataatcccagtcaccaatcacctcgcatattgtacttggtacaggacttatctgccttattttgctaatatgctacagtgaaatgtaaatcttggaaatcctaaccctcgtacctacttatggaatggctgggtaaataagccttgtgccttgagtactgtgtactggcagctgccgcttgggacttctgtgaggtactgtttgtgctgctgctgctgctgctgcttcggtccacttgagaggaactagaacactggtaatatttaaatgcctcccccatctcgtttcagtacaaaacgtttaattgtggatgtcatccggttccagccaggagagaccttgactgaaatcctagaaacaccagcca

SEQ ID NO: 81323 - DNA, 1117 bp, Homo sapiens
ttctcctgcctcagcctcctgagtagctgggactacaggcactcgccccatgctcggctaattttgtttttgtacttttagtagagacggtttcaccgtgttagtcaggatggtcttgaactcctgacctcatgatccgcctaccttggcctcccaaagtgctgggattacaggcatgagccaccgcgcctagcccagttgtgtgattttgtagatatcatctcttctaggtggaaagagatgtgcctctgcttcatgcaatttttcatctatcatttggcagggggcagaatttgtttccttctgtttcaaggttggagtttaagaactgtataagttcaggtgcaaatgtgctatataaattcaagtttaggattagtgtggtaaacttgctaagaacttctttttcccatccgtaggaagcagaacatcagagagccatgcagagacgtgctatccgtgatgccaaaacacctgacaagatgaaaaagtcaaaatctgtaaaggaagacagcaacctcactcttcaagagaagaaagagaagatccagacaggtttaaagaagctaacagagcttggaaccgtggacccaaagaacaaataccaggaactgatcaacgacattgccagggtactgcattcgggggacagaggggacccggccttgttcaaagctgagaggctcgagagacagtagctgttcacataacagcatagcttcagttcatgggcaaattagtgccctcctctatgagaaaccatatctgactctccagcatgagggccttgcccgacctgaggtggcttattccatggcctaaattactagggagaggaccttaactggagcctcctatgaccttaaagaatttgtcttcagccttaaagaattcttccagatctttttcatgattactgtgaaatataaattcacatcaagctgattaaatcgttgatttgtatgaatcatctcaagcgaggggctttggtgaggactaagagtttaggtgttctgtgctgttgcactaagataatattatgcacacctgagaactggtagttgatgtattatagttctctttttctccctttcccaacaaaatatttaagaggtcc

SEQ ID NO: 81324 - DNA, 1082 bp, Homo sapiens
catttccctgctagaagatacaaatgggggaagaaaatttgagatctgaatttctctgttaatttgtgaaaacaaattactgcctgttgaatgtatggttaggtcaggcaccgtggctcacatctggaatctcagcactttctgagaccaaggcaggaggatcgcttgagaccccatctctacaaaaaaaagttttttaattagccagatgtggtggcatgtgcctgtaagtcctggctactctggaggctgaggtgggaggatcattttagcctgggaggctgaggctacaggaagccgtcaaccactgcacactcgagcctgggcaacagagtgtctaaaaaaaaaaaaaaaaaaaaaagtaggtagtcatatttaaggcagagttaagcattgctgggttgtagtgtgaaatgataatgataactgtcgttatttttctaactttaataattatgtctcaggatattcggaatcagcggaggtaccgacagaggagaaaggccgaactagtgaaactgcaacagacatacgctgctctgaactctaaggccaccttttatggggagcaggtggattactataaaagctatatcaaaacctgcttggataacttagccagcaagggcaagtgagtattttttctttttaaagaatcaatgtcagaattagagtgaggaaaaagcagaggcaactgaaatgacactggaaatttttacttaaaatacactggatctatttattgcattagtcttttattttacctctaatcatttgtgtaattgcctaattccatttgtaagtgtatgatgtgaatagtgggtgggggatttcatggatgcttatcgctaagtattccttttgcaaaatatcttcttggggcctgtcaaggtggctcacacctatcatcccagcactttgggaggccgaggcgggtgtgtcacttgatgtcaggagttcaagaccagcctggtcaacatggtgataccccatctctactaaaaatatacaaattagctgggtgtggtggcacgcacctatagtcccagctacttgggaggctgaggcaggagaattacctg

SEQ ID NO: 81325 - DNA, 3168 bp, Homo sapiens
gtgacattactagccttatctcatttccccgtgcttagtatatttcatcataggtttaaatgcttcaccttttccagatttattaaaactagtgacccataacatggatgaaatgggaaaatgtcattgtgacttctgaaataaaaagcttagatgtgtgtggcaattgaacatgtttctttttctttccatgtatgatgaattttgatatgaacaacatgacttcctaactccaaatcaaccagaagcctcccttggccaatgtgccctattgctccagctctcaggctggttgtgcagtgggtagttgcctagcgtggaacttttctttcgccccagttcacatctggcacacaaggcaggcctcagtccatctggatccctccctacattgtgtcctttttccttgttccacagacttgattaactgtcaaaatgttttgttttgttttgttttgttttgttaataggacctgctgcagctacagtatgaaggagttgcagtcatgaaattatttgatagagctaaagtaaatgtcaacctcctgatcttccttctcaacaaaaagttctacgggaagtaattgatcgtttgctgccagcccagaaggatgaaggaaagaagcacctcacagctcctttctaggtccttctttcctcattggaagcaaagacctagccaacaacagcacctcaatctgatacactcccgatgccacatttttaactcctctcgctctgatgggacatttgttacccttttttcatagtgaaattgtgtttcaggcttagtctgacctttctggtttcttcattttcttccattacttaggaaagagtggaaactccactaaaatttctctgtgttgttacagtcttagaggttgcagtactatattgtaagctttggtgtttgtttaattagcaatagggatggtaggattcaaatgtgtgtcatttagaagtggaagctattagcaccaatgacataaatacatacaagacacacaactaaaatgtcatgttattaacagttattaggttgtcatttaaaaataaagttcctttatatttctgtcccatcaggaaaactgaaggatatggggaatcattggttatcttccattgtgtttttctttatggacaggagctaatggaagtgacagtcatgttcaaaggaagcatttctagaaaaaaggagataatgtttttaaatttcattatcaaacttgggcaattctgtttgtgtaactccccgactagtggatgggagagtcccattgctaaaattcagctactcagataaattcagaatgggtcaaggcacctgcctgtttttgttggtgcacagagattgacttgattcagagagacaattcactccatccctatggcagaggaatgggttagccctaatgtagaatgtcattgtttttaaaactgttttatatcttaagagtgccttattaaagtatagatgtatgtcttaaaatgtgggtgataggaattttaaagatttatataatgcatcaaaagccttagaataagaaaagctttttttaaattgctttatctgtatatctgaactcttgaaacttatagctaaaacactaggatttatctgcagtgttcagggagataattctgcctttaattgtctaaaacaaaaacaaaaccagccaacctatgttacacgtgagattaaaaccaattttttccccattttttctccttttttctcttgctgcccacattgtgcctttattttatgagccccagttttctgggcttagtttaaaaaaaaaatcaagtctaaacattgcatttagaaagcttttgttcttggataaaaagtcatacactttaaaaaaaaaaaaaactttttccaggaaaatatattgaaatcatgctgctgagcctctattttctttctttgatgttttgattcagtattcttttatcataaatttttagcatttaaaaattcactgatgtacattaagccaataaactgctttaatgaataacaaactatgtagtgtgtccctattataaatgcattggagaagtatttttatgagactctttactcaggtgcatggttacagcccacagggaggcatggagtgccatggaaggattcgccactacccagaccttgttttttgttgtattttggaagacaggttttttaaagaaacattttcctcagattaaaagatgatgctattacaactagcattgcctcaaaaactgggaccaaccaaagtgtgtcaaccctgtttccttaaaagaggctatgaatcccaaaggccacatccaagacaggcaataatgagcagagtttacagctcctttaataaaatgtgtcagtaattttaaggtttatagttccctcaacacaattgctaatgcagaatagtgtaaaatgcgcttcaagaatgttgatgatgatgatatagaattgtggctttagtagcacagaggatgccccaacaaactcatggcgttgaaaccacacagttctcattactgttatttattagctgtagcattctctgtctcctctctctcctcctttgaccttctcctcgaccagccatcatgacatttaccatgaatttacttcctcccaagagtttggactgcccgtcagattgttgctgcacatagttgcctttgtatctctgtatgaaataaaaggtcatttgttcatgtttgtgtttttctcagtttcattgttaacagttcctgctaaacaccttgactagagtgagatgtatcagttaaaatcacaacagcagacaaccccttccttttaaaggagaaaacgtaagtccaccatcagatcattgaatgtctcaaagtgacttttaatgtgtgaacgtgtgactttagcctttttaatgaatatgcttaagttatcttcaccataaaaagaagggtgttgcgggaagcaaacattatatgtcacttaattctgattgacgaacggtggaaagtttaaaattgcaacagcatttaaccttttttgaccagcatactgttgttgagcacatagactgtgccccttagggggttcctatgtcacttggaagtcaccagaaaagactaggggatgttgaatgtggaaaaagtaaatcacagcagtaaaaaaagaagaaaagg

SEQ ID NO: 81326 - DNA, 1689 bp, Homo sapiens
ttttgctgaagtcttaatcggcctgtcctgaagtcaaccaggctgtatgttagtgccttgactcagtgcagctttcaagagaggcagaaagaatacccacagagaaggcacatgtgggcggtggcagtgtaggaccaggaaagaagctaggtctctatattccctcgcattttgaatctgtgttaaattcaatcatattagtatgaagcaatcctcttacctatctccttaatccagcctctgactgccagctcacaaaagagggagaagaggcactacatttaaagtagtgattatctctaactagaattttaagtccctacatgttttggctgtagaaccagccaaagttttgttccaattccctacaaaatttcacaatagtcaggagttagaattggtccctatgttatgaaacagctagtttttatactttaaacttaaaatgaagctttagttgtttattattactgtggatattttccaagagacagaataacatctgtggaagattctacacaggccttgatgccagacattgtaattatttccctgctcaaaggcaatagtcagtgcctcaaggaactccctggctataagcagttggctgcctcgacaacagatagctaatgtcttagctcttttctgtctctaccgccagcctcttggggatgtgacttgagaaagctctcccctccccattttctcctgtaacctctttggaggaagtcaccagggtaaccactttcttttatgctagttttcttgagtgcaagggaaaacacttccccacagacatatgacagaagtttaagagtggtgaggagaagaacacgaacagttactgagtacctgagctatgctttgtgtacctgatatcattgagttcccacatcaaccttctgagataggcattatcatccccattttactgatgcttaaacagtaacatgcccaaggtcacacaagtggcaagtgacagtcaggactcaaacccaggtttatctttctcgggcctttgctcttattttgcaaattaagcaagtgtagacacacaaaaccaatttgtttttacctaggaaacgtgttttatgctttgtttttctcagtctggatagatgccgttttctagtcccctggaaccatcgtatgcccagtttagtaccacttttgtttggtttctcgtcttagaatatattctgcttattcactcccccggccacctgagaaatctttttactacttttagtccaaatcaaactttccttcccttgactacctaggaagtctctccttgggtgagtcttaactcgcctgaactgagagtctcaccctggaacttggttaagaaaggccagagttgggaggcaacagcctggatggaagaggggggtcagttgacactggagggggcaagccagaccagccgcaagcaggagccaaaaggtcagaaagccagtgagaatggggtgggccaacaggagcagaccaggccacacaggctgtgactcccccttgcagtggctgctgggcactggccatgcctgtgcttgtctctctcagtatctcttactctgccatcttgtcattcatgaaattgctcaagagacgctttctaccagtccgtgcctgcttagtctccgagaagttttgggggttcatttagaattaattaatttagaactagca

SEQ ID NO: 81327 - DNA, 1094 bp, Homo sapiens
aagtagaaataaaggaaaggaaatggtgaattcacctgacagtttcatttaatcagtcctgtttacagggcggcagtggtgggtgcagctgtgtgaccagcattgtgccgaaggctttggggaacagaactgagctggattttttgggagaggacacagaagtgtgccaggagggcccgtgctctcacttcattcttctcagtactcgggcgcaggggtggaggaaggagaagaaaggcggggtgggtctcgctgcggagagctgaattcctggcagtgatggtagagttggcttcacaagcctagaaaccaggaagtgggggcagggcactcatgtttactgagcacctacccatgccaggcgctgtgctgggtaatttatgtgtcacttagtcctcaaaaactcactgagtcgttaatttttttaaccctcattttctgatgaggaaactgagtgtgtggtgaagtaacccaggattcagaccaggccccgctgatggcccagcctgtgctctcccctccctatgccacctgcgaccattcgcagtgatgaggaccttgtacaagggagccaggagttgtgggggcactctagggaaaccccaacttttcttgccttcaagcttcttgcagtttttagtctatttggaggcaaggataatgaccccagggaatgtttttctctcccctttctcccgcccccaggaacacaccacatttggtccacagaaggactgacttctgattttgtatattatgtggctgttatcaaggaaagtaaagatgataaatgatcttgagaatctattctggaatgtgtgataactttgacattgaatgaaaaaggcaaaaggaaatggaggcaattcatcagcaaatttgtacatgtcaggatggagtggtacatcaaaccgttgtccaaattgccaagaatattcaggcaaaagacttggagtgtttctttgattgatttaacaatgtattttttttggctgggcatggtggctcacgcctgtaatcccagcactttgggaggccgaggtgggcagatcacgaggtcaggagattgagaccatcctggctaacgtggtgaa

SEQ ID NO: 81328 - DNA, 1013 bp, Homo sapiens
ggtctcggttcccttagttagaagagaccggccctcggtggctctgaggtttcctggaacacagttgcagccttggtcatcgctgtcccatccctgtgggactgataaaattagtgtcctgtttccagagagccagtcacaactcattcctttttctttttaaccctttatttgtagtgctatcttgtgggtttttaatttagcagtaaaaatccaggcttggatattttgatgatatgttagcttggtgccagtatatcagtcattgccaccaccatccttctggtcaccgcagcccagaccctgagagttgcatctgattactcccattcccatgcccctacgcccattcagtagccgagtcctgttcattttatcccagcagtatgtctcaaatctgcctctggttttctgtcctcactgccagtatcctacttggttcctgtttgccttggactattgcattggttttctagtcggcctccctgccttaaggctttctcctttcaatccacctcctactctgctgcaagagcagtctctgaagcttaactctgatcatgtcacttctccaactgaaaccttccatcccctacatcctgccaaatgaccagcagcctgcttcggtccagcccatctcccagtcctcccaccatgtgctgcagccacactcttccatcttccttctccttcttatccttccccaaccaccccccactcctcctcctcctcctcctcctcctcctccgcctccacctcctcctcctcctccgcctcctcctccgcctctgcctcctcctcacactgggcatccccttcagcttcgcttccggttgtctaaatcttccaggtactacagcaaattggttagggacatgaacattctgaagacacacgggccagagttctagtcccagaacttactagcagtgtgatcttggggatgataatagcatctacgtcgcagagttgctgtggggatcccatgagatcacctgtgtaaagcgcctggc

SEQ ID NO: 81329 - DNA, 1004 bp, Homo sapiens
actccagataaatcttcttcttaaaataacttcactgcataagaaatatatataatatcctacagcatgaaacttcggatttgttcctgtagacacccatggtaagtatcaaacagtgatgtaggctttttgagttacctgctcttaaccccatgatgaagcatttggaagagaatttccatctatacttctttactttgtggtttgaatagagattctcaggctttgtaaaaattgttctcctctcaggacagtgacagtaagaaaatttcagacagacaattttaaaggaaaagaaaaaggaaccaaatttagtttcaaattagctatacctatttttagtataaatgataaagcaccttaaatgaaaatcagtgtatcaaaagtgccttagaattttcaaaattctatttcaaatcataaagagttactgattcataaattcatgaaaatgaaagtaccacataaaagtgttttctttttttctttttcctttcccgctaggtttctgtgatggtgagaataatggacatggggaaggtatgaactgattttacctacctatattggagtgggatgctgattagtggacataacctttcaatacctttactaataaatattcatgttttcaggactcccccaaatgctgacaactgctgattggcttacttttcagagagcctctagaaaattaaggctagccatgttcagggccaggagaaaggaaatatgtggttgcattacaaaggttcctttttatctaggtccccacagtcacaaggttgagcaaggaaccaaaaattgtaatcacatgaaaatatgaatgaattggcctggcacagtggctcatgcctgtaatcccagcactttgggaggctgaggtaggtggatcacttgaagtcaggagttcgagaccagcctgaccaacatggtgaaaccccgtctctactaaaaatacaaaaattagccgggcgtggtggcacgtgcctgtggtcccagat

SEQ ID NO: 81330 - DNA, 1241 bp, Homo sapiens
tccacccacctcagcctcccaaagtctgagattacaggcgtgagccagcacgccagccttgttatcttgtttcatccataccctgcttttaaaaattgcagatattttaatatgtatctctaatagataaggattttcttagtagcctaaatattgtcatgctgattttggtttttcacaactacttcttcctgcacacatctttccaagattgtgtgtgtctgctctggcctctgactttcacggcagatggtttcctcagggcctggtgatcctcagtgctctgctcatgtttaagaacaggacactgaggggctgtctccttgcggctctacactagagcggagtatgagactgaggcgaagggagtcatggcaggacaagcgtgtagaaagttttttccactctctgactgagtattggttggaaggagcgctgctaaaactgtaaccaaaggaggcattttgcttccagaaaaatctcaaggaaaagtattgcaagcaacagtagtcactgttggatcgggttctaaaggtaaggctggagagattcaaccagttagcgtgaaagttggagataaagttcttctcccagaatatggaggcaccaaagtagttctagatgacaaggattatttcctatttagagatggtgacattcttggaaagtacatagactgaaataagtcactactgaaatggcatcagtgtgaagctgcccattccactgaagttctgaaatctttcatcatgtaaataatttccatatttcttataataaactaatgataactaatgacatccagtgtctccaaaattgtttccttgtactgatataaacatttccaaataaaaatatgtaaatgagaaaaaaaaaaggacactgagaagctggctggcagctctgtgtatgtgggcaggcctgctgagtgtggtcttcattgtagaatgatctagcttggtcatttccttgggaaactcctggtgtcataagttttacattcttctctggccaggcgtggtggctcacacctgtaatctcagcactttgggaggccgaggcgggtggatcacctgaggtcaggagttcgagaccagcctggccaacatggtgaaaccccgtctctactaaaaatacaaaaattagccaggcgtgttagcatgctcctgtaatctcagctactcgggagactgaggcaggagaattgcttgaacccaggaggtggaggttgcagtgagcca

SEQ ID NO: 81331 - DNA, 1163 bp, Homo sapiens
cctgttcaaagacctcaacagtgcgctggcaggcctgcctgaggtcagcctgaacgtggacactccatttccactggaagaggagctgcagattgaacccctgagcctggacggactcaacatgttaagtgactccagcatgggcctgctggacccctctgttgaagagacgtttcgagctgacagactgtgaacagaaggcagtggaacagaagaatgtttttctgcaacagccaaaatagaatggaatagaatgaagccagctgataccacgggctttcgttatcttgacatagaaggaagcaatgccacggctccagggtttcagatgagatcccatctcagacactgtggcttcctccagatcacacagctttgtactgcctctcccgcctgtggccaaagtcgtgttgcagcaggcaggctgcttggagcttcccatgaactggaaagctcacctccactgcatctttttactggccatccagtcagccgatgtgtaagagtaggaaatactgtgtcactggaggcctccgtagcattgtgtagtgtgctcagaaccactgatctccgtccgcaccgaaggcgggcccggagtgggaggctcggcctggggcggcggcaccggagagggcacctcgatgcctgctctgacctgacccagagggcgaggccctccagcgggggacattcccaggctgagtggaccccacggctctctcccacgcctggattacgacatgaagtttttaccacaagcccgagggcaggcttgagttaggcagactgaaggctaattttcattttctcccagctggtttctgctgcttcagaaaagtacaccttttccttatggaccagaggaagaggaagaccattttatcagtcactgaaaagagtcccctggcactgatgagcctgaagagaactgtgctcctcctcgggggctggggaaggaagacagggactgcaggtgtctcatactcagtggcctccagacaaactccagacaagcacagacctccccactaagagcagccagagggagctggtgaggccctaaccccacccaccgagcaactgagcttccccatccctccccagagctgtgtctctgtgggctgggagtctaatgtcacccccctagaccgtaagctccttga

SEQ ID NO: 81332 - DNA, 1110 bp, Homo sapiens
gcaatatggtttagcactgaattcaatttgtccttaggtctatgagtgagtccgatcttttcttgtgaaaggttttgggcatcgtacaacccactctgcctagaaggtgtggaggactcaccacgggcagggtcgccctggcccacagcacgtgagcctgcactcactgcggcctttgtaacaaaaccagttgtggtcctcagcatttgaagcagctgcatacttcagagtaaactatttttcattatttagttttgtcacaagaaatcgaccattgtactactctcacttacagcagttaaacagcatagaactaaaaacctgtctgcatttccattttttctttctgtatggttgtgggttttaggacatagggggttaggagaaggggtttcttgatcatgtcatgaattctcctttgtcctgtttctcctgtttcatttctcctccgcctgctgtatattacctgagctggtgttgtatcttcaagtccatatgcgtatttgcagacctttcctgttcccactcttgttggctcttctgatttatgcacagatggttcccagcatgtgtccagtgcttcatggatgggaccatcccagcaactaatcagacttcctgccagtgtcctaacccccagggcaccctgttcaaccatatttaaaaattggaatttgtataaagttgcttccaagttttataatgcatcattttacatcttttgtaattaaaagcatcacaatgaggttgtctctgcatttggtggtgtttttcttcacttgggtgaggggttggtggggagccttaatctcaccgctcctgcacggctcagcctgcagctaggatttggagccttggcaaggcaggccctgtaccagctgtgggtcaggccttcttgtgatacgtgaaggggcactcagttcccttagctggaggcagctgggtctcctgcccccacagccagcacccgctccacacccctgcccacggcccttcctccaccagatactctgtcctgggttggcctctagccctgtcccttccccagacccccatcccagcagggttcaacgcgaacagccacatctagcacttgtcataaaggtgact

SEQ ID NO: 81333 - DNA, 1057 bp, Homo sapiens
cttgctggtaaacctttgctctcattggtggtggtgttcctcctttccccagttctgcccttgtgcagaattcagttattcatttgttctttgggctttccgtgtgctttgatcatttcctcccacctcgctcccttccagctttcatttatccttccaggccaggtcccatttttctaaaagccctttcctaataatcccctccctaatgtcttttgtacttattttagcattgtggaggaagagagggggaacctggttattctgttattcaagtgagccttcagttagttgaagattatatatttcaagtgtcactagttgtaaatgtcaaaacagtctattgaccaaaaaaaaaaaaaaaaaaaaaaaaaagtcctattactctgggcacagttggaacaatgcctgtttgaatcaagtccttcctcccctcaaaaaacattgtgattaatgcaaagtacctaactccactgatttctttttccctcactttttaggattatggctgctgttcctcaaaataatctacaggagcaactagaacgtcactcagccagaacacttaataataaattaagtctttcaaaaccaaaattttcgtaagtgttttgactggtttgctgtcacataggcactaacttaccacattgtacacatgagatatcttctctttaaactcccccattgtacagatgaggaaatgaagctgagagattcattgattttcccactttgccaattaatggtagagtatgttttagcagcaccaggtgagattgtgtctcatctttgcatggttcctggcacataatatttgctcaataaagatttgttgagtaaatgaataattgatcttgtaaatttgggcaaataagtgttttttaagttttggggggtttttttgtttgttttgttttgttttgttttttcttttgagacggagtctcgctctgtcgcacaggctggagtgcagtggcgcgatcttggctcactgcaagctccgcctcctgggttcacgccattctcctgcctcagcctcccgagtagctgggac

SEQ ID NO: 81334 - DNA, 1291 bp, Homo sapiens
taacctgtgtgaattagtttaaaaaattagttttgtagagttggggggtttcttaaaatggatccatctaatctagtttttccattatttttcagaggtttcacttttaaaaagaaaacatcttcagataacaatgtatctgtaactaatgtgtcagtagcaaaaacacctgtattaagaaataaagatgttaatgttaccgaagacttttccttcagtgaacctctacccaacaccacaaatcagcaaagggtcaaggacttctttaaaaatgctccagcaggacaggaaacacagagaggtggatcaaaatcattattgccagatttcttgcagactccgaaggaagttgtatgcactacccaaaacacaccaactgtaaagaaatcccgggatactgctctcaagaaattagaatttagttcttcaccagattctttaagtaccatcaatgattgggatgatatggatgactttgatacttctgagacttcaaaatcatttgttacaccaccccaaagtcactttgtaagagtaagcactgctcagaaatcaaaaaagggtaagagaaacttttttaaagcacagctttatacaacaaacacagtaaagactgatttgcctccaccctcctctgaaagcgagcaaatagatttgactgaggaacagaaggatgactcagaatggttaagcagcgatgtgatttgcatcgatgatggccccattgctgaagtgcatataaatgaagatgctcaggaaagtgactctctgaaaactcatttggaagatgaaagaggtaacaattattttatcttcattttagtatgttcattgtacttttttattcaaagctagccattgggaatagtcatgaatatatagagcttttgtccttaaggttgttagggtctttagtggtgctttttgaataatctgttggccacatttttgaggcaggacgtactgatgaaatggaaggttttagtctgctaatatagtttccaggatagctctgtgattttatacatgaagaaaatacaggagtttccccttgtccacagctttgcattctctgaggtttcagttacccgcagccggctgaggtctgaaaatattgcatcacttctcttgcgctttgggaccattattaagaaaacacaagccctgcaataccgcgacagtcaatctgataactgagaccactactaagtgattaacagcaacccaggtggacagatcaggtcggggcaagattttatcacactatactcaaaacagcttgaaactgaac

SEQ ID NO: 81335 - DNA, 1416 bp, Homo sapiens
gagtagctgggattacagacacgcaccaccatgcccggctaatttttatattattagtaaagacggggtttcaccacattggccaggctggtctcgaactcctgacctcaggtgatctacccttcttggcctcccaaagtgttgggattacaggcgtgagccaccgtgcccagccccactttaaaaaaaaaaaaaaaaaagaaaaagaaatcaagatcttaagacttttttttttttttttagtgacagggtctcactgtgttgcccaggctggtcttgaactcctggacttaagcaatcctcctgccttggcctccccaaagggctgggattacagtcatgagccaccatgcctagccaagacttttttttttttccctcaaagaaaaatattaacaacataattattttatagctagacagataagtttacagcagcagcttattcatgtgatggagcacatctgtaaattaattgatactattcctgatgataaactgaaacttttggattgtgggaacgaactgcttcagcagcggaacataaggtatcttaattttcccccttctggaatatatctgattatatttctaccactctaagtgaaaaatggacagggcaaaatgttcaggctttctggcctggaaatggcataaggatgatcatcatgccactatgtttttgatttgtttacttttcaaaccactcctttaacattcgtattcatgtttttaagattgggaaaaaagcgaatatattttgctacaatttctatttggtatgaaaactacagatttgcttttgtggcctaccagagtaaactacttatatttaatacgttgttctcttttctctcttcagaaggaaacttctaacggaagtagattttaataaaagtgatgccagtcttcttggctcattgtggagatacaggcctgattcacttgatggccctatggagggtgattcctgccctacagggaattctatgaaggagttaaatttttcacaccttccctcaaattctgtttctcctggggactgtttactgactaccaccctaggaaagacaggattctctgccaccaggaagaatctttttgaaaggcctttattcaatacccatttacagaagtcctttgtaagtagcaactgggctgaaacaccaagactaggaaaaaaaaatgaaagctcttatttcccaggaaatgttctcacaagcactgctgtgaaagatcagaataaacatactgcttcaataaatgacttagaaagagaaacccaaccttcctatgatattgataattttgacatagatgactttgatgatgatgatgactgggaagacataatgcataatttagcagccagcaaatcttccacagctgcctatcaacccatcaaggaaggtcggc

SEQ ID NO: 81336 - DNA, 1875 bp, Homo sapiens
gagcaggggcacgtgtgagagatgttatgaaagaagagcctgaggaagctcagatgactccaaggtttcagacactgatgactgggaaaactgtgacaccagtaacacaaacaggggagtcaggaggcggagtcagatttggagaaaagctgagaagggctagtttaagtctagaggttaaagtgctggtaagtcattcaggtaccaatgtcttgcagacaacgggagctgtgtgcaggactggaacttaggagggtgtcagttgggtcttaagagaggtgtaggcatttgctgcacacgggtcatgtttaagatcataggactaggaaagctccaaaaaagaatgtctacagagcccagtcccaaatatctgaaagactccctcccctatttatggggcagatggaggtagtagagccaggaaagggaatttaaaatgagtagaaaaccatgattgtcttggtggtcatggttggaggaagggagaagaggaaggaaagaataaaagtagtggtaggtgctgtagaaaaagtcaaggaaatacttgatttgggactttggcaagtttttggtggctttgagacttgtagggaaggaaagccagtaaagagtttaagaactgtgctgcagggaaacgtgtgccagtgattctgcagggcaagggaaatgctaaagctgtactttcactgtattcatgtactgatttttcttaacgttgattattttcctagacaagtcagcacaaaatttagcatccagaaatctgaaacatgagcgtttccaaagtcttagttttcctcatacaaaggaaatgatgaagatttttcataaaaaatttggcctgcataattttagaactaatcagctagaggcgatcaatgctgcactgcttggtgaagactgttttatcctgatgccgactggtatgtatttttagaagtgaattggcaggaatccattggcagatgttaaatgaaagctctttaatagaaataaaaagaccacctacacagtatttctatcatttagggacctcttaaacctcctgtaccatagtgagaaagcatattactttatatcctttgttctggttgttgacatcatgaagtttatagccctgtaagattttcaactcgaagctcattgtgttgaactgatctagaatttttctttgggaatttttcttttttctagtctaagcagttttggaaatcaaacagaaaaatcgctgtcagagaccatgaccatttctggcagtttatttgcaacaatctggtgttgcatagtggttaaatcatatatgcatatatgcatagtggtccatcagctatggaccaaaggcctggacttaaagaacagctctgctgctcacagcagtgtggccacatgcaaggcactttactccctgggcccattttctcatgtgtgcaatggtgatagcagtaaagtacctggttcacagagtggcatgaggattaaatgaaaatcatttagcacgatattgtgttggccccactttaaagagtctaggacattcattgtgctgttaaagcttatgacagctgttcaatgatttatagtcattcacatgagaatattaaatcaacagggcagagcgcaaggagaatttgcagtttcagtacctatgtgtagtcctccctctgtctatcacctgacttgtgacctttagcaagttagctagtgctgtcattattgtataatgttgactgggcatctgaactttttcatcctggtttttagatttagatagccttggcttaataatcagcatttcaatttttattaatttattaatcactctgtgccttcctttcaaccctattttggtgtttcagaactctaacgctggaaaaa

SEQ ID NO: 81337 - DNA, 1051 bp, Homo sapiens
ctcagcctcccaagtagctaggaatacaggtgtgtgccatgatacctggctaatttttgtatttttagtagagatggggtttcaccatcttggccaggctggtctcaaactcctgacctcaggcgatctgcccacctcggcctcccaaagtgctgggattacaagcgtgagccactgtgcccagcccacatatttattgatactagcatgaactcgacttcttaatttattcaatgagttacattcaattatcaagtattttgatgttctaattgtcctacatgtgaccagtgagacatctctctcaagctggcttctctgtccttttgacatgtcccggtcaagatgtgagtgctacatgtgctcgttgctactgagatgtcattgcttctaggccctgttatgaagagagctataaaatatataatttttcccccagccaacacgcatccatataacccagatatgtaaccctgttgccaatgtaaatgtatggtggccctcagatgtcttgaagcagacaaaagtttgagaaccactaacctgctaaataagctgtttgcttaatgttggtgaacattctaaaatttgatctgctattttctattacttctgctgttctcttcatagattgaaataagaaccaattttatatggaggtgtttttgtttttgtttttgttttttcgagaccgagtttcggtattgttaccaggctggagtgcagtggcacgatcttggctcactgcaacctccacctcccgagttcaagcgattctcctgcctcagccttcctgagtagctgggattacaggcatgcaccaccacgcccggctaattttgtatttttagtaaaggtggggtttcaccatgttggttaggctggtcacaaactcccgacctcggatgatccacccacctcggcttcccaaagtgctgggattacaggcgtgagccaccgcacccggccttatagaggttttaatacagcttaagttgtgatggaatttgaagaccacagaatcatgaggtgatgtgtttcagtgttttta

SEQ ID NO: 81338 - DNA, 1012 bp, Homo sapiens
ttttcttagtactgtggggaagagatctgcctgggaaagcaaggttgtggatttccagtctccagcacttggtacataattggcactcagtaataatcaataaatgaaaaatgtgaaggaatttgggtaaatgtaaaaatgtaggcatgtctgttgactccttaatgtgtttggcacttctctgcatttggaagtaggaaattttaaggaatactttctgggactctgtttcctgatcttttctgccagtaggccctggtttggattaaatttgctcaactgctgctatgtcgtggccctggcgaagtcaggtattcctaaggttgaagccacagcccctgtgctgctctcctcccgccagtctgtaataatattcttcctctttgggaaatataaggcacacaaaaaaggctttattccatttccttagggccttaaaatatgaactggaagagagcaaagagacaggcacatagagttaactataatagaacaataataatagctaacacttacatatccagcctactcagtgtgccaggcactgttgtcattttaagtgtatttacctccttgtccacacaaaagcaaggtaggtactcctattttcctcattctacaggtgaggaaattgagacacaaagagattatataacttcatatgcctagcaagggttggagtgagaacttaaaacaccagatagctggtttcagaatcctttaaatactaggtcaaattgcagaaagaagaaagcagtgatttgagatgtaaattacagctgcaggaactgaagaagacaagataagctagaacccccagtaacagctgttacaaggaggggtcagatcaagttttgtaaaggcactgggcattgtaggaggagtagtttatttaaaagcataggttgggcatggtgactcacgcctgtaatcccagcactttgggaggccaaggtgggcggatcacctgaggtcacgagttcaagaccagactgaccaacaaggagaaacc

SEQ ID NO: 81339 - DNA, 1002 bp, Homo sapiens
aaaaaaaaagataaaagcgtagacagcagccgagcgcagtggctcacagctgtaatcccagcactttgggaggccaagggagacggatcacctgaggtcaggagttgaagaccagcctggccaacatgttgaaaccccatctctactaaaaatataaaaattaaccaggtgtggtggtgggcgcctgtaataccagctacttgaaaggctgagacaggaaaattggttgtacctgggaggcggaggttgcagtgatccaagatcatacgactgcactccagcctgggtgatagagcgagactccatctgaaaaacaaacaaacaaaaaaaggcttaaacagctgtattgaaataaaatttacataccataaaattcacctaaagttgacacttcaatggccttttttttttttttttttttttttagtttataaggttgtgcagccatcaccattatctaattttagaacatttttgtctctgttgaaagggagagtatacccattagcagtcaattcctactttctcactttccccattcttaggcaacccctcatctactttctgtctctgtaggtttgcgcctattctggacatttcatataaatggaatcacataacatgtggccttttgtgactgacttctttcactgagcatgtttttaaggttcctccatgttgtagcctgttttcagtatttcattcctttctattttcagataatattccattttatggatcctactttctgttttatttgcccattcatcatttgatggatgttcaagctgtttcagtgttttggtttttttgaataatgctgctgtgaacatttgtgtagaagttgttctgtggtcatcagttttatttctcttgggttgctgggtctgtggtaactgtatgattaaccttttcaattcaaggactactaaactagttttcaaagtgcctccgtcttttttttttttttttttttttttttgaggcggagtctcactctgt

SEQ ID NO: 81340 - DNA, 1044 bp, Homo sapiens
tttttagtagagacggggtttcaccatgttggccaggctggtctcaaactcctaacctcaggtgatccacccgccccagcctcccaaagttctgggattacttgagccaccacgcccggccataagcatacattttgattgagaatgtatctcttaatgagataggccttttgtttgtttgtttgtttaagagatgaggtctcgttatattgttcgggttagtctggaattcctggcctcaagtgatcctcccaccttaatcttctaaatagtgtggactacaggtccacacccagctaggacttttgttgttcacttagttgacatatctggatgaattgggtccatttatatttcttatttttatggatgtaagcactaagaaatattgctcacataaacatgtagatgggaatggaaggcattttttgtagctgtaacaattatttgaattccttctgatgtatatgccaagattacgtaatgatcagtcatcaaaaattatttttaattatctgtcaattgacaactcaattaggtctttcaaatttgtggtaagcaaagaattggaaactctctgggaaaataagcaagatcaatcgttattcactttactttttctaggaaaaataccctaaaaaaaagctttaccaatacttacctaatgactattaagtagtcttattattctttcaacaagaatcttgttccctgtatccaatatgtatggaagagttggggaaatcaaaatactgttagtttcagtatacctttccaatatgatatttttgacaaaatacttttattgtgtgatacgcttttctaataacttttttgttgttgttttttgagacagagtcccaatctttcacccaggatggaataagtacagtggtgcgatctcggctcactgcaacctctgcctcccaggctcaatttatcctcctgcctcaacccgccaagtagccaggactacaggcgtgcaccaccatgcctggctaatttttatgttttttgtttgtgttgtttttttcgtagagacgg

SEQ ID NO: 81341 - DNA, 1486 bp, Homo sapiens
ctcaactgaaatggatatccttgaaaactgatttatcaagctcctgagagtgaactatcaccttgcttccactaagtaatttgtaaggtctaagatccgcagtccctggtgttttttttttttttttttttttttttttttttttttggtataagtagctctcagacttttacccacatgagtttccattaaaattgtacaagctttgactttaaatcagctgatgaatagaaggagttgatgtgtgatcagctggtgctattgggaaaactgatgataagcagtggagcaggtaagaacgtattgttcctgaaccattggaggaactagcagcagtgacctctgaggagccctgggaacaccctggagctcctgagcaacacgttgcttgtgatcactgacctggatatcatgactgtgtgagcaacaccccccacacctcagtagcaaaaacagagaacagtggcagcacatcgtgggctgactgcagttgattctggctctcttacatgagaatgccaagtcatacaagaaagtgcctgccatgctgagcttctctttaccttcttgggttttaatggcattgcaagttatcagtataaaaactcatattagttatactaaatagttggaccaagttaagatattaggttgttatgtagtgtgcattttaaagtaaaacaaatgatagagcttttagaagcatctattatgaaaatgttccttcaagtctgtgccttatgaatctaataagcttttgcttttatatcaggttatctgtgctacaattgcatttggaatggggattgacaaaccggacgtgcgatttgtgattcatgcatctctccctaaatctgtggagggttactaccaagaatctggcagagctggaagagatggggaaatatctcactgcctgcttttctatacctatcatgatgtgaccagactgaaaagacttataatgagtaagctgggctccattgtagagacattctgtcatcttcagcctcatgatagtagtctactcctgctattgtggtacttctggtccagttttccttaaataatcgtagaaaaatagaggagtttatacagattggcaattttattttagttcatttttattataaaagtggtaagtgcttattttgtaaaactcaaatgatacagatgtgtacaaggcagaaaatttacaaaccatgccttgtagttttgcccccaaaataactctagttattggtttcctttgtatcctttcagaccctatttctgcatgcattcttgcatgtaacacatatttcaaacatgcaggaagataaaaaggagaaaataatgagctgtcatatactaccatctggattaagaaataaaacacaatcaatcgagctgaacccctccccaccaccccatagcctctcttgtctcatccgtcctctcccattagaggcaggcaaatatcttgtatttggtatgtaccttttcc

SEQ ID NO: 81342 - DNA, 2406 bp, Homo sapiens
caactatttgggggaaaaatactcataaactggaagaaaaaaataatattttttaaaaattattttcttttttttttttttgagacggagttgcgcttttgtcacccaggctggagtgtgatggcacgatctcagctcactacaacctccacctcctgggttcaagcgattctcagcctcagcctcccgactagcagggattacaggctcgcaccaccacacccagctaatttttgtattcttagcagagacagggttttgccatgttggccaggctggtctcaagctcccgacctcaggtgatccgcccaccttggcctcccaaagtgctaggattacaggcgtgagccaccgtacctggtgttaaaattcttaagtaacaacagttgcttactgatggaaagtatgccactgctgttctcacacattggaatcaaatccgacactgccaccctcatttcctgtttcacattgattttcttgagatacttctttttatcatagcaactgcgaaaaacccagctttgcaaagatgagatattgctaataggaatgtagcacaatctaatgttaataccattaactacctcaagctaataatttgggtgatgttcaacagatgttaggcattgctgtgtttcccttcatgtaaaatattctgtctctgtgagttcaccacagcacccccgggcttgttggcacacaattttggaaccactggtgtaactactttgacctcagatactcagagaagtgcatggccactgccgtaatctcaggctctgcttcctcaggatgttcagttcggtggatgctcgactgataaatacagcaaatataagtcaaaccatcatcattggggataatgaagatttgaaaaaaaaaaacctaacatttattcctatagtactaaaatcttgaggatgaacattaatactcagttaattataatatagaatgccatgttgacaatgctgttaacagtaattttcttatttaatatttaaagttatatgaatctattctaaatatttctatgatatgctctatttttcccctataagtatgtcttactatagtcttcatctcttttagtggaaaaagatggaaaccatcatacaagagaaactcacttcaataatttgtatagcatggtacattactgtgaaaatataacggaatgcaggagaatacagcttttggcctactttggtgaaaatggatttaatcctgatttttgtaagaaacacccagatgtttcttgtgataattgctgtaaaacaaaggtaaaaaaagaagttttaaaattctttataattaaattttttttctcttactttaaaaatgtagatacaaattagattgcaaaaggtggtctccgacagattaacaggggaaagacagcttccttccagtagtaatttggaatggaaacatttaaaaagtaatttcatgcggtatcttttctttataattagaaccctgttaaaaaatataatggacatcagcatatccagaatattgagtttatatatgtgcactgatgattacagaatattttagaaatattaatatgcaaacatccaaaaagatccaacatgggcaggtagaatattttaaatttaatatattaatgttattaatataatacattatattaaaaatttaattgattaaattaaatatattaaaattgacgtattaatatttaatattttaaatatttaattaatatactaaaaatctcattctcaaaagagtaataactagtgtaccgtatgtttgaattcaaatcaattacattactctttttttttaactataaagaataacagtaactgcttgtggataaattcactattatctgtcctaaaatacccttggaaggttgttaaattcagtcattaggtacttattttacctatcttggtaattctacattttaatgtctactgtaacctactgcttactgagcattttcacgtttggtgtattatttacctatctgggagtattagacttatatgtgcaagatgctggagagccacaagtgaccatggtatggaccaattcatagactggagtggagaccgacatacatgtgttcatagaagtttaacactctggcttggcgcagtggctcatgcctgtaatcccagcactttgggaggccgaggcaggaggatcacctgaggtcaagagttcaagaccagcttgaccaacatggtgaaaccttgtctctactaaaaaaatacaaaattggtcggctgtggtggcccatgcctgtaatcccagctacttgggaagctgaggcaggagaatcgcttgaacctggtaggtggaggctgcagtgagccaagatcatgccattgcactccagcctgggcaacaagagcgaaactccat

SEQ ID NO: 81343 - DNA, 1115 bp, Homo sapiens
aaagtcatctagtaacggggactctaaaaagtgggcaaagtttggggatagctgaaggaaatgagaaaggaaactagcaggagatgatgaaaagagcgttgactatggcaccaaagaccccagaggggttagaatccgtggatttacgtggcaccccacaggttcccacccagtatgtaacagagcactattctaggaggcatggaggatttaaattgtgtgtttgtgtgtgtgtctgtgtgttatatatgtgtttctacccacagagtgctatcaggtagttgaaagacaagacgtatctctgtgaaacagtaacaacatcgagtggtagttgttctagaacttagataagaatgaacatttgaaatttccgtaggttttggtctcggtattggtctggaaatgggttatgatgaatctactatagttaatattaaaccctagtaatctaggcattgttaccttaattatagcagaaagtattctctttttattcataggattataaaacaagagatgtgactgacgatgtgaaaagtattgtaagatttgttcaagaacatagttcatcacaaggaatgagaaatataaaacatgtaggtccttctggaagatttactatgaatatgctggtcgacattttcttgggtaagtcatctgttttgaatgtttgagttacttcaattgaaattgaacatctaaagaatttattacaagtacatagaaaaactttttgtctattttcttataaaacttgagtttctgaataaaacttttaagtaacaaaagaaagtcaattattatactgttttatataatgtatatgtcactaagttgagatggtttcacatacaaagaagaaaataataaagcttatgcgagttcatctgagtgggtggaatgtaactattaaaatgtcagtaaggaaataaaatgaggattagacccataacagcatagagaataggagagagactattatcagattagtgccttaaaaatctctcaggggctgagcacagtggctcacacctgtaatcccagcactttgggaggccgaggcgggcggatcacctgagatcaggagtttgagatcagcctggccaacatggtga

SEQ ID NO: 81344 - DNA, 1014 bp, Homo sapiens
tgcactccaacctccacaatagagtgagaccctgtctctaaaaaaaaaaaaaaaaatgtagataagtaatgcacagttatcctaatacatagcacagtgataggaagctattatggtttatgtaaactctttctttgatttatttgctccaatataattttgctgctgttttttgtccatgtgtattgtaaaaagataaggaaaagtacatacaaccatagaaattttagcgttctactcaaatactctcatttaacagaaatgagtgtctgtgccggggtttgtgatctattccatctgtccaaacctgtccataaatgactttttagcctcttctatttgagggtgatgatatacgtacatttactcatcttacttcctgtatcttcttatcagggagtaagagtgcaaaaatccagtcaggtatatttggaaaaggatctgcttattcacgacacaatgccgaaagactttttaaaaagctgatacttgacaagattttggatgaagacttatatatcaatgccaatgaccaggcgatcgcttatgtgatgctcggaaataaagcccaaactgtactaaatggcaatttaaaggtatagtatttttcatgtttattttattatctcacaatgagtgaaccaaaatatattattgtgaagtatagtgtctttgtccaagcttatagatactgaatttatatatactgttctatacgaacatattctgtttttcttaaattggaaagagatcttaaaattcaacccaagtaatatgacacctgtcaaaagtaatttaatgggttatcaggtcactaaatctttatatattcattaaagaagcatttatcaagaggctattctatgcttgacactggagatacaaagatggagaatgcacagcccctgttcccagtgggctcactatctgcatgacagaatagaattgccccccaaaaatgcaattaagcattaaataaagcccctgtatgggtacaagtgcacatatacccac

SEQ ID NO: 81345 - DNA, 3228 bp, Homo sapiens
ttcttccttaatagtccataaaataacagtatcttaatatagttggcatcttagatccaatgaaatattgtaatgaccaattgtaatattgtaatgggctgggggccgtggctcacgcctgtaatccctgcactttgggaggctgaggtggacggattgcctgaggtcaggagttcgagactagcctggccaacatggtaaaaccccgtctctactaagaatacaaaaattagccaggcgtggtggcgggcgcttgtaatcccggctacttgggaacctgaggcaggagaattggttgaacccaggaggtggaggttgcagtgagccaagatcgtgccactgccctccagcctgggcgacagagcgagactccatctcaaaaaaaaaaaaaaaaaaagtctgcaatgaagagctagtttccttatgaagagattatgttttatgcttctttgaatctggatctagcacactgctatgtctttagttaataaatacttactggtctgagttatttccatgggcagatagcccaacccagaatttcagtagtagagttcctggaaaacaacgtcttcatatagttggccagctgggctatattaccttccatattcttcttcataaaatctcataatcatcaccttctctcttcttcattccctctcctacgataatcggtcattacaatatttcactgactctaagatgccaactatattaagatactgttactttatggactattaaggaagaaaaaattctgctaattaaactatgacacagtgcttttattgaaaaaattgtgttttactgatttagacattgatttttattatccacagctgtgtgcctgtatgaaaaatacatataatcaaattaccgtaggtacttataaaagttcacattcaaagcctgactcttctgagtcactttttgactgagtcgtccatgtctttgtttttccctatgtcatcactaacattctcattagccataaggcatttccagagtgttccactattttccccaggatttaatcgaaatctctgttatcagttctgttttgaaggtggtggtttcttgatgataccagaaggtgtcaacagaaggttgtacatctctcagtaacaaaaatgtagtgcggcctcatctactttgggcatcttctttcttaggtcacgtaaagcacttggttgtacttgcgagaaactatggaattgggggcctgtgtcctcagagacaaatagtgcctgggttttttttgttttgctttgttttgtttttttggagataagatcttattctgtcgcccaggctgggtgcagtggttgaacacagctcactgcagcctagacctcctgggctcaagtgatcctcctaccccagcttcctgagtagctggaactacaggcatgtaccaccatgcttggctagcttttttatttttttgcagagacagggcctcactgttacccagactggtctcatactcttaggctgaagcaatccgccctgtctcagcctcccaaagtattgggattacaggcatgagctaccacgctcagccagatagtgcttttcttaataccaaatgtattccctgctactctgtttcagaacttttctgcattcacaatcacttttttaatgctaatcacagtatagtctttttgaagacatgtcatggcagttagactcaatacatgaggtacaaacagtgcagtgactttgttgacatgctgacagtactaatagctatgactaagttctcacaagcatgagcagtaacaaccgcaaggcagctgccatttagccatcagcagttctaagacatatcttgacctcaggaatgctaaattgtgaaaaggtgtgtgtcttagaattgatgaaatttggtattttatgatatgttatttctaggcgattagtgtagtttcttaactgtcctccttacctccagctgtgaatgtgatgtacattttaatctttcaaaacctagtaaaactacaacagcttcccagataaagtatacattttatcaagggtctacatttcttcctgcctctcctactttatctttcattaaacccccttcataaaccttctgttctgtccacagtctcttgcttttcctctaaacatgggaatgatgtgaaaatcacagatgggaaaggatttgaaatccactctttgctcagctcaaatacataggaatggttactccctcactacccagagccagtgcatcagtcagtcctacagagccagcctccaaaactcacccaagcttgcttcactgtgtctccactactgcattccagttcactccatcctcactcgctcctgcaatggcttccaccaggctcccggattctactctttcctttacagtcaagttcttaaacagcagccagggtggcctttaaatgacaggcttgtctagctgcaagactgatatgcgacctctatgcagaggactcagctggctgcttgttgcctcaacccacatggggaaagagtggaggaagaaaagtttgtgctggaggaagtaacaatttggttatgccgtctagggtggggtgtacaagtctggagtgcagagaagaggctggagctggaaatagaaatgcagcgttctcagtaaagagagggcacaccagtctcagctagatgagtactggccatgggaacagtgggcaagagcagatctgctccactccacgcacatggcacaggtcccaccctcagcttcctcctgccctggctcttgcccttgctctgccctggcctatgccgctggaattggatggtgggttcctgccctctgtgcctgtctgctgcctctgaggtgctaactttgccttttacaaaattggcctgtgttcccagtaccctgcagttagttggcacttagcagacgtgtgctgaatgcgtgaatgagcctgaattcagtgggttttctatgggtgataatttaaattcctaattttatgcctttgcacagaatctttatcttctgatcctgaggttttgcttcaaattgatggtgttactgaagacaaactggaaaaatatggtgcggaagtgatttcagtattacagaaatactctgaatggacatcgccaggttagtacacagccatgtgtgttctctaaaagcctgtttaatgtgaagcgacgcgtctcactgaattagaaggatgcagttgtgtgaatgcttcctacacc

SEQ ID NO: 81346 - DNA, 1031 bp, Homo sapiens
tatcccacctcagcctccccagtagctgagactacaggcatgcaccaccacacctgacttatttttgtatttttttggtagagttggggtttcactatgttggccaggctggtcttgaacttacgacctcaagtgatccacctgcctcagcctcctgaagtgctggggttacaggcatgagccaccacacctggtcaggttctcctaaattcttctatatggtaattagtccattaaaagccttgttccgaatacattttgacagtgagccagggttggagcagccatggtggagtcctgtgccctccatgctgctcctgtagggtggcctgtaggacaaggcagaccagccaggaaatggagactgggtccccgtgtgagctatctatagggaggtttcatgctttttgggtgccttgggatgcaaatacttatggaaattaccatcttctttgcaaatgtgtgctttcatgcggtctcacctcccgcataatatgtgacatgttcagccatattgtgcaaagacaagtttttttgtctgtaaagagtaaaataggatctagaattttcttatgttcatttactaagaaactattgttcaaagatgagatacaggaccgtttgtttcccttatattgagctgattttttcagcacatttaaaataagtaaaattgcctgccatctttatagcagttgatactttttgaattgcctaccagaactaactgcccaatcaacaacaggaacacaggccatatgcgacagtatgagctaaacctcatgtctctagttaacttcaagactatcacaaatttttttaatgaattctgattctcttttgttaaaaatgaattgccattgaacactttggggctttgtgcagtaaaaaaaggtttggttcttgctgaattgttgaatccatatggcagggaagcagctaggtatctgctaaaatgggcccctgcagcgtgtctcttcatatacactaaaaacacgtggaccagtgcgacatcacctgtaaacatctgc

SEQ ID NO: 81347 - DNA, 2091 bp, Homo sapiens
tttactattctgtcagtacttgctccgctgcttttattgctgcagaatcccatggatctccaccttgaagcacgtgcacactccctgcctttcattaacacctgggagaatcgacctcccagcctttgcaggggtagcaagaagaagccacaacagagaaaccaaaagttcagtcaagccaggcctctttaggggttgcgtaaatggcttctgtcttccccttcccatgttttcctgggccgctcgtctgggacatgtctgttctgggcgctttctgcacaccaggggaacaacaaagacagcatggtctgatatgtgtgatgatcttggcagtttccttctttcttcataattgcattgtttctgacagccgctttttgattttctgccagggcaccctctgccttctggctagtaggttaggcctggcaggagggagaccattccatcagtcttgagaacttgaccccaaagtaactgtatattgtaacagagttgcttgcagaaaaaagaaaccaaaaaaaagtccacagtcaacttttgcaagctgttgtgttttcttttgcagtttttctacctcttgtccttctgagtaataaaaaacaagaactgagtggggaaagagaaaggaaggcagacattaccaaattgtcattttcttgttaagtccataaacaaaatcttgtatgtgctaatcctcctgccagagtaccgaaattaaaggcattagaaaacgttagtttaattttgtggttttgagtgcgcaagtgatcagtaagtgctcttcagtgagaacattttcttatttccatcatttattcctccactttgggaaatactcatttcctcagtaactcacacagagccggagaccttaaaaggcatctggctcaacacccagggtttttgaagaggaagcttaggcctggcctggggagggcttatcggaggacaaccctgcctggtctcgatttcaaaggtagaagcggacactggcctgcccacacctgcccagagcacgttcacttctgcatgttgcctgtggagactcctaaaaaacacgcatggtcttccatctcatctttatgtattagaacaaagcaaaccatattgctattggctcccttatttaattttcacaacttttgtttgtaagagtgaagcactttgcagcatcatctggaacctaatctgataagaagcagtaaagctcacacttgtacccatttccatgcttgttttcagtgagcctgggtgtttaagatgggatttgttgttgttgttgtcgttatggagttttgctcttgtcacccaggctggagtgcagtggcaccatcttggctcactgcagcctctgcctcccgggttcaagctattctcctgcctcagcctcccaagtagctgggattatgggtgcacgccaccacgctgggctaatttttgtatttttagatggggtttcaccatgttggccaggctggtctcgaactcctgaccccaggtgatctacccaccttggctcccaaagtgctgggatgacaggcgtgagccactgtgcccagccaagatgggattcttttttaagccctaccagctaaagccagtgcactgtgtgactttgtgttacccttggagcagcctctttttgctccactctcctttccaccgacccagtgtgctccccggattgagagtccctgtgcagtgaaagaataaatgtggctctctgccagcaacctcacctccccaccctaccctcagagtttcacatcttcagaacaacacacaatgaaccagttgtgttctgggctctctgagtgggagtaaatggatggcccaggtgaaatggaggctgctgttggccgattcattctgtaaatcaacataaacagcaggttttctctctgggcttaatttctcagcaggaaatcagcatagggaaacttcaggctgcatctctgccagtctagcagatctctgccagttctgcagtaaaactgccttggagccagagtttaagtcatggagctccatcagaatgtcattacccacaggctgtggccctataccctcaattcagacgggaggcta

SEQ ID NO: 81348 - DNA, 1794 bp, Homo sapiens
gtagagtgcatataccacttggacttgcctaattaaaaaacacattttttttagaaatgaggtcttgctgtgttacccaggctggtctcaaactcctggcctcaagcgatcctcccgccttggcctcttggtctgattttttgtgtgcctagatagacatatttggatacatacttgatccaccagggatctcacaggggacaggaggttcccagagaatgaggctccagccttcccagttttccagcagtgtcctcctgccagccctccctcaagtcccaatcttgaatgaccccagcccactctgtccacagggccgaggggggctgggctccatctttgtctgggcctcggggaacgggggccgggaacatgacagctgcaactgcgacggctacaccaacagtatctacacgctgtccatcagcagcgccacgcagtttggcaacgtgccgtggtacagcgaggcctgctcgtccacactggccacgacctacagcagtggcaaccagaatgagaagcagatcgtgagtcttacctgggggtgggggctggggagatggggctgctggctggctctgtccagcaccctcttttggaggctgtctgcctccacccccatgtggctgggtgatagtggctcaggcatcatgcaacatgaactctggggctctgtaggttcttggaggccatggagccatctctgaagactttgaaaagcctagactctctctaaaaacatactttgttcttattcatctccaccctctagttgaacccccttattcctttggaaaatgaggcccaggaggggctcgtcattagcatgtccacggcaagttagcaaggcagcagctgggacctggggttcttggccctggctccccataccatctgtggtgcccagggcctgtatgcagagggagggtaggcaggtggctcctctagccccctccacccatcacaggccccaatatgattctcttcctggcaggtgacgactgacttgcggcagaagtgcacggagtctcacacgggcacctcagcctctgcccccttagcagccggcatcattgctctcaccctggaggccaagtaagtgggtgggggccagcggcaaccctgtccctaccagcactctctgtagggcagcccttagggcagctggagagctgctcccaaaaaagactgatccccagcctctcccttccttctttgcagtaagaacctcacatggcgggacatgcaacacctggtggtacagacctcgaagccagcccacctcaatgccaacgactgggccaccaatggtgtgggccggaaaggtgagggcaggctggcccggcaggctggatgtggagttaggtagaaggcactctgtgcctgacagctgaccctaccttccctgtccccacagtgagccactcatatggctacgggcttttggacgcaggcgccatggtggccctggcccagaattggaccacagtggccccccagcggaagtgcatcatcgacatcctcaccgagcccaagtgagggctggacccaggctgggagggggccagtgggacctgagagtcgcagggggtgcccgctggtccctctgggccaggctgaccatcatggtgctctcctgcacagagacatcgggaaacggctcgaggtgcggaagaccgtgaccgcgtgcctgggcgagcccaaccacatcactcggctggagcacgctcaggcgcggctcaccctgtcctataatcgccgtggcgacctggccatccacctggtcagccccat

SEQ ID NO: 81349 - DNA, 2250 bp, Homo sapiens
cctgcccagcgccgccgcctctcacagcccgcgtgcttgcctttgctcgctcacacggcccagggggcactgagtgctactcagtggggcactcttggcattttgggagggacaattttgtcctgtgggactgtcccatgttgcaggaatccctggcttgcaaccatttaatgtcagtagtgtgccccaccttgtgcggtgcctgtgtacctttctagaatcccccagttgagcacgtctggctcactgagaaacagccaagccagcaggcacttctggccccatggggttggtctgcgtgggggaagggtgtgtggcccatgtgctgtgggttagatgtccctggcttggggtcccgcagaggcctcagggctgtgtgcactcccctccccaggccacatgactactccgcagatgggtttaatgactgggccttcatgacaactcattcctgggatgaggatccctctggcgagtgggtcctagagattgaaaacaccagcgaagccaacaactatggtactgggggcacttgaggggtaggggtacgaggtggagggctggcaggatctcgagcactgggtgtggtgccagcactgtcttaactcttgcctcctccccgctctggaacagggacgctgaccaagttcaccctcgtactctatggcaccgcccctgaggggctgcccgtacctccagaaagcagtggctgcaagaccctcacgtccagtcaggcctgtgtgggtcagtagtgggtgctgttgggctttgggggcctgagtctgggggtaaggcgggtgcctgtcctgaagcccagctctaacagaaaaaagtctcaagagacctagggcccctggggctcttgggatgaccacagtcctggggctggaggatcctggggatgtggtgacttggcttggggctgctgtggtcctggggctacagtctgtttagctgacacacacttgccctctctcccacgccggcagtgtgcgaggaaggcttctccctgcaccagaagagctgtgtccagcactgccctccagggttcgccccccaagtcctcgatacgcactatagcaccgagaatgacgtggagaccatccgggccagcgtctgcgccccctgccacgcctcatgtgccacatgccaggggccggccctgacagactgcctcagctgccccagccacgcctccttggaccctgtggagcagacttgctcccggcaaagccagagcagccgagagtccccgccacagcagcagccacctcggctgcccccggaggtggaggcggggcaacggctgcgggcagggctgctgccctcacacctgcctgaggtggtggccggcctcagctgcgccttcatcgtgctggtcttcgtcactgtcttcctggtcctgcagctgcgctctggctttagttttcggggggtgaaggtgtacaccatggaccgtggcctcatctcctacaaggggctgccccctgaagcctggcaggaggagtgcccgtctgactcagaagaggacgagggccggggcgagaggaccgcctttatcaaagaccagagcgccctctgatgagcccactgcccaccccctcaagccaatcccctccttgggcactttttaattcaccaaagtatttttttatcttgggactgggtttggaccccagctgggaggcaagaggggtggagactgcttcccatcctaccctcgggcccacctggccacctgaggtgggcccaggaccagctggggcgtggggagggccgtaccccaccctcagcaccccttccatgtggagaaaggagtgaaacctttagggcagcttgccccggccccggccccagccagagttcctgcggagtgaagaggggcagcccttgcttgttgggattcctgacccaggccgcagctcttgcccttccctgtccctctaaagcaataatggtcccatccaggcagtcgggggctggcctaggagatatctgagggaggaggccacctctccaagggcttctgcaccctccaccctgtcccccagctctggtgagtcttggcggcagcagccatcataggaagggaccaaggcaaggcaggtgcctccaggtgtgcacgtggcatgtggcctgtggcctgtgtcccatgacccacccctgtgctccgtgcctccaccaccactggccaccaggctggcgcagccaaggccgaagctctggctgaaccctgtgctggtgtcctga

SEQ ID NO: 81350 - DNA, 1203 bp, Homo sapiens
gtactcaggcctcagctggtagaccccaagcagagaccctccctgtggcataaggagctgtgtgtgattgctttctggttttttggcagagccaaatttctgtgctgcagaaccgcattgagcagctggagcagcttttggaggagaaccatgagattatcagccatatcaaggactccgtgctggagctgacagccaacgcagagggcccgcccgccatgctgccctactacacggtcaatggctcctgggtggtgccaccggagccccggcccagcttcttctccatctccccgcaggactgccagtttgctttggggggccggggtcagaagccagagctgcaggtaagagtcagagctggcagggacgtacagtggccacgactggggtactgagctgcagttcacctggcagatgctcactgtgtcggaggagctgccgtttgacaacgtggatggtggtgtgtggaggcaaggcttcgacatctcctacgacccgcacgactgggatgctgaagacctgcaggtgtttgtggtgccccactctcacaatgacccaggtgagggccctgcagactcctgggagctggagtgtggagtgggatttctgatggccaatacaagggagggacgtcgaagaagatggtggcatcctcaggggaccctacattggctccctaggctggatcaagacctttgacaagtactacacagagcagacccaacacatcctcaatagcatggtgtctaagctgcaggaggacccccggcggcgcttcctctgggcagaggtctccttcttcgccaagtggtgggacaacatcaatgtccaaaagagagcggcagtccgaaggccagtaccaggcggggaggcatgggagggcattgtctgagccccaggctgggtggacgggtcttaccttaagctatgggtgccaaggtggcagggagaggcccagagagctgtggaagagatgagtgatggtggagggagggaaggcaaaaacagataggttccgagataagcggggccaggatagcctggaggttggctgtaaggaaaggagggcaagtgtgtgttctcttggtcctgggattgggagaactggtccagtgaggccagtgcacacaggccctgacatttgctggttggcaggactgggcagagtgtcctgctccgtcctgagtgtgagtccttaac

SEQ ID NO: 81351 - DNA, 1100 bp, Homo sapiens
taggtgctctcttgcccagccctgggctggcaccttcctgctttgccctctgtgctgtagtttcaacagcaatctgctctttctctagccctacgtccccaaggagccccccgtgctgcgtgtcactgaaggccctttcttctcagaggtggttgcgtactatgagcacattcaccaggcggtccggctttacaatctgccaggtgagccctgcatatgaggaagggtctggaaggaggtgtgggctccacaactgtggcgtattcttccttctgctgcttctctgttcatacctctgttccgtatcatttgagacagggatgctccattctcttggagaaaaagtcatccagaaatgccctggggatttcttgggaggttggacagagcctctccccagctcggctctgatcccccagcccagcctcttagctgtgcttcagcctcacacctgtccatgcccccactttgttcctgtacccaggggtggaggggctgtctctggacatatcatccctggtggacatccgggactacgtcaacaaggagctggccctgcacatccatacagacatcgacagccagggtatcttcttcacagacctcaatggctttcaggtgactcctgggcctgggtctcggagaccccacagagtagaacttggactctgcttttgcccctgtcacaggccctgggggatgatctgccctgatggagaaagatgaatgagaggcgaagagttatcggggactccttcagtctggggaccgcttgggcccacatggtgcccgggtgcccttgatctgctggccttgcccccacaggtgcagccccgacggtatctgaagaagctccccctccaggccaacttctaccccatgccagtcatggcctatatccaggacgcacagaagcgcctcacgctgcacactgcccaggccctgggtgtctctagcctcaaagatggtgagtagggcccaggagttctgcagagggtatcagacaaaaagaagcccgtccccaccctcaagggctccccgctctgttggcctcccttgcctctttctggactgcatcacctccatgcttggagaggggg

SEQ ID NO: 81352 - DNA, 1931 bp, Homo sapiens
ttatattgttagtagagacggggtttcgccatgttggccaggctggtctcgaactcctgacctcaggtgatccacccgccttggcctcccaaagtgctgggattacaggtgtgagccactgcccctggctgagattcttaaagaggtaccaaattgtagatgaacagccacattctttagtgtctcggcacctagcacaaccctgccccttctctgctctccacaggtagccctgggcagccttttccatggcctggatgtggtattccttcagccaacctccttgacgttactgtaccctctggcctccccgtccaacagcactgacgtctatttggagcccatggagattgctacctttcgcctccgcttgggttagggcttcttgtggcctgaagagaaagttcattcacagagactgcctcttaacatgaagatcattggacaagccacacgggtatcccatcccgatctgcctcccagaactgtgacacactgggctctgccctcattttctgtttattgctgctgctgtgttttcggcgcaacccacaaacccagtgatgggtaaatagggcagacgccagtgagatcagggagagaaggcccttggtcagagtgggcagtgccaggctctgctttgggttgtgagtggacacccaactgggcacaggctcaggcacccatcctttttccaaacagggatatagaagtggtggaagcagacagaagaggtaagggaggctaagtgggtaacagcccagcatcagggtcactgtggcaacagcaggctctaggggaatcctgtggttatgtagagactccatgtcctggtgtgatgagcaggatcagagtgactctgggaggacaggggtggggacccagagttagcagtggggatggagcagtagaaggaatcactgtttctcctaggagtctgaaggcctcgctgctttctgtgatggctttgcagtaagtgccgcctggcctgcatgcattggctaacaggctgcagaatggcaggaaggactcgctagagattgtcatggccagagatcataggtcacttcaggtagcaagacccctggcaaactgggcacttggcctatgtactgatttgtgggatggtggcaggggtgtggggtccttcaccctgcctgaattctctttggcttctgtgctctgtatgctgctgtccccaagggctctttcttattatggcagggagtggggattggtcctactttctttctctggaaaggaaagcctccaagactccatgtgcttgggcagcttgagaaggcgttcagcaccacgcctagcaggcagaccttgaagcctcacctttagtctatctgcagaggtattcagttcctggcacaggggactaggggcatgtagagtatatgaggaggcagtatggctgtgcaggagccttcatttcagcttcaattaatagggaagaatttatgatagctctatagatgctgaaaaggtatttcgtaagatttaaaatccatcccttattaaaactcttagtaaattaagtctggaaagaaacaccctaatctagataaaggtctgtttcagaaaccaacagtgatggcattctaaagagtcagacgccacaggcattcccattaaagtcagaaactagccaagggcaagctattattcagcagtgtcccggcactactaacccctgcaacaagccagatgaggaacataaggaagaattataattgtcattatttgtagacaataaaactgcctacctgtaaaacctaagaatcaactgaagacctgttaagagtattctgtaagtcaacccaatgatacacatcatgttcctgtccacatactggttttccccaaatcagctgataaattcagtgtaattccaatgagattgaaactttggaattgacagt

SEQ ID NO: 81353 - DNA, 1040 bp, Homo sapiens
gtatgaatttgagagggacacaaatattcaaacttgcgggaggcatgctgactgggaaaccccagtccttcctactccactgaggggccttctctaggtctccacactcaatgctgtgtctcaaatcttcaactctgtcacattcagaatgacagagtccgcatctccaaccccactttggtttcctgtgcccagactacctaactacatggatttttagttcaggtttattctcaactagggaggtccaaagtcaggagccagaatgtcaggagtcaggagccaactgcagacccagctggtcctgggtactgttaccatctgaattgatttctcactgaccctaagtaaaattgagggttgttgcgaaggatctggtctctgtcttatctcttctcactatgagaatgagaatgagaatgagcccttgaagtgtttgtccttcacacacttttttgttagggaagaacaaagattttgttcagagatctctattgtggatggtaagcctcattcccaccatcctagactgattttccccctccgtgagtgcacagatgccccagtgacagagcaaggtaagcaagtcaggttcaggtcaaattaaagatgctgctctctctgcacaagtggtcgaggttttatgttttacctaccctgaggcaagccatatgaggacactgtctgggctggctcgccctgcatgggaggaccagctcttaagtggttcaactggagcctttctctctgtggttccaactggccatacagcccttccttcttcatgaaagctggatggttccaagtaaatgtaggaatagaatccgatccgtctccagtggttgaaatggcttctgtcatgtcctggttcattttgatggtaaccctcagaactgtgaggctggccgggcgcagtggctcacgcctgtaatcccagcactttgggaggccgagacaggcggatcacttgaggtcaggagttcaagaccagtctggccaacatggtgaaaacctgtctctactaaaaatacaaaaattag

SEQ ID NO: 81354 - DNA, 1154 bp, Homo sapiens
tgcccagccaacagcctcccttttaagccagtttgtttccttttgtctggctgttttatttcccagttcctcaattactgctgtgagaagggtccccctttctctgtgagtcagcctaggcccctctcctaagctgcctcctcccccaggacaagccaagcttcgtgcgggctcgggtgaagaagctgctggcagcgggtgtggtgtcggccatggtgtgcatggtgaagacggagagccctgtgctgaccagttcctgcagagagctgctctccaggtgagccagccttggtaggagccaacctttcccaactcctgagcctcagggctgcagatgtggctccagagggtgcaggttccagtgctgtgggcctcttagagcgacgggggctgcctgcgtggctgccgtctttgctgagcctaggagtgcagcgtctgcctgccagagtcccagagctgcctgcccaccaccgccttctccccacagggtcttcttggctttagtggaagaggtagaggaccgaggcactgtggttgcccagggaggcggcagggtaagctggtttacacaccccttcctgatggctgagccatcagcctataaaacatgactcagcagctgccacgccagagctgggtgttagatatggaacagaaaaacattaatggccagaggaacaccgtcccgctgagagagtgacgcggaagcaggcaagctccttggcccctccacactggtgcctgtgaaggtcctaggctctactgttcctttgtctcatttacccccatggccctggtgctcagcacaatccatgtccagcccttattaggtgtttcaggaagtgtttggatgcagagggtctgcacagggagtcaagcctggggagagggaggaaggtgagggtggcacggtcagggctggggagcccgatggtcggggtcttactcccagggatgtcctgagcagtgacgggcttgttcctacaggcgctgatcccgctggccctggaaggcacggacgtggggcagacaaaggcagcccaggcccttgccaagctcaccatcacctccaacccggagatgaccttccctggcgagcgggtacgtgtcttcctgccccggcctttccactccctctgtccctgatggcctgt

SEQ ID NO: 81355 - DNA, 1054 bp, Homo sapiens
ttgcccaggggtcatatctaccctgtttttctcacagaccacacactggctggagatcctgcaggccctgcttctgagctccaaccaggagctgcagcaccggggtgctgtggtggtgctgaacatggtggaggcctcgagggagattgccagcaccctgatggagagtgagatgatggagatcttgtcagtgctagctaagggtgaccacagccctgtcacaagggctgctgcagcctgcctggacaaagcagtggaatatgggcttatccaacccaaccaagatggagagtgagggggttgtccctgggcccaaggctcatgcacacgctacctattgtggcacggagagtaaggacggaagcagctttggctggtggtggctggcatgcccaatactcttgcccatcctcgcttgctgccctaggatgtcctctgttctgagtcagcggccacgttcagtcacacagccctgcttggccagcactgcctgcagcctcactcagaggggccctttttctgtactactgtagtcagctgggaatggggaaggtgcatcccaacacagcctgtggatcctggggcatctggaagggcgcacacatcagcagcctcaccagctgtgagcctgctatcaggcctgcccctccaataaaagtgtgtagaactccactgtgtgccctgtccttgggcagggagggctgctgtgagtgggagtctctgagtgggtgagtgtgggtgagtatgggtgtgagctgggcgtgggtgagtgtgcaacggagcttcacagtggcagacccacctccatggaaggaatccaatggattccccaaccagggcccactgagttgcttcttaatcctactggagggacaaagggtaagcctaggaagctaatcaataagaaactcaccaggtgcggtgcctcaagcttgtaatcccagcgctttgggaggctgaggcaggtggatcacttgaagtcaggggttcgagaccagcctgggcaacaagcaaaactctttctctataaaaataccaaaaaaaaaaaaaaaaa

SEQ ID NO: 81356 - DNA, 1031 bp, Homo sapiens
actttgtctcagaatctcctctgtaaaacgaccattttggttcccaagattacatgggataaagtgccagatgctgggaagctgcgggacggggtgggggtgtcgggggcgctcggatcctagtccaatgcctaaaggacaggccacttcgtacccactttgtggcacgctgagcttgagccaaaagggaggacagggaaagtgcctctaaatatttgagcatctttgtaaatccggtagggcattagtcagggcgcctgctcagcgaaccttcgtggcacggactctgcctttgtggtcgggagaatgatagtttctccattttacagataaggcagctccagcccctggaaggccagagacttgccagtgtcccactagcgggctcttcgcaagaatccccccgggcccgccgcagccaggcggcggccggcagagggcgctgctcgggcatggcggaggagcggccgggggcctggttcggcttcggtttctgcggcttcgggcaggagctgggctccggacgcgggcgccaggtgcacagccccagtccgctgcgggcgggcgtcgacatctgccgcgtgagcgcgagctggagctacaccgctttcgtgacccgtgagcactccccgccccgtccccacttattccagccgcgctccccagtcgcctccccgcaccgctgtggccagtccagtttgtctcccccgttcaggccgccagccccacattctgggttggtccccaattcgaccccttcccaggaacaccccgctccccccatccccgccgcctccattctggccaccctgctccaatccgccccgcaggtggaggccgcttggagctgtcgggctcagccagcggcgcggcgggccgctgcaaggacgcgtgggcctcggaggggctcctcgcggtgctgcgcgccgggccggggccggaggcgttactgcaggtctgggcggccgaatcggcgctgcgtggggagccattgtgggcccagaatgtggtgcccgaggccgaaggggaag

SEQ ID NO: 81357 - DNA, 1060 bp, Homo sapiens
ggtgacaaagccaacaagactggaggaagcaggggcctcggccaggtcactgggaggaacaggactgctccctccctggggttggaacagacataggcgcgctcagtccgaggccagacaggggagacatggagaggatatcggtaccacccgcctacctctctgaaagactgtcttaagggagtatccaaccagcacttacaaagcagctttttgtggatgtgacactgggtggagaaaaagattcgatggaagtgtgtgctctgaacatcttagcttggatagcagggaagtctggaggagcgtcttgcctggagtggctggtcgccactagcctcttggggatccccaaggttgcctggctctgggtctcttggattcacagagcagtggggcataatcccagcacttcatttgatagtctgggccccttcctggagggaaagcagcagcaagacccagtggagacgatggcaaaggggctgatttcactttaggtaaatatggacagctgggccacgaggacaccaccagcttggatcggcctcgccgtgtggaatactttgtagataagcaactccaagtaaaggctgtcacctgtgggccgtggaacacctacgtgtatgctgtggagaaagggaagagctgacatgtgtacgtatatgtatatgcaacacctgtgagacccccattcaggtcaaggaaaaccattgcctgcaccccaagggccccatatttgcccctccccatcacagtcctgcccttcaccctcaagcacggtcctaaacttgtctgcactttagaaacacctggagagcattgaaaactctgctgcctaaggtcagcatcaatcaaaacaatgaaatcaatgaaacaatgaaaccagagcttctaggtgtgtggcctggatagtggtagattcaaagctccacccacctcatcccaggtacatttgatgtgcagctgagattggggcacattccaggtcatcgtcttctgtcagtcatttccctgctttcgtttgaattttaccattcttgtatgcagccttatacgacat

SEQ ID NO: 81358 - DNA, 4210 bp, Homo sapiens
agccacacccagccccatatatatatatatatatatatatatatatatatatatgttttttttttaactaaaaagtataggattatagacatgaatataaagatagtctcagcctttgaccagtgcaggtattgtgtgtgcgtgtgcacgttcattagaaggatgatacatggatctctttcctttctctgcagccagtcgctgcttccacctgttcagggaagaaaacaccccgtactggcaggcatggagccaacaaggagaacctggagctcaacggcagcatcctgagtggtgggtaccctggctcggcccccctccagcgcaacttcagcattaattctgttgccagcacctattctgagtttgcggtaattcaccttttctaatatctaccagtctctggggagcacacagttggggcagagtgggtatcttcccaggggcacccaggctattagctagggcagctaccttggaggctgagaatccctttcctgctttgaccatggcagggtgggtgtgatttaagggggggttgtgtaggaaggaagttggcagcagcaactagacatttaacctggatccttctgcttaatacataccattccctggctgcaggaggcaacccctctatcactgtcctggtgctctcttggtggagttcttggtaattgtcttaattctttgttcttagaaggatccgtccctctctgacagttccactgttgggcttcaggtctgtatggcaatccctgcatgtcccttttccaaactgatctgtcatctgctggcttcattcatctgggcacagggctacactaactaataatctcagcagtgttacaaaggaagcaggaattcctatcatggactcaaaaaaacacatctgatttacattcacaacagattaattaataaaatttgttcagacttgaattggattctcagcccctaaagtcaggcacagttttaaatcacgtttaacagaaaaccttgaccctccccaattgtgacatcaaaggcctgcaatagctggaaagaatagaggcccccaatcacatggggaagggagccccagctgtgtgctgcctacaatgaggctcttggcctgtgtgctgattatttcctggagtatatgccttcctaacccctcagggcttaaccgccagctctattctcagctagctaatgctgatttcctcacctttgcctctttccatacattgagctactgaagcatagatgaagcactggaagcaagtttttccagaatgctcttcacttcctagtatcctactctatatttgctaacacctaactacactgccttttacttaatctgtgatttcttctctcaatattttactagcaagaggagaggatgttcctcacccttgaggggatattgagttaaacccctagcctgcctcccctcttaattgctgcagggatagagaatggaacagttggccaaggctgcagctagttttgatcactgaaactggcttcctactccagcatgtttttcaaattacgtggctggtggtgcttctacctttaaaagtgggtgtgtgtcactctggctgattgctggacagaggtccagctttctctttttcgcttgttcaaccaaggcccattttatctgaggcttaaatgtacctgcctatctgtgtggctagtcctaggtaggttcgtctggtttgggttgctatggctgatagactccaccaggcagcaccaaagccggtaaactaacctctgctaatatctgtctttctcaatagccattcatgctttatcttttgctgctctaccatgtgctccagcatgagatcaaatcaccagcaggttacaaggcctcagccccagggattggtagatatatgttctggcccattgttttataaagggctcaagagaccaaagcttgttgcctacttaccttgacaactctaaagtagctctgtgaagtagagtcatgcctcgcttaatgacagggatatgttctgagaatgtggggcaatttcattgtgcacatatcagagtgtacttaacagtcctagacagaacagcctacacacctaaactatatggtatggcgttttcctcctaggctacaaacctgggcagcatgttacagaaagaatactgtaggcaattgtgggtttttttgattcaggctattcctgggatactgtaggcaattgtaacgcaatggtaagtatttgtgtatctaaacatagaaaaggtacagtaaaaatatggtataatcttatgggaccaccatagtgtatgtggcctgtcgttaactgaaacatcattatgcagtgcatgactgtatgaaggatttctcttctgtgaggtgtaacagaatggactggctgaggaaaaaggggtcacgggcatgcgtgcacatgcactctgtctgtgactaatagaatggtgctcagagttcctcaccttttactcctaacgcagcctattgcaggctagggatctcagagaaactaccttcaagggaccttttgctgacacttaaccaaacttagaagggtgggccatgtgtaagagaggcagtatggccactgatgttatttatttttcaacagcgagaactttcaaaggcttccaaatctgatgctacttctggaatcctcaattcaaccaacatccagtcctgagaagccctgatcagtcaaccagctgtggcttcctgtgcctagactggacctaattatatgggggtgactttagtttttcttcagcttaggcgtgcttgaaaccttggccaggttccatgaccatgggcctaacttaaagatgtgaatgagtgttacagttgaaagcccatcataggtttagtggtcctaggagacttggttttgacttatatacatgaaaagtttatggcaagaagtgcaaattttagcatatggggcctgacttctctaccacataattctacttgctgaagcatgatcaaagcttgttttatttcaccactgtaggaaaatgattgactatgcccatccctgggggtaattttggcatgtatacctgtaactagtaattaacatcttttttgtttaggcatgttcaattaatgctgtagctatcatagctttgctcttacctgaagccttgtccccaccacacaggacagccttcctcctgaagagaatgtctttgtgtgtccgaagttgagatggcctgccctactgccaaagaggtgacaggaaggctgggagcagctttgttaaattgtgttcagttctgttacacagtgcattgccctttgttgggggtatgcatgtatgaacacacatgcttgtcggaacgctttctcggcgtttgtcccttggctctcatctcccccattcctgtgcctactttgcctgagttcttctacccccgcagttgccagccacattgggagtctgtttgttccaatgggttgagctgtctttgtcgtggagatctggaactttgcacatgtcactactggggaggtgttcctgctctagcttccacgatgaggcgccctctttacctatcctctcaatcactactcttcttgaagcactattatttattcttccgctgtctgcctgcagcagtactactgtcaacatagtgtaaatggttctcaaaagcttaccagtgtggacttggtgttagccacgctgtttactcatacagtacgtgtcctgtttttaaaatatacaattattcttaaaaataaattaaaatctgtatacttacatttcaaaaagatatagtgtggtgtttcctttttttccccagtcactttttagttggttggtctgtgtgtgaaaaacaaacacaaaaaactaaaaggacctcctggaaatttttagtcaggagtgtgatttttttttttgagtctcactctgtcgcccaggctggagtacagtggcactatcttggttcagtgcaacttccacctcccaggttcaagcgattctcctgcctcagcctcccgatttgctgggattacaggcacgcaccatcacacctggctaatttttgtatttttagtagagacaggctttcaccatgttggccaggctggtcttgaactcctgacctcagatgatctgcctgcctcccaaagtgctgggatgacaggcatgagccacagcacccggccgagtgtgatttttaaaatattctctggtacatt

SEQ ID NO: 81359 - DNA, 2041 bp, Homo sapiens
aatattttaaaaatcacactcggccgggtgctgtggctcatgcctgtcatcccagcactttgggaggcaggcagatcatctgaggtcaggagttcaagaccagcctggccaacatggtgaaagcctgtctctactaaaaatacaaaaattagccaggtgtgatggtgcgtgcctgtaatcccagcaaatcgggaggctgaggcaggagaatcgcttgaacctgggaggtggaagttgcactgaaccaagatagtgccactgtactccagcctgggcgacagagtgagactcaaaaaaaaaaatcacactcctgactaaaaatttccaggaggtccttttagttttttgtgtttgtttttcacacacagaccaaccaactaaaaagtgactggggaaaaaaaggaaacaccacactatatctttttgaaatgtaagtatacagattttaatttatttttaagaataattgtatattttaaaaacaggacacgtactgtatgagtaaacagcgtggctaacaccaagtccacactggtaagcttttgagaaccatttacactatgttgacagtagtactgctgcaggcagacagcggaagaataaataatagtgcttcaagaagagtagtgattgagaggataggtaaagagggcgcctcatcgtggaagctagagcaggaacacctccccagtagtgacatgtgcaaagttccagatctccacgacaaagacagctcaacccattggaacaaacagactcccaatgtggctggcaactgcgggggtagaagaactcaggcaaagtaggcacaggaatgggggagatgagagccaagggacaaacgccgagaaagcgttccgacaagcatgtgtgttcatacatgcatacccccaacaaagggcaatgcactgtgtaacagaactgaacacaatttaacaaagctgctcccagccttcctgtcacctctttggcagtagggcaggccatctcaacttcggacacacaaagacattctcttcaggaggaaggctgtcctgtgtggtggggacaaggcttcaggtaagagcaaagctatgatagctacagcattaattgaacatgcctaaacaaaaaagatgttaattactagttacaggtatacatgccaaaattacccccagggatgggcatagtcaatcattttcctacagtggtgaaataaaacaagctttgatcatgcttcagcaagtagaattatgtggtagagaagtcaggccccatatgctaaaatttgcacttcttgccataaacttttcatgtatataagtcaaaaccaagtctcctaggaccactaaacctatgatgggctttcaactgtaacactcattcacatctttaagttaggcccatggtcatggaacctggccaaggtttcaagcacgcctaagctgaagaaaaactaaagtcacccccatataattaggtccagtctaggcacaggaagccacagctggttgactgatcagggcttctcaggactggatgttggttgaattgaggattccagaagtagcatcagatttggaagcctttgaaagttctcgctgttgaaaaataaataacatcagtggccatactgcctctcttacacatggcccacccttctaagtttggttaagtgtcagcaaaaggtcccttgaaggtagtttctctgagatccctagcctgcaataggctgcgttaggagtaaaaggtgaggaactctgagcaccattctattagtcacagacagagtgcatgtgcacgcatgcccgtgacccctttttcctcagccagtccattctgttacacctcacagaagagaaatccttcatacagtcatgcactgcataatgatgtttcagttaacgacaggccacatacactatggtggtcccataagattataccatatttttactgtaccttttctatgtttagatacacaaatacttaccattgcgttacaattgcctacagtatcccaggaatagcctgaatcaaaaaaacccacaattgccta

SEQ ID NO: 81360 - DNA, 1051 bp, Homo sapiens
tatatatatggggctgggtgtggctcatgcctataatcccaacactttgggaggccaaggcaggaggattgcttgaggcgacatgttcgagaccagcctgggcaacatagcaaaacactgtctctagaaaaaaattttttttaaatatgaattcttgatttacagaacacctatcttgagcatagtctaataaaatatttgaaagactgaatgtgttttgccacatactttccacatctctactgagtacctggcatgtctagtgatctggtttcactgggctagaacccacatgtaggggacctatctccataccagctgaggactgggcttggaattgagtctacagcgaccctgcctgatcttcagtttcccagacacatcccagtgcttcccatggtaccagtggggctcagagtgactgttctctttttttgcacgttagttttggaccattatttaatggtgagctagcttatatctgtcaactctcagcatctcaataagaaccaaatccagggatcttagaatctagaacaagtaggtggggcctctgggtgaacaggctagggacgcatgtgaggatgtgcttagacacagggcatactaaccttgctgccagaaggaggaagtcgagacacgggggagtggtagactgtccctccaaagataggccgaatgctactattggccgtagcattggacatggtggtagtgttcagctagggagaagagcacgtgggtaactgatgtgcagtaacatcctcagcatttctagcaacctgtctaccctacagagaaatgactatgggaggaggcagtctagggaagacgggtttacatggtgaagggcctgctgtgtctaatactgcatagatttgaagtaacttgtgaaaaattttcaaagcctattgctatccagcaaatggaagtgtacaatggtacaaccactgtggcacaagacatctagcatatgacccagccattccactcttagatgtttctacccaaacgaaatgaaagcatagatccatacaaagacttagacgta

SEQ ID NO: 81361 - DNA, 1025 bp, Homo sapiens
taccacagtttgcttgtccacttacctgctgatgggtatttggctgttgccagcttttggctgctgcagggagctgttgtgaacatttacgtctaagtctttgtatggatctatgctttcatttcgtttgggtagaaacatctaagagtggaatggctgggtcatatgctagatgtcttgtgccacagtggttgtaccattgtacacttccatttgctggatagcaataggctttgaaaatttttcacaagttacttcaaatctatgcagtattagacacagcaggcccttcaccatgtaaacccgtcttccctagactgcctcctcccatagtcatttctctgtagggtagacaggttgctagaaatgctgaggatgttactgcacatcagttacccacgtgctcttctccctagctgaacactaccaccatgtccaatgctacggccaatagtagcattcggcctatctttggagggacagtctaccactcccccgtgtctcgacttcctccttctggcagcaaggttagtatgccctgtgtctaagcacatcctcacatgcgtccctagcctgttcacccagaggccccacctacttgttctagattctaagatccctggatttggttcttattgagatgctgagagttgacagatataagctagctcaccattaaataatggtccaaaactaacgtgcaaaaaaagagaacagtcactctgagccccactggtaccatgggaagcactgggatgtgtctgggaaactgaagatcaggcagggtcgctgtagactcaattccaagcccagtcctcagctggtatggagataggtcccctacatgtgggttctagcccagtgaaaccagatcactagacatgccaggtactcagtagagatgtggaaagtatgtggcaaaacacattcagtctttcaaatattttattagactatgctcaagataggtgttctgtaaatcaagaattcatatttaaaaaaaatttttttctagagacagtgtt

SEQ ID NO: 81362 - DNA, 1811 bp, Homo sapiens
aataataataccattttttgagttaagtcagggatatcatttcaaaacgctctcatttagtgattcgtctaatccttacaacatccttatgaggtcggtattctttccatttttacagacgaggaaactgaggtactaagaaattaggtaaatctggccgggcgtggtgtctcactcctgtaatcccagggctttgggaggccgaggcagttcgagaccagcctggccaacatgacgaaaccccatctctactaaaaaatacaaaaattaaccaggtgtggcgtatgcctgtaatcccagctactcgggaggctgaggcacaagaatcgcttgaacccgggaggtggaggttgcagtgagctgagatcgtgccactgcactctagcctgggcgacagagtgagactgtctcaaaaaaaatgtaaatttgctcactgcttcacagccagtaaagagggtgattccagattgaaccccattaagtctgatttcagagtcctgctcctaatgttcaccgcctatttcatattgctgatcttccctgtgctgcctccaacttcaggcaccaaaaccttagtggtcaaactttgggttcttgccattttccactcttgtgtgttgtgtgaatgaaatgtctccgggctttgatttctggtcactctgacctgtacccatgtgggcccagctacctgaaatgaggctaatgatgctctggggaggaggagtcactctctagggaaatcatttcatttgggctttgcactaaagagttgaagtaattaacatgtccttgtttctggtctcagctggaagaagagttgaaggcacgaattgaattgtgggaacaggaacattcaaaggcatttatggtgaatgggcagaaattcatggagtatgtggcagaacaatgggagatgcatcgattggagaaagagagagccaagcaggaaagagtaagtgtgaacgtgaacgcaaattgggaaaagacgaagaaagtaatctgagcagcccatagtctctgccggggaccagggtttgtggaacagggagccggggaccggggcttgtggaacgggaagccggggaccggggcttgtggaacggggagccggggaccggggcttgtggaacggggagccggggaccggggcttgtggaacggggagcccgcggcagctctttagctctggctgtagagacacgggcctagattcccggccctgctgctgttgccatcccagacccgctctcttcctgagatttatcactgttgcttctgactttcacacagcaactgaagaacaaaaaacagacagagacagagatgctgtatggcagcgctcctcgaacacctagcaagcggcgaggactggctcccaatacaccgggcaaagcacgtaaggtaaacacaaggcttagggaaacactgatttcaagggagtgggtgagggtagtcccagccacctctttgaagggggccagcccctccacacctgtgggtatttctcatcaggtgggacaagagacagagaaaagaaataagacacaaagtatagagaaagaacagtgggcccaggggaccagcactcagcatacagaggacctgcaccagcaccggtctcttgagttccctcagtatttattgattactattttcactatcttggcaaggggaatgcggcaggaggacagggtgatagtggggagaaggtcagcaggaaaacgtgagcaaaggaatctgtgtcacaaataagttcaagggaaggtactgtgcctagatgtgcacgtaggccagatttatgcttctcccca

SEQ ID NO: 81363 - DNA, 1096 bp, Homo sapiens
taccttacgtgctttgcccggtgtattgggagccagtcctcgccgcttgctaggtgttcgaggagcgctgccatacagcatctctgtctctgtctgttttttgttcttcagttgctgtgtgaaagtcagaagcaacagtgataaatctcaggaagagagcgggtctgggatggcaacagcagcagggccgggaatctaggcccgtgtctctacagccagagctaaagagctgccgcgggctccccgttccacaagccccggtccccggctccccgttccacaagccccggtccccggctccccgttccacaagccccggtccccggcttcccgttccacaagccccggtccccggctccctgttccacaaaccctggtccccggcagagactatgggctgctcagattactttcttcgtcttttcccaatttgcgttcacgttcacacttactctttcctgcttggctctctctttctccaatcgatgcatctcccattgttctgccacatactccatgaatttctgcccattcaccataaatgcctttgaatgttcctgttcccacaattcaattcgtgccttcaactcttcttccagctgagaccagaaacaaggacatgttaattacttcaactctttagtgcaaagcccaaatgaaatgatttccctagagagtgactcctcctccccagagcatcattagcctcatttcaggtagctgggcccacatgggtacaggtcagagtgaccagaaatcaaagcccggagacatttcattcacacaacacacaagagtggaaaatggcaagaacccaaagtttgaccactaaggttttggtgcctgaagttggaggcagcacagggaagatcagcaatatgaaataggcggtgaacattaggagcaggactctgaaatcagacttaatggggttcaatctggaatcaccctctttactggctgtgaagcagtgagcaaatttacattttttttgagacagtctcactctgtcgcccaggctagagtgcagtggcacgatctcagctcactgcaacctccacctcccgggttcaagcgattcttgtgcctcagcctc

SEQ ID NO: 81364 - DNA, 1001 bp, Homo sapiens
attctgcttttctgtcttgcccagccagtagaggggtggatcacagaaaatgtgcaaaaacatctgttgaatttagttggggtagctccatctttatattcagtgcagttcagactagcattcaactggactccaggagtcaagctccttttggctcaaacgtaggctctggcatttaccattatatgtctctgggttaaatgactcagcatttatgtgctttagtatcctcacctcttgacatgaggatgtgaaataatattaagggtttgacactgcacctggcaaaaagtaagcacctgataaaaacttaagcttcacagctagaggctacagtgacatattgcttcagaaagcaagagaccaatatttcccaataaaatttgcaaatgctttttcatacaggaatggcaattatgctaaatgtcttgaaaaggtggctttatctgttcagaaaaggatatacttcctgttgaatgtctggatgtcttaaaaactagtgagcaggccacatgaagaccccacttttggctgggtgtggtggcccaacactttgggaggccaagttgggaggattgtttgagcctaggaacttgagactaggctgggcaacagagtaagacctgtctccaaacaaacaaaccaaagacctcactcttgtactaaccagcacagaaaggggcaaaagcttgtctctgctcctggctataaaagcactggtcccagtactgaaccagctccactcgaattgcctcaatcactttcttcatgttttgcattttcagttcttccaaccgatccacttctaattgcagctgaaagaaagaaacttgttaagggtggctgccatagttttatattcactcaggtttgcaaaagatcccccccttttaagtaaaattataatgcaaagccacaaaggtattataaatcaacacttttttttttttttttttttttttgagacagggtctcactctctcgcccagacaggagtgcag

SEQ ID NO: 81365 - DNA, 1109 bp, Homo sapiens
gtctgggtcaaaggccaaggtccggaaagcggtaagaaacccagtgggtactgggtcagcagtcttctcttagcacttctgtgttagtcataaagactgttgttgatttggccaggctcagtggttcatgcctctaatcccagcactttgggaggccgaggcaggtgaatcatttgaggtcaggagttcgagaccagcctggacaacatggcgaaaccctgtatatactagccaggtggtagtggcgtgcgcctgtaatcccagctacttgggaggctgagacaggagaatcgcttgagcctgggaggtggagggttgcagtgagccagaatcgcgccactgcactcctgtctgggcgagagagtgagaccctgtctcaaaaaaaaaaaaaaaaaaaaaaaagtgttgatttataatacctttgtggctttgcattataattttacttaaaagggggggatcttttgcaaacctgagtgaatataaaactatggcagccacccttaacaagtttctttctttcagctgcaattagaagtggatcggttggaagaactgaaaatgcaaaacatgaagaaagtgattgaggcaattcgagtggagctggttcagtactgggaccagtgcttttatagccaggagcagagacaagcttttgcccctttctgtgctggttagtacaagagtgaggtctttggtttgtttgtttggagacaggtcttactctgttgcccagcctagtctcaagttcctaggctcaaacaatcctcccaacttggcctcccaaagtgttgggccaccacacccagccaaaagtggggtcttcatgtggcctgctcactagtttttaagacatccagacattcaacaggaagtatatccttttctgaacagataaagccaccttttcaagacatttagcataattgccattcctgtatgaaaaagcatttgcaaattttattgggaaatattggtctcttgctttctgaagcaatatgtcactgtagcctctagctgtgaagcttaagtttttatcaggtgcttactttttgccaggtgcagtgtcaaacccttaatattatttcacatcctcatgtcaagaggtg

SEQ ID NO: 81366 - DNA, 1891 bp, Homo sapiens
actaccagatgggtttttgttgctaaggtgagacgatgttcataggattagcaggatgagtatttagatatgagctaggcatgccaccctatagctaacccaaagcaagctttccagccaatttacactgttatttctttatttatttagagacagagtctcgctgtgttgtccaggcaggagtgcaatggtgtggtctcggctcactgcaacctccgcctcccgggttcaagcgattttcctgccgtagcctcccgagtagctgggattacaggtgtccgccaccatgcctggctaatttttctatttttagtaaagacggggtttcaccatgttggccaggttggtctcaaactgctgacctcgtgatctgcccaccttggcctcccgaagtgctgggattataggcgtgagccaccgtgcctggctgccaatttacacattctataaaagtgcctggtgcctggagtagtctaatcatagagacaaaaggtagaatggtggttgccaggcttggagaagggaaaaaatggggacttatttgtttgagtatgaagtttcacttttgcaagaggaaatgagttttggaggtgatggttatgattgcacaacaatatgactgtacttaataccaatgaactgtacacgtaatggttaagatggtaaattttatgttatatgtgttctaccacaagttttaaaattggggggaaaagtaccctggtacttactcacttttcctcactgggaccttccttaggagaccctctttgtgccatattctgttgaccatgagttgacttacttgttagtttaactgaaagtctgtcatccacgccttcttatgttgtccttctcttcctctgaaggaattcacttggaatcttataacagtggtacgttgtcttattcaggaagaaggagagacgaccatcttgcaactagaaaaagatttgcgcacccaagtggaattgatgcgaaaacagaaaaaggagagaaaacaggaactgaagctacttcaagagcaagatcaagaactgtgcgaaattctttgtatgccccactatgatattgacagtgcctcagtgcccagcttagaagagctgaaccagttcaggcaacatgtgacaactttgagggaaacaaaggtacactgcctacatttgttcttcctaaaagtcactttggttttcctctaggtatcttgtaattgctttgttttaaaggcttctaggcgtgaggagtttgtcagtataaagagacagatcatactgtgtatggaagcattagaccacaccccagacacaagctttgaaagagatgtggtgtgtgaagacgaagatgccttttgtttgtctttggagaatattgcaacactacaaaagttgctacggcaggtactgtcttctcaaattatgccctaggatctccgtagtatatagcagtttgaacaaaactgacagctgtttcttcagtcttaaataaggagacaatgtaaggtaagagaatgagggaagctaaggatagtaatatatgatatacaaccttgatttttgtttaacagttaaaaaacctttatatggctccaagaaaatgaaattatagatgaaataatattagtcatttgaattagactagtgtttaattaaaatttttttcagttctaaatttgaatgctaattcttggggtctgagatcccgacagccttacagctcgtgtttaggaggcatgaaaacatgctactttgaactctcatgaaagtgcctcctcctctactccagacatttctttgcgggaggctagagggctagcctctgtgctgctgctttgccgtgagtgacactggctttctatgctgtagctggaaatgcagaaatcacaaaatgaagc

SEQ ID NO: 81367 - DNA, 1268 bp, Homo sapiens
tggtttggttttgaagtcccttcttgaaatttgaggaggctgggtgcggtggctcatgcctgtaatcccagcactttgggaggccgaggcgcatggattgcttgaggtcaggagttcaagaccagcctgatcaacatggtgaacctccgtctctactaaaaataaaaaaattagccgggcatggtggtgagcacctgtaatcccagctactcaagaggctgagacaggagaatctattgaacccggaaggtagaggttgcagtgagccgaaagcacgccattgcactccagcctgggcaacagagcgagactccatctcaaagaaaaaaagaaaaagaaaaaagaaatttgaggagtttggtattggtgttgggagtttttttcctccattgccccaaacttatggactgttttccctcttgtaggaactcctggatatgatgattgctgaagaggaaagcctgaaggaaagactcatcaaaagcatatccgtctgtcagaaagagctgaacactctgtgcagcgagttacatgttgagccatttcaggtccgtggcagcccacagggtctctggtgatctgtctggggcctgagacttagaaagcaacgttgacttgggcctgcagatggaaggcttcctcgtagggatggagctagacgtaagaagtggggaaaacatgctgtgtagttaattaggcccagcagagtaattctcacctctgtagagagttgccctggtaagaggtgaagcaactaatagatgatcaaaaagaagctgctgcttaccatagttttgctttgtagggaatatgaatttttttttataaacgctgagaaaaaggtaggcatagatggtgctgcagtgttctttctctgaaagaaaatgaaaacaggaacaaaagtaactaatgattaaaaggaatactatgaaaacaccaacctttgtgggttttatcatacccagaagctgcataccactgaaccagccaaaatggcttcttcagaagaaatgtctcaaaagctggaatactgggagtgcatagtccatttcagagcatgccatgacatccatctgggtatggagctgagaagtggctatattgtggtccactgcaagtcagggacttgagtgaggacacagcaaggatgaaatgaataacagatggggtcctgaaaatctctgcttagaaccagtaaaaatagtgccaggatcataaaaattaggacagatgtggagcttggaaagacaatgagtacacccataagg

SEQ ID NO: 81368 - DNA, 1040 bp, Homo sapiens
aggctcagacgcccgggtgggagccgagcgccggtgcccggacgcggcagggtagtcgaggcccggggcccggggcggcctccacccaggcggtcagcgctggcgctcggaccccaccctccccgcccgcagcgtctcaggtgccgctgcttggcgcagatgactcgttgtaaaccttctgtggtcgtggcttttctttaaagctgttaagtttatttatcgttgtttttctttgttttattctttttttttatttttgtggaaacgcggtctatgttggccaggctggtctcgaactcctggcttcaagtaatcctgccacctcggcctcccaaagtgttgggattacaggcgtgagccaccgtgcccggcccgttgtttttctttatatctggccagcggtgttaacgttttgtttgaattggaaagatagctttgtttctttgcaagttaagaaacggattatggaattcttttccggtcgttttaataacttcctaggcggtgttggggagggactgtccgacttgaaatcgggaccagacggtgacactgccacttaccaaccttgtgacttccaaatattaactttattttctaaaagttgtggatgcagttttctgatgatacagcgttaaataatgtgtagtttttggtggaactgattgttctaaggctttgtaagattcttcatttcatgatcactaattctgatcagtctttttaaaatgcttgccctcagaataatgagaattgagtgccaacatggtaaaaccttgtcttaactaaaaatacaaaaattatctggccctggtggcgcgcctgtacccccagcttttcaggaggctgaggcaggagaatcgcttcagcctaggaggcagaggttgcatgagccgacatctcgacactgcactccagcctaggcgacagagtgagactacgtctcaaaaaaaaaaaaaaaagtccattaacagtttatgaattatgtaggcatctcctctatcaagggattgaatgaagcaggagaaaacttacccttt

SEQ ID NO: 81369 - DNA, 1045 bp, Homo sapiens
caccatgcccagccaatttttgtatttttagtagagacggggtttcaccatgttggctgggctggtctcaaactcctgacctcaggtgatccacccgcctctgcctcccaaagtgctgggattacaggtgtgagccaccatgcccagccaatgtttgtatttttagtagagacggggtttcaccatgttggctgggctggtctcaaactcctgacctcaggtgatccacgcgcctctgcctcccaaagtgctgggattacagcactattattatttttaatagagatgaggtctcactgtgttgctgaggctagtttcgaactcctgagctcaagcaatcttctcaccttggcttcccggagtgttaagattacaggtgtgagccaccatgcccagcctttatttttaactgacagataataattgtatatttttatggggtattcttatattgtttttcagcactgattgttaatatactccatatctgcatctttttttgcccactggattgtaaattatttgagaacaggaacttttgggtccaccatagggccagtaatgtacccagctcatcacattatacccattgtgttgagaggtatcttctgtggttggtatatggtggaccaagagaatagcatagctttggctaggatgagacctgtagggcaaatggcaaaagagttggtattgtttcagtttcttctaagttgctatccaacttgataattcttcttcactgtttttttttctttctctctcatagattgtgcttcttggtcagaccccgcatcaagaatatgcgatacattgccagtgagtgtgccatggtactatgtgtaactgtgggaaagggcgggcaaaatctaagggccttggccataaggaccctctaataagaaaataattgtttgagttggccgtagcacttgtggaggatgtctgcttccccgcttctttttttttttttttttttttttgagacggagtttcactcttgttgcccagtctggagtgcaatggcacgatctcggctcactgc

SEQ ID NO: 81370 - DNA, 1032 bp, Homo sapiens
ctcaggtgatcctcctgcctcagcttcccaagtagctgggaccacaggcatgtgccaccacacctggttaatttttaaatttaaatttattatttatttttctgagtctgtttactacagaatatatatatatatatatatatatatatatatatatatatatatatatatatatatttaattttgtagagatggagtcttgttatgttacccaggctgatctcaaactcctgggttcaagtgatcctcctaccttggcctcccaacgtgctgggattacaggcatgagccaccacacctggcccatactgtttttatattgttttattttaggtttttctattgacagtttgaggaaaattcagtgggatggtcgtcaggggagcataattagcataattaggaagccctcaataattagcataattaggaagccctcaagaagtcccctatcttcgtgtcacactttgtgcttttcaggcactcttatgtccattgtcttattggattctctctgtagcaacacgaagtagacaagctatacaaggtggagaacaagccagccctcagctccaatgaacagtgagtgtctgggagagtctgtccctactccaagctggaagaggtccctaggggcacgtctgcctttcatctgtccttggctgagatatatggttcacctccctgaactttacaatttcatggctaggttaatcttctgttgttttgttttgttttctgtagtttcctttctgtggtttcttgtcctcttccctctctaatttataatacagtctataaccagattgactaatctttcaaaattattttcatcgtgcttttctcaagaacctgcaaggcagctgggtgcggcggctcatgcctgtaatcccagcactttgggaggccgaggcgggcggatcttctgaggtcaggagatagagaccagcctagctatcatggtgaaaccccatctctactaaaaatacgaaaattagccaggtgtggtggcgtgtgcctgtaatcccagct

SEQ ID NO: 81371 - DNA, 1017 bp, Homo sapiens
atacatgactgatcttgagccttggtcccccagtggctcattagctggatcgcagctgagaagaaaggaggctgtagcagaattattatatcactgatcttaaggtatcagaaattctcaaaggaaagaagctgtagaggtacacataagggaatacttcatactttctaggtaaatatttgaatgaaaagttacagaaatattaaatgatatgcataggcattataaaatcactgaaaataaaataagttgaatgaagagcaatgcatggcagtgtccttttggtgaggatgagtcaaaatgggaaagtaaaggaacggtggtatgcagccttgaagcgaggcccccagtgcaccctgccttctgggcctcatatccttgtgtagttccctccccatgagtgcgggccagacctccctgcttctaatgagtagcatatggcaaaagggagaggatgtcacttctgagcctagattataaaagatcatgacttccatctttctctctctctctctctctctgtgtgtgttttgcattcttagtttgcttactttaatgaagcccactgccatgctgcagaggcccacgtggcaaggaacacaggacagcctccatccatcagccactggggaactgaggcccccattccaacagcccacaaggagcttgaatcctgttaacaaccacgtgagtgagtttggaagcagatccttccccagtcaggtcttaagatgactcgccctcgtcgacaccttggttgtagcctgtgggatcctaagccagaagatccagcaatgttgcacccagattcctgatttaccagaagtgtgagataactaatgcatactgttataagctgctgtgtttgggctaattggttgtacagccatagataactaatacaggaactaacatcaactgagcagtgctctgatgcagccttttacagtttatcttatttagttccctattttacttctgggaaaactgtttgtttaagaatacaggatgtttaag

SEQ ID NO: 81372 - DNA, 1046 bp, Homo sapiens
gagggcaggctgttcccaggaagggagaatactgagtacccaggaagggcttggcgcgcgctcttctccgcccggggatttctggggacagatgttgtgctctgggtcttggggaggtgccagaggtcagagctgcttgaggcttctgccgcctgccggtttctgccccagctgtccccggccacagggggtgttgaaaaggccccagaccgaaaggacagaaaggggaagttagaggaatacgtcgggagccccacggaccgttagtgccccagcctcggtgtccaggcgctgcaagatcgccgcggccccagcagagggccttctccggcccttcatccgcccagggccccgctgctggagcgctcagcaagcggccagccgcaggcctgctgggtccccacccgtcccctggctctgtggccctggccaccatcctcggccttgacctgaatgcctggcccatggcagccgctcctaattactccccactctcaccgttaccaaggagtgtgggccacagggcactaccaataggatctgctagttctcaactgcagcgtttggaagctgagagaaaagctcagagggctggacaggtaccaggaaacagcaccttccacctgggccattgggggactcaaggaatcatttaaaacggtttccttaataattgtgtcaaagaaaatgacccactctcccaagcgcctgtgtccaaatgcaggctcaacttcaaaactgaatagcaatgaacccgaccatatttttcctttctcccgaagaacttgaatgagaatggagggtgtaatggtggggatgttgttttgccatggcatttaaatataaactgcttcatccttctgtggctccagacgtgatctcacccaggcttggtgtcgctttgagatgccctcaccttgtctaggccacctcctatctgaattggctccccccacacttgaagtctcttcccgtcttccccacttcctgaatcagtggtcacaccattcccggccagtcctataatgagaatccttactgccccc

SEQ ID NO: 81373 - DNA, 1049 bp, Homo sapiens
gttaaaatctttgccctctgaaaattctgggaacaggctgtgcccataaacccatcccataggcagtgatgggactaccacatttgttctgccaggttgtcctttgggacaacttttgggtgtctggataatgaacctgttcagataggccttgagactttcttggtagctctaaagtctcttctggctctccgtccattgatacctaaatttctagttgtgcagagcgtgaagaaatgagcaggggctgatgaggcttttaacaaatagttccggagaaaataatagaaggcaaactaaatccctgctcacaaaactacaggaatttgagggagttagaagtgattatttttaccgccatttctgcacttgcaaggttgatgtagggagaagtgtcacaatgatgtttttcatttaaagactactgtaaaatattaatgggaatggctattgtctttcaccccctttgcaagaggcttatgtaaaataggcaggctgtttctaattgttgaatttgtctcccaacttcagctgattagaaggagaaattaccaccttgaatataagcaggttgaaattgggagagctgccctcagctgattatataagctataaaatacagcacctaaagtcttatgtttactctgctaagaattcccttaatgaagatgaaaatttctaagcagcatggacccatatgtgtttattatgtaagattcaattatggtgatccaacctgtaaaataaacagtggggctgattaatctctttgttggcttttgggtcagagaattgtttaaagtagatccacagagccacctagagctgtccccctggaactcagctggctgtgctgtcagcaccagctccccttctctccaggggtacaggaggcttgtcctgggtctgtggtcactgtagctttcagggtggtggagggcagggcccccttaaggttggctttcgaggttgctcgtgcagtgtagtgggatggccgtgagtacaaccactgccggttgtgacagacaccatcctttggccgtttcatt

SEQ ID NO: 81374 - DNA, 1032 bp, Homo sapiens
tcctgtatcaagagacagaggacatctgaagccagaatgcccttcccaaagctgccctagctcctgtgtttcaggaagaagccgggcagatgcctctttgttccagcagccaaactccagcatgtcacaaatcatacattacaggaaaagggagccctttgctgctgggcagcggggcccaagatcctcacagtcttttagggatgcttagaattggcccttggttggtttgtagcatttatacaatatcaacccttaaactgatggcccttgaacaagtgcatcattctctgtccttgatttcattcacagtagacagttttaggtagatccctgctgtgagcagacacatacatgcggtctgacaattcagatcccttcgccttcccctcccctatttttatggctgctaacaaatcggctggacctttctctaaaggcctctctgggcgggtgatatttgagtagatttgaaagaagtgtgagatcaaattatataactatttggagcaagaatgtttcaggcagagggactaggaagtgcaaaggccctggggttgaaatatgcttgatgtggtcggggagtggaaagaccagtgtgtctctagcagagagggtgagagggaggcaggggaagatgaaagcagagaggtgggtggaagaccagacccggcaggcccctgtgagccacagggaggcagagttggtcccttttaaatattggggctggcaaatctgactagtccatttccctagtactcctgcttacctctgcatttttgcctttgattgttccctttcttgagtgtgtcctgcgcttccccttggtctcccttagttgtgcaatggaaagtagtagcagagcacaaaaatccacattggaagcttagaggattgtatctttttctcaccagctaactcttactaattagaaattgacaacagcgcttgtctctcatgcttctcttttaattgagatttccttcaagtcctccttttaggcaagagctgcctcctatgagcccctggccc

SEQ ID NO: 81375 - DNA, 1011 bp, Homo sapiens
gtctgcataactgtagggtggatctggtcttgctctcttataagaaaagagacaggccttgttctctacatgttcctttaggcagtttgcccaggcaaatcaaccaggccattaaggtgaaagtatgatagctgaattttgctctttttccataggttgtttgaatgatttcattttgcatcattcataactgttgtcattctgtgatgtctagttcataaataccattcgccctgagcgattttctgttacatttaagactaacctactttaagggaaagatagtctttcctagtctagtccgcgtatcctagactgagttatgcagtctgggaagcttgcagcattaatttcttgctagaaacaaaatttgtttacatgtccaatattctgcatatagttgtgtattttactcatttatgactataaatatagaggcatatcagcatgtatattgtgtaaatatgtacacatttaacatgtggaatatagtaggactgagtttgtgttttgccttgtgggcactctcagtagttatttcccctcaatattttattattgaaaaaattaagcataaaacttgaattatatagttaatacacgtatacccactgtcatgattctgcaattaacattttgctatatttgctgtataattgttcatctctccatcaccatactcatccattttcatcttcttgctgtggtggtggttgtatttttaagtaagttgcctggtccctaatcatgactatgtgctcagcttgcaggaaacatatattatatcctgggtcttcctgagcctttcctgaacctctctcttacagagaccttgatacctactcatgactgccagagccctcccagtggcctcacccagagctctatcccctatgcctggcattgacaattctgattcttactgtgcatttcaaagcaaggatgttcgagatgttgtatctatcattttacttcctcccatgaagagacttaactggaattctgagaaaa

SEQ ID NO: 81376 - DNA, 1037 bp, Homo sapiens
taaagacagggtttcgtcatgttgtccaggctgctctcgaactcctgacctcaagtgctccgcctgcctcggcctcccagagtgctggaattacaggcatgagccactgcgcccggccaagatttctccagttttatatgtgctcatttgtgtgtctgtgtatagttctgtgcaattgtatcaaatgtggatgatgcagttttaagaatgcagattgggatcaagatgaaaccagataattttgagttgtgtgtgttaggcagacacacgcgcgtgcacgcacacacacacacggcacagagacaggctggcagattctcctgaggatggatgttctggagagaatgggagctggccagcggaaaggggttctttgagaagggaggctttgctgtttgcctgaatacacagaacaagtgctctaactcaggaggcacacgtattagacacaaaaatgtgtcacgttttctttgtttatcacttatcctgaaccccagtgcagccctctgtgtttccgttaataatgcaaagagaataattctcagatttcatctgccaagtgtttgattagtacgaagggcccccgaatactggccagcaaccaaagagaaccaaatttcctttcagagccctgggagcaaagagttatttgcctctgatgagtttttattttaacttgacattgggtaaaatgtgttttaactctccaaagaacgtggattgggtatggatcaaatatactgtgactgaagttcatctgaaaaaataattaaaaagccatctctcgtgggagcaagcattgctcattatattcttgcaacttcattgatattgaagtttccttcgttaatttctttttctaaaataaatggcactataaaagtggtcagtttgttttggccatattccattccctctccccagctgctggtcgcatgccattttcagtgtgtttgtagcagcctgctaggaaacagcctgtggctcttacctggtgcttccatattgcctgggctgataggtgtttctcattcatt

SEQ ID NO: 81377 - DNA, 1696 bp, Homo sapiens
tagattctaaaattgcgtatggacactggaaccttttgaaacctggtggtgtctattattagatctaaatcatttcgccaaccctggcctcaggctgtacatttgtatcatggggcaaagagccttctcttcatcaaggtagatctaccatattgattgaagaacatgttaatacctgtgattctggtgacaagacaaggtaaaaaggctattaggcagtacatagaggaaaatgtctcccacattggtgcttttattttatttttaaatatcagccttgttactggttgtgtgtttaatactaggattcattactatcataaagagagtttaacagctgtctgcttatttagacaagtgcgttaagcacaggtgagtttgaatagtgaccataataccgctgaatacactagctcccatttatggggtcgcagctgttatgacatacagacaaccagtattttgcatatactctctcactccctcctcataaagcccaaggagatagaggctgttattctttctgtgtaggtaaaggagctaaagttcatggggcttaagcagcttgttcagggtcatatggttagtgagtggcacggcccaagctacagtccggtctggtctccgttatcccaagggccttatctttcccatcgtatgctacccctccaccatccccaggcatgattacatccacaccaggataatataggaccccaagaatgtcacactaagtatgaaaagtgactcaacccaactacctaaataggtatacagctctttctcagtatagtacccacctgcggtgctttgtcattttagctgtaaagtatgaaatggtgaggcgtttctaggccaggagacgtctgatgggtctggggtattcagggcctagttctgtgggaattttaaaaactctcatcagataaagcattgctcccacaaaaaaatcatgtgagttgttttcaaaatctccttgtagtaaagtgagagaagctcactcaccagacggttttgtttacacttcaggcctggcagcatttaattggtatacattcactgcacttatgcaacttggacttgagtgtttcactcccagacttgatgaagctgacttgcttttctgagcgagtcaggagtgattttaaaacatactagacgccagcggggacaaaaatggtaagaaggtagggcaagaaagacttcatggatcatggatgaatacatgagaaagaacaagaagtagagataatgtaatccccaagacctttcctcatggggaaataatcagcatgagcagttattgagctctgtggtgttctgaagaccctcaggagtggcgtgtccacatacatgaactgtgtttgcagaagaaggtggttacacgatggatggattgggagtggcaaaggcaggcctccttaaggcatcctcaaggatttgacgtccaagtaggtgaactctcttccaactctatgtcctgaagccacattttcccgaagtcattgagatagcgttttggtgaccttcagaaaaaatgacagtctcttactggtccatcttggggagtgaagagagggtctggagattaaattgggtgagggaccacgtgttccatgttggagcattggtgcaaagttgggagactcagctcctccagcttatgatgacaggttcatatttccagtcttttttt

SEQ ID NO: 81378 - DNA, 1130 bp, Homo sapiens
ttctgcctccctttctctcctaaaagcatctcccttgaccttctgtccttgtaattaattcaggtctccacagagcacactgaaaacctcaggtctagtctcatttccattttatagaaattgatggtaaaagacacatagcataaaacgtagcatcttacccatttgtaagtgtgcagcctagtagtgttaaggacactcccagtgttgtgcaatctccagaatgtttcgtgttgcaaaaccgaaactgcactcattaaacaactccccattccccctcccctcagcccttggcaaccaccagtgtgcttccttctgtctctgtgagtcttgctatcctagttacctcctggaagtggaaccctacagtatctgtccttttgtgactggtttacttcacttagtatcatgtcctcaaggttcatccaagttgtagcctgtgtcagaatttccttcctttttaaggcagaatcatatttcattgtaggtgtaaaccatattttgtttatccattcatctgctatggacactaggattgcttgcacctatggctgctgtgaattaatgctgctatgaaccataggtgtgcaaaatgtcttttgagttcctgcttttaattctcttgcttacacccagaaatggaaatgctggattatatggtaattccatgtttaatttttcgaggaaccgccatactgtttttcatacccagtgcataattttcatgtctcattgttgataaaatagaggtgactaggaggctccaggaagaagccagagccccagaggacacagaatggcctgggaatgtattccctccatctgtgctaggtcatgatttgggcatcgctggcttcctctccccagaggccagctcttgctggattccaatgacctggttccctctttgtgcctcttcagggctaccctctggtgactgcctcccatgttgcttgtcttgggtgccttagcatccctcggtgggtcccttggctctgccttcacttctgtcaatagacctccattagctgctcttcattggaaacttttgagcgtgccatttgctacctgcacatcttgtctgatataattactagcaggatgaccttgggcacattgcacaacctcac

SEQ ID NO: 81379 - DNA, 1081 bp, Homo sapiens
aagcagctgcagcgtggggctcagagtggctttggcttctgtgcttacttagcaagtgatccgtcacaagtcctgccagctccctttggaactctgtcaccccgctcagccatggacaagcagacagccacggatattatgacaatgcaagtcctggagggtttgcatctctgatatggaggagtcagagtaatccttcccactctcccccgagatgcttttcaaagaggagcctgctttgagttctgaacatctgagtctttcacgaaggaatgtggagaaatcgagggggcttttcttccctgcagaactgatgatggccatccagagggggaaaggcacgagcaggctccctctctctctctttctctccccctctttttttgggtgcaacagaaaccttgcacttcccttaagctttctgtagtacatgttaagattcctctgccacgcccaaatttcaacttttctccaatattctctttaacttagaatgaggactcaggccctaattgaattgtctttgaacagtttttgttctgagctatgaactgtatattccctttattcacccaacagatatttattaaatatttttggttgggcatggtggctcatgcctgtaatcccagcactttgggaggccgaggcaggcgatcacgaggtcaggagttcgagacaccctgaccaacatggtgaaaccctgtctctactaaaaatacaaaaattagctgggcatggtggcgtgtgcctgtaatctcagctacttgggaggctgaggcaggagaatcacttgaacctgggaggctgaggttgcagtgaacctagattataccattgcacttcaacctgggagacagagtgagactccatctcaaaaaaaaaaaaaaaattacgtggctggcactggattctgtactgggaatgtgatgaacaaaggagataaggaccctggcctcgtttacattctaatagggaagacagccaaaagtgaatgaataagtgaatacgtaaacagacacaatagcggcaagttgtaatgagtgctgtgaaggggaaacaccgaaggcagcaaggacag

SEQ ID NO: 81380 - DNA, 1047 bp, Homo sapiens
tgataaatgcctgttctcatcacatcctttgccgtttttaaattattagttttttaactgttgagttgtaagaggtctttgtattttctggatactaggccagatctgtcatttgcaaatgttttctgtcatcctgtgggttgccttaagtatacattcaaactagtacctttcactagaatattatgctcttggtcagccacaaagggtagtgctctgaaactctaccaaagaacagttgtatctttgcatcaccagcacctgggtgagcacctggcataaagtaggaaccggtgatttgagtaaataaatgaatgtttctgtttgccaccttttgagagtaaaaatgggtgtggtaagatagacagaaatggataatgaattgctgagccaaaccacagaggcaaagatgcaggattgcatgctaaagcaccttgtatctggctatgatgttcaagatcaatgaaagactggagtgcagatcagggattgcacctgtgtttctgatgcagtaaatatacttttccgaaatcaatagggtgactctgcagagccctgtaaacatggtgtaattactgtgctgagaattacagttgtcacatatcgattctgtcttctcagcaggtattcgtacatttcctcctgcccctagtgccactctgccccatctccaaaatctaattcccattgaccgcatcacactgctgtgtccaggagggaagaggggatgtaatgtagtgaggggacttcagctgtaccttcaccttggttgaggaagaggcagctgagtgagtcacagatttagggacaaggtggcacaaagttgctctgaaaattagatcaaagaatcccaagaagtagataggcatcaacctcagtggaagctgcctcgggaaataacctgctcaaagaaggatttctcattcttcagagtagactaggagggaggcttccttaatcctggaaacaaggcccaggtcatccctgcagaggaaacatctatatataaagtggctaacgtaagataaactgtcatcttagaaagca

SEQ ID NO: 81381 - DNA, 1026 bp, Homo sapiens
gcagtaatctttttttaagtgaaattttttcttaagtagatcatacatagagagaagcacataagtgcttcatctcagatcataagtgaacaacatgaattttcacaaaatttacacactcatatgaccaccacccagatcaagggatagaacattcccaaagcccccatcgtggctctccaagtcactcccaccctcttctttcccaaagtaacgcccaaagtaacctctcttttgatatctgttaccttttattacttttgcctgtgtttgagctttatgtgaatgaaatgatggcatctattctctggtgtctggctgcttttgcagtacattctctttgttggattgatccatgttgtcacatgtagttgtagtttattctgtttaagtgcagcactccattctgtgacagccccgtttcattattccttctactattgagggcatttgtgtagtgtccagtttgtggctatcatgaatagtgtctctgtgagcattactgtccctgggttttggtgaacatatgcccacatttatgtgggatgcgcacctaggagtggaattgctgagtcatgaggtatgttcattgttagtaatactgcccaaaagtgtcagtgtacgtttcctaatgagcacgggttgaggagcagttccacgctcaccaacacttggtattagtgtcgtctttttagctttagctgttctggtggatactgtcagcatggtccttacgtcagacaatggggtccctcaggccctgtgtcacagagggccctgcactagtgctcctcaggagtgtgccagttctggagggtggttgcttgcaaagggccacaggaccacttccagggcctgcttgtcctgcagaaggtggcctgaaggggtggccaagagatgcttctcatcagagacaggacggaaggaggaatgagtgcacggagctggttcctgtgggcttcctagtctacgtgtaggtgggggaggccttcgaggagcaggatggagccctgggttgggggaaga

SEQ ID NO: 81382 - DNA, 1021 bp, Homo sapiens
acctcctctttaggctcttgtcttctctatcttccctgttccatcttctttctgtaccttatatggactcctgctgcagcccttaacgtactgtattataatctgtaacatacatagtccccttcctatcgtgtgagcaactctggggcatcagccttaccttctgcagttttgtggcccccgtttccagcccacatgtgagcagatacttatggattgtatgtccgtagtaaatatggattgcgtgattgaatgatttagtaaaaaacattccagatctctcagtctataaaaatgaataggatgcaatcacaaccaataacaagaacatagagggctcaaataactgatatttggaaaagagttgcagagtcatggtacaaataagaccataatgagaagtcctgagctttccattacctcgttgctctgcatcacaggcaagtccacatttggctctacttagattaatcatttcgtggaagaaccaaagtattatttagctactaataaaaagcaatttgctgataccaactcagggacatgaatatcacaaaatagttatccataagcatctgtcatctccattatattttagtcacagtgatagattatcaaatgaattagaggacagaattagtctgaatcctcagttctaacataatcacttggggaaatatttgccaagagagtagaaagattatgagaatgaaaacttcttccatttgccttgaaaagattagctgtagaatcctaatcatctagaatatttcaaaatccactgtcagatgacccatgagctcagtccatgtagtgtattttcaaatgcattgcttaccacttctatccttcgcataccatagatttttaaaatgatggcgggagggcggaagagatggtgctttaagatgagggaaatgggcagtttttttctttggaggcagtcactgaatagtgggactatttacaatgtagggcacggaaaggcagcatttattttgaagaaatgtcagagctagag

SEQ ID NO: 81383 - DNA, 1012 bp, Homo sapiens
agcttctcaggactgtcagtcatacctgtttaactcctgtctaatgttctcagtgacagctttagcatcttggaagatacataccattagtgctctccaggagccaagggtcccaactctggtgagttaaggcaatggcacaattataatcctgggttgaactgtcaacattattggaaaggtcatcctagggctattgcagtggcatttccccatatctgaactctctggcatggatctgttgtgaaaaaagctgccaagtatgatgattttgagaaacaagagtctaaggaaccttgaagggaatccagggccccttataaagatggtcatttcttaagtcattaggtacaacctttctggcgtgtgtctagactcactggcttcagtaagcagcctccacttggtttcagccagtcttatctcctaagtacagcactgattgggagaagaggaagcagaaattctgcctttgtgcaagaaggagcttgcccacaattgtctctggatgcatactagtctttgtacgaattgcattagtacaaacatttcaaccaacacataaaatttcagttgtctttgttttgagccttccgaattcagaggaagtatttcatgctgatatatttagatgaaagagaaagttacagagcacttttggtttgaagttaccactccagacaccttaaatgaagatgaaatttgagaactaatttatagagataatgacttagagtagaaattgagagcaaatacttccttccttggaaatggctcagaaagtagatagtaaaacaaaggagagccaaatggaacttggttgggatgacatgggcatttcctcttttcatccacacatccattcttcagataaatatttattgattttatcatgatattccagacacttagaatgcaggcatagtgaagatccatttttgtttttaatttaatagacttggtccatggtagccagcctgcaagactagctcccagtaatcctcatttcctg

SEQ ID NO: 81384 - DNA, 1121 bp, Homo sapiens
cccccttcccatcagaggatgtctcatcagtggacatcttgttagtgaatacctcgttattccttcatcagaccttctgtcattttctcagctgcgttgatgagaaatcccagacttcatgggaaaggtcaggagttggcaaatgagagctagacaagattcagtagtgacatgcagtggttgtcctgtgggatgaagggctttcgtgagtgatacagtaggtatacacaacagttagttccccatggaattcatggatacggggccaggattacatgcaccaccagccagaagatgacaccaggtcagcctggccaggctgtgggtcggatcacagcccttggcagtaggtttgaatgaggtggcactggagtaggcattgcctggcagtgctccccatcagcactgcgcagctggggacctgctgcagaagggccatgctcacactgctcagcagctgtagctgtcagcctctatcatggattctgataatcgtccagattaactgaaatgtgcaaaataggttggtgccttatggtatgtggtacgtggaccgtctcaggcactggttataggggcagattcctggatcccacccagaccttctgggagaggctctctggggtagggcttcgtaagtatcagctttaacatgctccagtctgtgctaaatcacaggaaaggtggagagccatgctggactagctgggagtctggtttttggagctgacagacctggacaggttctaggctgtgccacctgctagctgtgtgattgtggcatgcagccctgctcagcctctgcatcctcctatacggtgaagaccatgacgatggtgtccgtctcatggaactgttaggattaagtgagataatgtatgcagggcatcatagcacagcatatggcctaacacaggcagctaagagtatagctggttaggcagtgatgacaatgatgatgactatccgtggagaggggagtggttttagtaattctgctccacgcagcattagaagagtagatgcttgagtagtgttgaagagatgatgaattattggccattttattgacaaacagaacaccaaaaaccaaagatactcactccctggattagatgtca

SEQ ID NO: 81385 - DNA, 1051 bp, Homo sapiens
ggcttacctgggtcaccctatgtaaaatgcaagaatcccccacttccttgacagttattctctctctcattccttgctttttaacccccttggcgccatcagtgcctgccctgtgatgtatttatattgttatttactgactcaccttctcaaaggaatgttagctgtgctagggcaagggctcagctttgccaagggcagcatcgctggctcctagcgtggtgcttggcctgcagtcacagcccaggacctgaccattgaatgggtgagtaacggcagtggctagcagccctctagtgatgtgaacagagcgagttatacgcaagaggttgtgaacatcagggaacctctcaatttgctgtgttatttggaatggctcagcctggcagctgtccccagggtcacagactgctgcttctgagtaaacttgtcacagctgaaggtgagagccagcgaatcaccagcacatgagcggggactgaagcctcagaggagaaggagggtggtgcaaagacagcccagagaggaagagacagaaggcggagccctgcagagcctcgggcagcaatgcaagcaacccactgtcactgaggttgcctttatgtaataatcagtgccgtttattgcatgagtgcatcttctgctgtccttgttgcctcttacaaagaccattgtattttcatcttctcagttacaagcctttgagattggagcagcttgcacgtgagcaaacagctcgccattaggaatcagtctggataagagcaggaaagggctcagctttcttgggcttttcttgccgtgaaatgagcaaattgaaagtgaaggttttcaaggtcccttcccagcccacagttctgggaatttagtcaccttgaagccaagggagcatgtgtgtcactcatttcatgactcagaatagcaggcacttcagaaatacataaagccagacccagaggtggtgttggccttgtggaaagtgtccccttcccatcgctgaccacattgctctagaaattgttttccttggagttgatgtagactgtgatga

SEQ ID NO: 81386 - DNA, 1121 bp, Homo sapiens
gaggagcagaatgaatgggggcgccatggcagatcacgtggagtcctggtgaccattgggctgatcttggcttttatgcagaaggacctgggaagccattgcagggtgctgagcagagaagcgacatggtctgacaactcctgggtgctctgtggagagtggactgtggaggagtgaggaggaaagtgggggctgtatgcagggatccaggagagggatcctggagacttggggccggggatagcacagatgcctcctaaaggaagcactgacagaatgttcagatggattcgatgtagagaaggggaagaggccagaagtccagcatgacctgagtaactggctaggtgaggctgccaatggatggggatggctcagagagagcaggctggggtggggtgtttggatgcgctatgctggagatactgctggaacatccaagtggagacgatgagtgtgcctggaagtcgggggaatgtgagtttatgagtcatcggggtagagatggtacttaacactgcgaggctgggcgagatggtttggggcatggatgtaagaaaaagggagcctgcagcaactcccttgctgagcaatcagaagaggaagacctggcccagagaccaggggaagcatccagggtgggcaggaccaggtggaagccctgcagccacaggaagaaagtatttccaggaggaagcaggaccaactgggttcccaaagtagaggatggatcaggtcaggtgacagcgaccattggattcacccactttcacgcctgggaaggcctcgttcccatgtcccctccagtggtggcatgtggctatgggaactgtcattgagacgttggctggccctttggccagtgaaaataacgcttccatgtatcaattctgtccctgcgttagtactgatagctctaactgtcattcgctgatttcctgtttaatctgtcaagtgatctacgtctaccccctcatttcattctcaccatggcactgtaaggttaccacattttgcatctgagggaactgaggtttggaaagattcaatggcttgtccaaggtcatagttaaagaggcagggcaggatggagaatccaggacaatgaagctcccaggtac

SEQ ID NO: 81387 - DNA, 1064 bp, Homo sapiens
atctctatcttctgtccactgtgctagtcctggccactatcactaccaccaaccatatcatgtgtccactctgtaagccattactcactcagcaaccagaatcatcttttaggtcacgtccctgcttaaaatgttttggtggcttcctgttccacataggatagaaccctgactgcttatcacaactgggagagcctgccttcctcttcagcctgtgtcttgctatgctgttacggctcgggatgatgtagcctcctggcccctcttgctattcctcacatccatcaaactcactcccacttaagactttcacgcatgcttttccctccacaggtgacactcagccttcagacatagtcttcttgtctctcaggccccagcccaaatccaccttcttagagcagacttctctgacccatccaaagttgccttctgccccacgtcactctgtcacatacacctgttgtgttttctccatagtattattacctacaattttcttgtgtttttctcttactatgatagaggtgcaaataatcaggggaattaagtaaggcatatagtatgctcagggtccacagtgaggtgaaggcttcagggcagtggtaacatttgagctggaacttgaaacaggtgtgatttgccaggtcaagaggtggatggagagatttcatcagaggcaacagcatgtgtgagggcccagaggctagggaatgtgtcacccttagggaacagctttgggacagcatccctgtagcctggactgcataggaaggcagagcaagagtggctgggggcatttagacttcatcttgtgggcagttggaatcatcagtgcacagggagggattcactagacctcatggatttgctcaatggaaccaaatagggtttgaaagtgtaattgaggggttttttgatttggaatatttttattccaattttattaggagccaagcctggagagggagggagagtgtgctaagaccaggagcttcagtttggagtacgaatcaaggaggggctttggagcatgagagcttgtcttctgatcccatcgtgaa

SEQ ID NO: 81388 - DNA, 1038 bp, Homo sapiens
tcgtaataaagtgagaacaatgtctttaggagaaagaggcaccgaaggacttcagggagaaaaaccccaaagataaaaagggaagggatggtttcagaggaggggacattggaggaggctactgaccggtgagtaggacctgtccagctggagggaggtgtatgaaaagacaggttgtatgggggaagctgaacaccacaaactgaaaggaggtagagctgaagacacgtggcacctagaactgatcttctagttgacagagtagcatgagaaagggtcatttgctatgttacagaaacccttctgactgcagtgttgaagaaaacgaaggacataaggggccatcctgggaggccaggtaggacctactgctcgggtccaagcaagagatgggggcggggcctccacagggcaggtgccaaggactcctggaaggtgggatcagcaccaatggatgacccgtcacttagcatcaggttttcagggagagagcgtggaaagctgtgggctgacagccaattgtaaaatccacgctaagcaggaaaaagcaacccacctcctcccaaaaatgtgtcaggaacatggaaagaggtgggaggcatttagttaggaggaaaatggcaaagcaaactgggtaggaaagaagctgaattggtgtcagagtgtttcaggtctggaagaagtctttcctgataaatggtttttaagcctctcttgacatacttctggtgatggggagctcactacccatgcagacatcctatttcattgacactgcaagtaccttgaaccaccatcttttcctttggttccatatatacagcttcctttgaatttttactttcagttgcacaatgagacttcctacaaacccacttgatttagcaagaagacctgaatcagtcctctcatcctgctgatggaacatcttccactacagcaaggcaacagctaagaaaaagtcacagggaaggcgaacaacctgggcaaaaacttgggttttaagccactttagctgcctgaatcccctgccccatc

SEQ ID NO: 81389 - DNA, 1027 bp, Homo sapiens
aaaaaagagagagaactgctcttgcaggctttggggaagacagcatttcttcaaaagacacagttactaaagaaatacaccaccatcatcaagctcccttgtaactaaggacttaacagagtgaaggtgctcaaaaccagagaggacactaaagtacacctggcccccccccttgtcctcccttctggacacacctgattatcctctaaaacttatgatgatgtggagaaatttttttttttttttttgagaccagtctcagtctgtcacgcaggatggagtgcaatagtgtgatcttggctcactgcaatctctgcctcccaggttcaagcgattctcctgcctcagcctcccgggtacatgtacagaattcttgccagtgggggttattattcactgaatcacagcttgaaaggttttctacaactctttctctagaggtggtgaacttaggacggattttcatttacccaaaagagttcctgaacacggaacaaaagccaaacagcagcaagggaaccagatttttggagcgcccaccctgtgagggctttctcaaatggcatcccattgattctttacaaaagctctgcctgaaggtatgatcgtgcccattgtataaacagtgaaactgagattcactcaagttgtgtgaatcacacagttcccaagtggcggaattagaatccaagatcagctgtctctggttcacaaatttgcatttcctcccagtcaccaaaactccagatgtgaactccctgtctgagttcacatcaaagcctaccacgatgacaactccgtgtctcttcctgctgacaagcatagtatctgctattactgcctcaggtgtccagcgaaatactgagtttgtttacaaaataagtctcccagccttctctatgtattagcaaccccagagaaggaagggctgcccgctttgcaaagatcaaaccccctgtgtgtttcaccctctgcacacttcaaaaccaggcttcttcaagccagttacgccaggagcttagcaaaa

SEQ ID NO: 81390 - DNA, 1031 bp, Homo sapiens
accgaagctggtccctaattggatatacttcctctccagaggagaccaggggcacttgtcatattgagttcaagtccctggtcaaactcatgcactggccaccctagcttgctgttctgtcttctgttctcagattccaggcttttaggaacagaatatccagacatttccatttttgtaatagtgactcaggtcaacaatcaggagttggtgattatcataaattttgaatttttgtcccgtaagatacaattgattacgttcttttgctatgagcaaatgaacaacatagtaagttttctggaagtttaactttctgtaggtggacacttaccatcccattcatgtttttcttaacgttaaccttatagaagattctcacactaaccttatagaagattgctctcatggagacatgtttggcaagaccatttgattttataatctaaggccataaaatgaattggaagcatagaatttacaaaatgttctacagaaggatcccaactgaacacagatggtgctcccatccagcactgtaagggagggaaggggccaggaagctcatgtttttattaagcacctgctacccacgtgccgggttctgtgaattcatgatcccaggtactgctcccagcagccttctcacaccagccctacgaggtaagtatatattcttttccacttcacaggtctgaaaactaaagctcagcaaatccaaccgttctaagatcacatagctagtttataaagccaccaggagccagtgacagatctgactcctaaaccagtgctctttccactacaacacaaagcccccgaagttagaacacggaactagcttcttatgaagcctctgcaaagccaacagagcgtctacctgtgggaaacccctagcaggagtctattgtttcatagagaagtgagccaggagttggaggtgagaatctctgcaaagttttgcctatgggcacaggaatctaggtttcactttaataattaaatgttggaaacctttcaaaacactcctc

SEQ ID NO: 81391 - DNA, 1049 bp, Homo sapiens
atggtctcaaactcttccaaactctaagcgggcattataactatttagcatttattagtgttaacatttgtttggaaagactatctttatgacctagtagtgttgcatgcttttgtgttacaaatattccttagggtacattgaaatcccagatataactgaggcatagagtaaatgtttactaacagggagataattttggcaattctatatagggatctataactgtgtatctgcctctatgtcaacatgttataatatggtaatagctatgatttattcacttccaaatccttgggcagtaacagaaccctccgttatatccttgatccaatggagaaaatgcagtccatcttggaggtttctggaaattcactgagatgacaagagggcactgcattgctcttaaggtctgaaagcagttcagtaaatttccctaaagtggccctgggaaaagccatggcctcaagctatctgacatcactgggaggtagattgggctcatcacagcaatccctgtgagcatctaagttactcacacactgagtcagagaaatgcgtgtgactttcccaatatagcagagcatgggccggagagagatcaggaaggccagcttgagcttctagttttcttcccaagggaaaagactgggagtcttagaggaggaaaggctctagaggtggttatcatacccctctaaatccccataagatctttagccaaactctctcaattttactggagggacccacgggctcaagtccatcagcttttggctgtatggggagagttcaggaatgcagaatcggtaacagttagatgccctggaggactttcttaaccgatgtccttctctttccctttttttggtctgtgtgaataatccacatttaggccagcaaggatacgtttgagaatactgcatttatgttgcagtttttaaggtataagggacttcatccggcatgaggaccacttacattttctaatgttgtctttctacctttccaactggattgctagcttcctggctctcgtgtattttata

SEQ ID NO: 81392 - DNA, 1033 bp, Homo sapiens
ttctcctgcctcagcctcccgagtagctggtattacaggcacccgccaccatgcctggctaatttttgtacttttagtagagatggagtttcaccatgttggccagtctggtctcgaactcctgacctcaggtgatctacctgcctcggcctcccaaagtgttgggattacaggcgtgagccaccgttcccggccagctctgagtttcaactttgcccaaggatgctgtgtgtgcccatcactgtgccagactcaggaaaatatttatccaacagatgtttattgaatgccttgtgtgcccagttccatggacaccatgatgggcaagacagctacgcctcacaatcccctagtggaagttacactcaagattaaaggccaagaaacaatcagaagattttagcttacaacttggtcgaattggatctaaaacttgggagtgtgcatgaattgatcagggcctattttaccaaagccccacccaatttctgacttagaatttgaattcactccttggctaccaggcaggactctctaggtgctttgcagagaacttatctttctacattttgttttcttagtcagctccagctcaatgagagcaagagagtcagaaatggaactttggaaaataatcactaaggaaaagagatgtgtgtctcagaaaactcccctcaaagaaagccctgcccctcaattcatgatgtataacttttcaggcaggacaggacctctgagaccaccacattaaaagcctcattttataaaaaaaagagaatcaaaagcttcagaaaagtaaatctcagttttatccctccagataatacacatgtaattcactttcttctttcactttttaaaattccttaatccttgaaaaagttacccccaaaagaggttccttctatctttccttccttccaacagatcacagggtcccactgttcattactttccagaaacagccatccttttacagagccatcgctttctcccaggggccgacacgcgcagatcatctgtaatcctccct

SEQ ID NO: 81393 - DNA, 1113 bp, Homo sapiens
ctaccatagatagaataccaatatcccttgccctaaatagaaggtaatagcaaaaataaatacaattaaattcttggcttccagcctgcttggagactttctttatctggaagagcagattggttttaaaaggctcccctagacttgccttccatcacccctagaggccttccctctccattcccctgctttttataactgagagtgcagtttggaactggaccgcaggctgggcaggccaccagatccactcaggaacccccagaactctagggaactgtgactgcatacgccaactgtgaagtggggccctgtgctgtgtgaaagatcgcatcccagccaagctcattggagggcttaatgacacagctgatgagcgctttgctgtccagtttctctagaaatttccttcaagtgctccagcaccgggtcaagcctgtttctggacacactgtatcctccttggacttatgtaataaatcacttcaaccctcggttaagatctctgctctcctcatcttatgcctcaggcctcatttgggaggacaaaggaagagaaatatgctaatggctaaaggctaaacccctggcaccttggaaaacagccagctagatcgccacacagtttaagttctttttctgtttcctaagcagtcactctatctgagtctcagtttacttgtccgtaaaatgggtgttgcaggggttttataataaatgtgtgaaacaatgtataaaaagctcctggcatacactcaggaatccaaccagtggctgtaataagaatcattattcatttttctttgtagtgtttttttttttcttttcttttttttttttttgagacagggtttcattcttgatgcccaggctggagtgtaatggtgacatcttgactcactgcaacctccgcctcccaggttcaagtgatcctcctgcttcagcctcctgagtagctgagattacaggcgcacaccaccacgcccagctaatttttgtatttttgtagagatgggtttcgccatgttgcccagactggtctcgaactcctgggctcaagtgatctactcacctctgcctcccaaagtgctgggattacaggcatgagccact

SEQ ID NO: 81394 - DNA, 1050 bp, Homo sapiens
ggcaaggaatttaggggtgtagcagcaaatggatttgctatttccagtgaggctgaactccactgcacaggaaaactccttgagacagctctccagttttgttgctctagagcaagtgaagacctgtaggtccattgagtccactttttataaatgcgaaaactgaggcccaaagacgttagggcctgcccttagggcaatggcctggtggtggcaaatccacaaccaaagcccagaccccgaaactctcacctccagacacattcctcgtcattacacaactcgctcccccaccagatcacaaactccatgagcaccttccctatgctgtactcatcttttcagtcgccagcactcagcacagggcttgtaagcacctgtaaaatggatcggatgcactttgctcacacacagctttgcaatgactgcacaaagctcatggtaaccatcacagaaaccaggtaccaggaaaccgtcctgacgcctttttccaggggcactgtgagtgccttataaggctgctgtttttgcacctaatcaggagcagattggcttttccagcagggtggctcgtggcacacagtctgtgctggtgatgctgcaatgctgcatttgagaaatagttactgagcatgtaccaggtgtcatgcactcgctatacagaaatgaacaggaaagaaatgggcccttccctcatgaagaatcatcgagcggaaaatgaaaaaagcagaacaaaagtaaatagaccacctagtccagacagaacaaccctctccggcagctaatctctgcctatttccaagacagaaaataaaaacaacactacacaatgggactctgatgaagaccacaaatcccaaagtcaacacattttactttattttatctcaattgatctcaactcccaaatgcgtgagcttcaaaaggtaagattaggtaccattaagccagccagaccagcattgatttgaaaaccctcctccctaatacaagactgaggaggttgcaggccctcattaatctccttgttatcagcttgatctcagcctg

SEQ ID NO: 81395 - DNA, 1014 bp, Homo sapiens
ttaaaaattattaagccaccacttactggagcaactaggggataagagggcagcagaaccacccctctttcattttataggtacagccactgaggccctgagataggaagtgacttgtccacagtcacctcaatggtgggcagctggggaccaattcgtaagagaataacaggagagaagttaggctggaggttaggctagatctgaagccctctgggggagatggcagttgaagctcttagtgtagataaaatctctaaagtagaaaagaccccagaattaagcttgggtctttgctctgatttagagaattggaaacagaaaccaaggtagcaaaggccatgcagaagggcagtgagggaagtacgaggcaaccaagaggaagaagcaaggcaagacaggcaggtgctcccggtgggagggtccttacagacgagggcctcaggccaggttgtcggcagatccccagtggcatttgagagatacctccttccttggaattgtggggtgaagcgagattccaaagagaggtctctgataaaggggccagagagggcatactggccttgccggaggtgtgaaaaggaaggagaagtgggtgaggggtggaggcaggcaggagaataatattttaaaaataaaagagtgcatctgtaaaaataactaaagaaatgagaggagggaaggaaggggggagaggttcaatgatagggtcacagtcaggtgaaaatgagaccaaatggcagaggtggggaggggaagaggagggatgaaggttcagaggagagatgaaggggtgagcagggcctggaaacatggtaaattttaaaggagggaagattgggatcctctaacccattaggctcttcttgcctttcaagttgtggcccatgcagacctctctgcctgatattcttcccacagccctttgcaaggctggttccccatcttccttcagagttctgacagatgccatctcttgaaacagcccttcctgtccactccccagtatcc

SEQ ID NO: 81396 - DNA, 1041 bp, Homo sapiens
acccctgccacgcctctcttcccctctcctccattgatttaattggtttgaggtacattctggacattggaggcgaagctccccaagtgattctgatgagcagtcatggttgagagcaggggctaactccaccagggcctcttgtttcaatctcttgggacagctggcaatgctccactgaaacacagcctgcccgccgctctggccccagagtgcctgctggggcatgttacctgatgacgaagctgtgggcgtcaatctcctgcccacagccgctgttcagcaagacccccgagttgcccacgatggcacaagtcccaaagtgcttattcttcagtggcgaagtcctggggaggagctcgtagaggttctgggacacattcatggtgctgtctcgatcgaagatgtaatgaataatatctccaggcttcagggttccctttaggacagaaatgtccttttcagcatccaagaactttaaaatctgcttcctgtgaaaaccaaacatgcgtgaggaaattctccagggtgccagctgccctttgccagcccagcttttcctatccagggtcgccctgcacggtggctgcagcccagcaaacacgcagagtatgatgagagttcagatgccctcgagaacaggttccagccagggatggccagaagtggcccagaagcaactacggtggtggccaatatgggggttgccagggttacaccctcttcctttgctaggtgaaaactgccctgtggaatcactccattagggctggagtgagctcctcacagcgggccccagaaggaagggtggcccaccaccccagtttccccaggactgcctggctcgggcactgaaagccccatgtccctgaaagccccacagtctggggcacacccagacatttggtgagcttacattaccctcactgtcttagggggatttagggccatcctctgacggggatgaaaatgaatggctaggtataaaatctaagtttctctgctactcccacacttcctagattttgaaaaaaggataat

SEQ ID NO: 81397 - DNA, 1021 bp, Homo sapiens
agtgaacaccaggtaaggtcccaccaaggcaagggctaatgaacatgctccctaacttttcattggtgtcctattagacccagcaccctgcagagtccaatggccccacggagggagaggatcattggcagaattccattccaagcctccttttccccttcttctccccctgctaaaagaagaggctaatctcctgcagtatttcctcctggggtggtcctgcagctgaagatgttgcagtctcaggatgaacagcctgtttgtttaaagggcttattactggtgcttaatgctgttttgacagatgaaagtgagtcagttatagctggaaatagatctggctgcatcagtttcttccaggtggttgcccattccccattcaagggacattttctctccttaacaaagggcagtgtttctcctcttatccccaaggactccagaaccatctcaagagtttcctccttctaggaaggaacgatatttaatatttaaacagtccacgagatgagggttgccactgcagacctactctgacagggatgaagtgaaaacatggtcctgagagaccaacctctaggataaagtatgtagccccattgagccccgtgtccatatggggatcattctggctccatcagacacacatgtggctgctccttatcgaatgtctctctcgggctttcttgggggcaatgggttttccctgttgatacccatcttaatgagaccagtgttggtcacaggcttgggtgaccacagtcaccatgaggacaagaatcctttgtgggtggctcagagggcttcccagggtcacactgagttatgctaagtccccagtgaagagcatcctgatgcccctcagtcagtggggagtctgtacactgggctccctcacatccctggtgatctgccatgtggttggatgggcaattgggtatagggcctgaccccaagctgggaggtcaggagtgtggtaggatatacatttgtaacaggcatctcacacttcgtatgctca

SEQ ID NO: 81398 - DNA, 1035 bp, Homo sapiens
tgaggggatgctgaggagctctgacctttcagcttgttctccccgataaggtgctgccccaggctctgaacaactgcagtgtgtgcacgtgtagccttgatgcgttgctgcctgccgtggtcttctaacacctcttctccagtgtggcagctcctggcccactcagctcattgccatccctgtccctaaatgagtgcaaatttctgctgcacctggtgcaccacattagagcgagagaatgcagttcagttcctggttgtgccacttagatgctgggtggcctcatacaaatgacctaacttgtctgagcatcaagttcctcttttgcaaaatgaaggtaacaagatgaaggtaacaagttaacgtttgtccccttcaattccctaaactgtccgtcaagtccaagttgcccatgaaatgctttgtcaaggtagctgacttatgtccagatgtgaaatgattatactgatccctggtcactgccctaaaagtgaattctcatttgaaattcccaccagcaaagcagaagggttcctatttctccacatcctcaccaacacttgttattttctgtgtgtgtgtatgtgtgtttactaatagccatgctagagggtatgaagtgatatctcattgatatggtttggatctgtgtccccaccaaatctcatgttgaattttgtaacccctaatgttggaggtgggacctggtgggaggtgattagatcatcagggacagtttcttgtgaatgggttagcaccatgcggtggatactgtcctcatgataatgagtgagttctcataagatctggttgttgaaaagtgtgcagcacctccctctctctcttgctcctgccatgtgagacgcctcactctccctttgccttctgtcagaactggaagcttcctaaggtctccccagaagctgaagccgctatgattcctggcgagcctgcagaactgtcagccaattaaacctcttttctttataaattacccaatctcaggatttctttatagcagtgtgaaaacagact

SEQ ID NO: 81399 - DNA, 1060 bp, Homo sapiens
tgacaacaggtggctcgccattcatccatgagcccaaagatccctccaagccaggaggcagtttgtcatccaaagtcatgggactggcttcttttcatgtcaagtccttccacccccaaagatggattgagtctcaatctggttcaggtgggttctccacaccttcttcctgtggcctatctgcctaatgctagatgaacaccacacagttataaatactcaggtcaatatatatatgcaggtatagatatatatattctggtcactgttttacactttaacaaagaaaaccactagcctgcttgttctattgtttgtgccaccccgactcccatctgcctgtggtgtagctggcaggaaatgtgagccactgagtcccatggggtgcccaccctacgtggccccatcgcactggccgacagtcagtttcaaagccccctgctcatgtaggctcttgagggccttaaactccaagggcatggtatgcgggctggcctgggaggtgtagccatacttgaggctgtcataatagtggtacttgactgggttctggttctgatccagcggaaagggccagaagccgtagaggtagatttgtttgcagaaacgtgtggccagggtatacatcaagaggccggtggtgggtcttttgatgtggactttgttggtcagccagtatctggaaaaaaaaaaaaaaaaaaaaaaagaaaagaaacatgggtctgtgagtcatcctttccaggaagacaaaaattttatcctgcccagcagcctgccttctgccactccagggaccgatcaagctacacatccctggttccctccacagaggagtgacaagcacatgaagcaactgaactgctccttagcctggatgcggtcacagacacgagtttatgaaattctcaaaacaaacctgttgtgggtacagatgcagaaatggggctctgaggtgaaaaatggcttgcccaaggttacctgggtagaaaggggcagcacttgacttgaactcaggcccgtggacagctcaagcaggagctggcaacctttttctgtaagg

SEQ ID NO: 81400 - DNA, 1063 bp, Homo sapiens
ttttcctccttctttcccaatccctctcaaccatgtatttatttatatatgtatgtatttttttatttattatttatttattgaaacccctactttgattgacaaaggaatcaaggtagatctgaccagtattcccctctcttctccttgtcccaccacatggacatgccttacactggcgtcctctcctgagtccctccgcactctccatcagcaacctcacacctgccttcagacccggctgcaacttcctaagctgcccctgccccagctcctctctgcaacccagccctctcctgagctctaggctgggattacacccgctggagggacactcaccccatctgctcccacggcagcaccatcaactcaacaagtcagaagccaagtggatcatctgtgtccccttcccccacaatccctcctttttctagtaaaagacccgtgatcccgtcagccacccagtctgagatgctgacgttatcttcgactattcttccctgtcctgccttgctaattcttcccactagcactaatctcgactctttgtcacttggactatttcagcaacagtctcatctcccagattacctctgtgcacactgacacgtggtcccgtccatcctgaacatgcacagtgattttcctctcccgttgcacacaaacctttaaaagttccccggcccgtgaacaaatgtacaattctctattctgacattacagaccaccggataaggccccattcttcctttacaccctcccctggtcagcctaggagagttgtttttcctggaaagggtgcctgcgttttactgtctctgtgcctttggtcttgctatccccatcccctggaatgctcccttttcttcccttcaaagcccatgcggaaaccacgtccttcatgaagccctccctgatgtaccaaccactgggatctctccctctgctgaaccaccgtagcactttatttgtacctttctcatggcacttaccatattctgccttgtattatagttatttgtgcacttgtcctttgactgttcttagactgtaagcttgccaa

SEQ ID NO: 81401 - DNA, 1048 bp, Homo sapiens
tcctgcttgcgaatgttcccttcgcctccttcttccatgcaggttttaggtaaaggacaaagccttattttaaactctgagtctttatcttattttctacacaaaatcaatcaagataagggagcaaatatgaagagagacttcatcaagtaacagggatgtgtctcttccattatcagttgatggctactcagattggggttgagagaagcaatttcagtgttacatactatcaagatggttcctcatatctgagattttattttccttggagtcttgaatgcacttccttcggcactaacaccagctggaatggagtgcctgggggttggggcccaggaaattcctgtctttacccatctggactgccccaggaatgatttctttggaggctccccaggaagagtcaggggtcagccactctggggtctactcggtgtgtggggtcagagagaagaatcacaagcagacttgagctaggggaggttatggcagggtgagcccaagatggacaggcaaatgaagccgctatacctgaagcctgggcacagtgaagcccatggctgaggaaatgagagggagcagacttcgcgcccgggaagatgagagggccatcttggacgtagtcagaggagcttgtggttgctgggttgggctctgacttttgtgtgccttttattagtgaccttggattcccatgccagcctgccagtcatgacttaagggcatccagctccctctaatgcctactttttctgtaggcaaatttagttttacccaaatctactgttgggtagatttgatgagaaaagctattattttggaggaagcgtgtatattaggacaagtaatgaacatgtatttgtttagaaatgatttaggcggcttgtaaaggaatagtgttatttttatatgtgtgtgggcatagttctgttatgttggtagaattaaaagtgttaagtaaatcaagagagtgggtctcattctataaggactaggagaaagtgatgtgatgaagaggggagagccacttagcaaggccacgtgt

SEQ ID NO: 81402 - DNA, 1046 bp, Homo sapiens
tggagtccgacacatctcagatctacagacagtttttcaggctgaggcaccagggctgggagaactggggctgctgggaggccatgttgtgaatttcctctgagttgaatggtcatgagggggagacttggcctggagatgccttaaaagggactttgcccaagaaattcaactggaaagataatgagaccctagcagagagcatctctgaagggtcttcagagttcccagaagccaacaactggaattgttaagtggccagttagaggaggcatctgccatggctagaggcataggaggagaaggtggagctaggagagagaaaaattgagtcttcctttccttttccactctctcacaatcaggcatgaaagcagcaaagatttcaaggatggaaaacaatctaaattcattcatctattaatagtttgttcctttttattgctgagtaatattttattctattgctattttgcaatttgattattcatccttctgttgataatgatgtggatcgtttccagtttggggccattaggaataacactgctaagaatgttcatgtacaagtcattgtgagaacatatattttcatttctcttgattaaatacctaggaggagaactgatggctgacagagtaactgtatgttaacttattaatacaaggaacatgctgttttttttctgtattgtttcatttcagtacatatgctgacaaagtgagcactgcttggttatttttgactgtgtgctgctcattttctggaaaacttatttgtgagaagtcttttttgggctaggatgaaagtgtcttcctctggagaatgttcactttggcttttgcaaggggccttagcagcccaggatcactttcaactacatttagggctggaagtttattttggactatccgtgtgatgaacatctgggctgaaaatttacataaatgccagcttttggtcatgattgttccaagaggacttcttgatttttatcccctgctttgttgagtgccagagcacctgtccttgcagacccctgggt

SEQ ID NO: 81403 - DNA, 1049 bp, Homo sapiens
gtctgcctattcatccctccctcctctaacccctggcaacaactaatcatgttactctctctatatttttgccttctccagaatatcatacagttggaatcataccgtatgtagcctttttactttggcttctttcacttagtaatatacatttaagcctcctttactttcaaaagaacatatcaaacctactttatattctgtgtctgataactcagtagctcccatgttcgcagatttcattctgctgtctattttttgtctggctttggttcatgacttcctgttgattgtgagctcgtatttcatgcaactttatctgaagaaatgttttgagggctgtgttgaagatgacttccttcagatagggaagccattgtttgttgtcaggtgtctgggggaactaccaacccaagagtatttgaaactgtcacctggaggtttttaaaaatcaaccaggtagtttgaattcagtctatgcctgcatgagtatgactcgagattacacactctcgagggagatttttttctcctctactcaccagaaaggtttgacacagacaattttctttgaaattcttggagaagcaggattatttctagatcattttttttttttttttttgagacagagtcttgctctgttgcccaggctggagtgcagtggcgcaatctgggctcactgcaagctccgcctcccgggttcaagtaattctcctgcctcagcctcccgagtagctgggactacaggcgcccaccaccatgcccggctaattttttttttatatttttagtagagatggggtttcaccgtgttagctagggtggtctcgatttcctgacctcgtgatccacccgcctcggcctcccaaagtgttgggattacaggcgtgagccaccgtgcctggctctagatgacttttatgtggcgggtgtagcgtttagtgtcccagctttttgttgggggtctcctgtcacacttctcatttcaaaggggccctcaacttcgctttgctattaggaaatatgggaaggaaatcgggttgggc

SEQ ID NO: 81404 - DNA, 1072 bp, Homo sapiens
aacttggcttgaaaggagtacagaaagttgcagggccaacagcattagataccagcaagaggggtgtatccatgagcacttggaaggacagatgtctgagagacagacagaatgtagcatgaatcagggatgtttgtaggaacaaatgacttaggttgatagcaaggacttctcttcttttccctctgttttgccacccacccatcaggtaccttgcccaggagtcccatagaatgttgagtctacactgcccaaagccaaagctagggataccctcaaatggcgttgaacctgggctacctcagctgctagtatagttccatgtggttgtggaaacttcataaaaatgcctcttatgggtggtcaagtgccaagatgatgcatttccctgggctgattcagccctatgttcagtgtgtggcttaccatgaagggcacaggctgaatttcagctcctacagaagctctcagctgaacagggcttaacctgtgcagccaaatgtggaggccctgtttagactgaggttcaaaccctccaggtgactttagatcacctatagctgtgtagaaacaagcttttctcacccaataagagagagaaattcagtgatgtgttagcagtaccctgggctagacatcagaagattcacttctgggaaatgccatttgttctccatgtgaatcagcattgaaacttggaacctcagtttcctcatatgttaaatggaggagaagagctcctgcttttccttgcacagctgtagtttgggtcaaattcagagatatccaggaggctgtttcgggagtgatgactagggctgagccactaaagttcaagaagtcatggaaggaggtgagatgatggtgtgagtccttttttttttttaaggggtcttgctctgttgcccaggctggagtgcagtggcgtgatctcggctcactgcaacctccacctcccaggttcaagtgattctcctgccgcagcctcatttttcgtatttttaatagagatggggttttgctatgttggccaggctggtctcaaactcctaacctcaagtgatctgcctgc

SEQ ID NO: 81405 - DNA, 1518 bp, Homo sapiens
aataaaaataggtcaacactaggggagtccaaaagaaaaaaaatgcatttcaaaggggacacatatattattcaagctcgagaaacactaataactcctccacagctccacatcttgtttccccactaaggatgaccgcaaatactgcacaaagcatgggacgtatttcctggagtcctttggaggccaagctgaggagcttgtgaggcttctgcagcagctccaagaggcacccctgctttcaaaccagaagtagacatatgtttggtgaagtgagagccttctggaaagctgtgggtggacacagcaaaatgcatgcagagtctgggctctactttagtaatatgggccaaaactggggccaaaacaagtggaaaatgagtttctgctaccatgtggccattctctttttaggtgaagaaatcaatcgctcagaacaggttaaagaaactgacttaatagcgggtgaagctgatgttaaatctactggctagaatgtcagccctgaaattcctaaaaagaaaagtcctgttgaaacaactccctcgtaccacgcaaagcaatatgtcctgtaattcctggtggaaaccgctaggctcagcaagagattagggaaggcgagtgggtctaagcatttctgaagcttctttcctctgttggtgtttggtggtaaaggattctaaactctgaagattctgaatagtgtcctttggatttctgcagactgatcagcctgcgtcctttgtctcctcctgagttaacttgtggccagaggtcaacatggtgcaggagaagttagagtgcacactccccagtccctctgatcctctaaggcttgtctgccagtgagaatggaggatgtgtgttagaatcactgctacagactggacaggctggactactgctaagagttgctatttctgaatccttaaagggttggcatgacccagctgggtttcacttcagtcccttcagaagagtaggcacaagtgttccactcttccctgatcggggtgctgggagttttcttgggagcagagactgaagtttggcaggacaggggagcagagaggtgaggctgatgtttccctggtgcaggcactgtggggagagtttttcatggagtaccttcagtgttagcctcagagatttggggtctcctggactttatggtagtgaatttgcctttgacctgtccagagcactttccactgggaagttttgcatttggagctatctctgaaacctccatcatcccacaacatttgatttttgtcgttcagggagcgattttagggcaacctggttgatgcttccattagatgtggtatcagctagacttagttttcttctttctggtggtggtgggcacagcaggtaaactggggatgtgactgggaaaaggatacaggacttttacaggacttccaagcagcaaagttttcagtctcttctttggctccgtgtctgagttcccaacacattgtcctggtgtttctgcttggattctcaaacaat

SEQ ID NO: 81406 - DNA, 1062 bp, Homo sapiens
atgaatgacaaaacagaggatgctattttttttacctacaaaatcataaggaatagaaagcttgtaaatatatcccaattctactaacaaatcaaattgaaaccactcacagccaaggcacttactgccacttaaggatactatcccatagtcgcttctgctatttcagtggtttatagatttaattttcaggaaagcggaatatacacagcagtgccaggaatatcacattatttggcaggtatgcacaaaagaaaaggcagcttggttttggaatgacattatggcgtgatagttgggagtagataatgacttcctggaaaccagtctaaagaaagctataaatatcagtgaagcattgattcgtttaacatgtattcattaagcatctattatgtgatggaacctaggtacacctagtgaacaagacctcactcttccctgctgcagttgtcagtctagcaggggatccaggtaagtaaaccaaaataatgagaagagattatgaaagcagaggagggacaactaacccagacttgggatgggagggccgagaatgtttcctggtggaggtaacatttgagaaggaggaaaatgaatatgtcaggtacaaaagggttgggtggttgtgtgggtaaagaaagggctgaacaagacagaagtgctcctggaagggcctggagggagcaaggttcttctgaggagctgaaaagccaatatagtttgagcgagaactataaccatccatgtgtcctgaatccaatcacttctcatcacctgcagtcaccctaatgcaggccaccatcgtctctaacaggactagtgcagcatcctcctaacagcatctatgctttatcttattatcactgagacagacaaatgcagcccctgacagctgggagctggtctggcactgccagagggctgtggtgtctttacgacctggccgggtgctcacagctgggcctttggcattctttcatccaacataaaatgtcataaaaccccaacatcaagcaaggccactctgtgaccctgatggatgaaggcaaaaacaggacc

SEQ ID NO: 81407 - DNA, 1154 bp, Homo sapiens
gcctcattttggcgttacctgtgtcagagttcaaggtggatgtgcttagagctggtcagccccttccagacctggacacgtctgtggctccttttctttcttcctttttttttttttttaaaaaaaaaaaaggttcagcagaaatcagcgtggctagttcacaaagaatttccagtatcagggaaaaactgtgcgtgtgtgtgtgtgtgtgtgtgcacgtgtgtgcgtgtgcacgtgtgtgatacctataaaacagtttctccttctctgaagggaaaggaaagtgctaggcagcctgtgattagcaacattctttgtgcttttttgttgttcctctgctctgtcacagttctacgttgtttgccttagaaatgtaatttttaaaaaccattttaaaaatgaacggtgatttggctggctggaaaaaatcacactgtcaggggactatatttgaagtcagtctagacggggctggactaggaacccacctggacccaggagaccccacaggacccaggaggtccctgccggaaggcagaggttcaggtgagagtggctcacctctgagctggtgaagtgaggacttgcctgtgacatgacccagggatctgctgctggcttctggagacagggccttgggctgacttctcaggttgattgaggcctcctgactagcggtgttcccaggctagaggtgattggctgcaacaaagatgcttctattagtctattagcagtgccttcgggaccctgggattttgctctctctagaaaggtgttttttatttttttattttttatctcccccttttttcctggctttgctccagggtttgtgtatttgcctgtttattgtcctgctctttttttttttggatgaaaactccagcctttcctgactcacctccatcttcggttcttcagttttctgagaagagttgggatatgtgggaaggggcatgggagctcggcagcctccgcctgccaggaaggcagtttcgcctctgcaggaaagagcagagcccgtgggaagccctgggtgagggtggcgcagccggcccagcacgcatggtattgccagccacggggggcctgcgtgtagtctctgctccctgcatttcaccttctttgttgactttccttctctgttttcc

SEQ ID NO: 81408 - DNA, 1155 bp, Homo sapiens
cttgtcacttgctccttatgctctgtggtttcccgcttctagcctaattcttgcctctatattctacaagtgcgtgcagccaccaaggcccagctcccatcctccttcctctgtatagttttcctggacatttgaatgaggctgtcactattttctgacctcctcatccctaatctgtgcatccttcagtccaaccatgccatgctggcttctgcactcagcagagggcccttgaggttgggaagtccagttcatcttcgtgtctccatgcccgatgcgggcctgccattcagcagaggtgccattgtcatctacggacttcctgattgttcagttggagtgaaggttaatgcctagagcagctctgagtctggaggtttgaaacatttagctcaaaataggccctggagtccacaaggctgtgtattttttttagaaggtatttgaacaattttgctagtctgctgtttattactcaggagtaggggagaaaagaaggcagcatgcacccagatgtgaggggtgcgagactcatgttggagtgggtaagccagcactctagcctggaagagatgggtctttagtagcttgggtgtggagtgttgaaagaagtttacgacttcataggagaagctggttatggacatgatctgcgtctcttcccaggaaggcaatcttgttagggtgagttttcaggtggacagctgccaccccagattctgatctagagaggactttgtaatattttacagcttgcaagggccctgatggtgcacagtccccatgtgtttctttgcagttgagaaagttgcatcccaggaagtggaataagtcattgctagattctagaacactctgcaagtctgtgtagccaaggcagggccagcacctcatctgtgctattcggtctgtactgtggcctttcccctgtcccacgctcccctgtaaccttggttagtcagctaaccaaatgcctgctctgctggctgggggccctccttcctttctccctctgcaactccttagcctgcgggcaccgagtcctggaaattccaccacctgagtctccaagagactgtctcacctctgcccacaccaccttccccagtgaagcttcgccacctgccgccgtttctaccttgtcgctcctgaatt

SEQ ID NO: 81409 - DNA, 1009 bp, Homo sapiens
ggttgcggtgagccaagatcgcgccattgcactccaatctgggcaacaaaagcaaaactctgtctcaaaaaaaaaaaaaaaatctgaagtagggacaaatagtacccagctcaaggccactggaagcttccataggacagagaaaatattagtgctgttttccttattttgccacaatttgtggactgatggtctacatcagtcattaaacaatgcttgattgtttaatgctaacatcaagaatgtagaaagcataaatgttagacttttttcataacgtgaaactttagaatctttccttctaatcatttgcttacttaaaaattgccctcaattagagttctttaaaaacattttaattcaaataaccataaacaaggacatttttaacatggtaaacgggcaacaaaaccaaatctggttgatttcagagaaggggagattattggaagcatgtcatgttgcttccagaattgactgtaagccaaagcagaagttctaacagtgggatttgtggactcctggggtctctgagaccctttcagggaatcttcaaagtgaaaactaattcaataatgataataagatgttatgtgtctttttcactatgttgacatttgcactaatagtgcaaaagcaacagtgaggaaaactgatggtgccttagcacaaatcgaggtacacaatattcatagtcgctgtattcttcacaactatacactataggaaaaaaaaaaatcagtttcactttagaatgcccttgaggtagccattaaattattaaatcttgaccttaagatcattttaatattatacatgataaaatgggaaataggaataaatcacttctgctgtacattcatgcataatgactgactcaagaaaaagcatgtttacaattcctagagttgcaaactgaactagccacttttttcacggaagaccatttttaatcaagagagtgactgacaaactttacacttggtctttggcaggcattttctcaaaa

SEQ ID NO: 81410 - DNA, 1052 bp, Homo sapiens
ctccctccacacctccctgcaagctgagggagccggctccggccttggctagcccagaaagcggctcccacagtgcagcggcgggctgaagggcttctcaagtgccgccaaagtgggagcccaggcagaggaggtgccgagagcgagcaagggctgcaagagctgccagcacgctgtcgcctctcactggcattctccctcaggcccgtcacacaccagataccacgctcgtaaccactgggccacgctgcagagtctcctgactagggagctaaacaataaataaatgtggcctagctcagcagctcgggcggcgggaggagcggcagcggcaaggcagcccagtttcgcgaaggctctcggcgcgccgcggcccgcaggcacccggcacgcgccttccccgccgccaggatgcccaagaggaaggtcagctccgccgaaggcgccgccaaggaagagtccaagaggagatcggcgcggttgtcagctaaacctcctgcaaaagtggaagcgaagccgaaaaaggcagcagcgaaggataaatcttcagacaaaaaagcgcaaacaaaagggaaaaggggagcaaagggaaaacaggccgaagtggctaaccaagaaactaaagaagatttacctgcagaaaacggggaaacgaaaactgaggagagtccagcctctgatgaagcaggagagaaagaagccaagtctgattaataaccatataccatgtctcatcagtggtccctgtctcccttcttgtacaatccagaggaaaatttttatcaactattttgtaaatgcaagttttttagtagctctagaaacatttttaaggaggagggaatcccacctcatcccattttttaagtgtaaatgcttttttttaagaggtgaaatcatttcctggttgtttattttttggtacaaccagaaagtagtgtgggatattgaattatgggaggctctgactgtctcgggtgtcagcttaacattccatagatggggggttagtttttatatcccataatacaaagcatattaaatggcaatat

SEQ ID NO: 81411 - DNA, 1070 bp, Homo sapiens
tgaaattaaaaataaataaataattaaaaaaataaacatttaaaaatttgagtccctgcttttaattattttaggcatatactcagaagtggaacttatgtttaattttttgaggaaccgccatactttttcccatagcagtacacaagggttttaatttctccacatccttgttgacattttttattttctgattaaaaaaaaattagagccatcctaatgggtatgaagtgattgcggtggggtttgatgtgcatttcctggagaaattggtatttatttatttatttattgtttaggccacattttatttttatttttttcataattgagattttattggttgaggatcagtacagacatttcaatttgtacacaaatcttaacatacgtaacgaaattctaaaaagccatgtattgtaattcttttttaaagttattccagtgactctccagcttaaaatttggaagcaaattttccttaagaggttatcaagtaccagtatcttcacatgttggtcagctgttacatacggcccaccagttcacaactcaatagcacgtacactacatgttcaaatttgtaatctttcacagcacagtaagttattaggaaaacaggactaccacaaccaaagatgttacagagtacacacaattctgacagagagcgccatgatcaaagagtggttttctttaggaaacaattctactaaaaaacaacatggtaatagaagtaatttagaatgttcaagacattaaatgcaggactgactccatattgccatttaatatgctttgtattatgggatataaaaactaaccccccatctatggaatgttaagctgacacccgagacagtcagagcctcccataattcaatatcccacactactttctggttgtaccaaaaaataaacaaccaggaaatgatttcacctcttaaaaaaaagcatttacacttaaaaaatgggatgaggtgggattccctcctccttaaaaatgtttctagagctactaaaaaacttgcatttacaaaatagttgataaaaattttcctctggattgt

SEQ ID NO: 81412 - DNA, 3313 bp, Homo sapiens
cggggccccgctgcagagcccgcgggcggcaggtgggcggggggcagcctcgtcgccgggactggatccgccgggaaaggggcggcgggtgaatgccggcgagagcccgaaggggatcgggcgtggagagcccctttctgtcctggtgagttattttgatatttagggtaaaaaaatccctttcaggttctccaacggaggagctttttaacctctttccggtgaggtgggaactcatcttcatgatcgaatttaaaagaacaatggaaccctgactacgtttcaacaaaaataaaacttgtttttttccctcctattgggtgttggcttttaactctttcaaagccgattttgaaacggctgcagtgatacatgcgaaggtacttgctgcttattaaacctttatgacgttaaggttgtctttgaaaaatgcaagttggaggagtgcttctggtatttcagaattacgaagacaagtttactgtgtcgtcaaggctgtttaatggaaatagatttgataattacggtgctagctagctgatgacgtttggttaatgtagtttattttaccgagtaatgacgccaagatcatttgatctcctgatatttaaatatgattaaatacactgtttggtactttttaaaaaggtctcaaggagccgttatctgcaacttctcacacctgaatgttagaacgtacttgggtcaattcctagtctttaaaagttcataatttaattatttttaagaatttatattatcacaagccatgatcgaaaaactttcacaaaagaacattctgacaccaaatctcttcctgaagttactttctcgtaatgtaaatatgaataaagtaggactgctctcggtaatgggcgatgaagaggagccatatttgttgcatttgttgcatgtataaaaatctagatatgcttaaaacggaacagtattttaaaagtacaggtttcataaaatttagtagagttctctgtatagtctctaatcttagaaaaatgttggaagggtaatttttaagtgtagtggtttgaagaacaaaccagaagcgcacaaacctttgtgtattttagaatatatttgtcttcattctgcggagctcttgtgttgtaaaggtgcagaactacgtaaaaatagtgttgggcagacttacatagtacatctgaaatcagatactggtttattcgaccatatttctaagggcatttttccagtaaaattgttttattttttgagtagccttcctatagtggtacatgttacatcagttgcgcatatcttgattttacagaatctgtcttaagtaccaattttggtttttcaaatcaatgtttctgaaatttttgaacactgaaagtggttttaaatgaatattctgaatctagttctttagaatcctctttgaattgtgaaatgcaaaataattgttagcagtttaacctgaaagatctttttacatgataaatgggggaggagaaagactgaaatgaaaatgttgaagaccctgatttgaaattgagtgtaaaggtctagatactgtaagttttagagtagctttagagacaaagctagtatcccacttggtgagatcaagtaacttgtggtttaaaatttaaagtaaccagtggccattttaacttcactaatttctcttggaggagctaatttttaattgctcatgattgtaaaacatacttccggatggtaagggagatgttaagatgatttgtcttgaagaatggtaaactttttctttgtttattgcctgtcataaaaagagggaaagtaaaaaaaaaaaggttcataatcttaaatcagtccaaaaatttgaattttctgtatttctgtttaattcaatgcgttaatctttagcattggtcaatacagccaaaagatgaggaaaacaaagactgatagatactaagataagaaataactgcaaccataaatgtatacaggttatgtgtccatgagccatctcttcagtttgcccatagatttttgtctgtggaatattttcttgtttcatcacactgaatcgttggccaagaaatgcttgaaaatcaaaacattaatatcatctttcttcttttttttaaaggtgacttaagagattaaaattaatttggttgctgttggttctgaacaaataatgagttcttttatttgaggtaagagtgggttaatttttattgttttgacaaaaattagcttattaggcttttgttttatctttaataatttacatttcaattaatgaatgggtatcatttttaaaagttgtgattatgaatatgagtaaactatcaaataatttgacaaaagcctttaagccttttcactgcaggaaagattaaaagtatatacgcatagccattgtaacttaatgtaccctttgaatagtttaaaatactgaaggtcctttaagcctttgtttaattttgggaacaagagaagactgattagattttgaggaaaaccatgaaccaaagatagctttttttttctgtttaactctgtatattgtgcaaacaattttaatcttttaagtatttaaagaaataagcttattggagaatttgaactagtttgctattcatactgatagattttagggaagaacatttaaaaaatcaggttttgagcatagattttagtttcttttttgtaattaaaaagtttaaaaacacttatttttacttgctattgtttgcttcataattaagtttagaatcttatttgttttcaccaaaaggtatgccattttgaagactgagacgttggagttttatcctagaggataaaggaaatctttgggaaagtcagtattttatatagcaagtaagtaaatgtttttacccaacatctgcaattgaatagttaccaacatttaagtagaaaaataccattaaagtttgttaatgaaacaaactgtagactacttatcactgaaaggatgagaaaaccatcaaatttctttgcctgacattgaaaacacttctattactatcaagacagtcgatgcatgtaatttatattggagcaggaagacatttagtacttcttaataaaatggtgctttaggattgtggttaaatctgcagtaaagtcatcaagattatgtttttacaaatctggtatatacagtcttaagcctttttttttttttttttttgattgtacaaatcacattttaggaatggtctggaattttgcatttgctgatcgtaggattcttaacaacatttcaaaaactaaatagacactttcatatcttaggcatttaatagatttaaaa

SEQ ID NO: 81413 - DNA, 1050 bp, Homo sapiens
gagtattttaaatctattaaatgcctaagatatgaaagtgtctatttagtttttgaaatgttgttaagaatcctacgatcagcaaatgcaaaattccagaccattcctaaaatgtgatttgtacaatcaaaaaaaaaaaaaaaaaaaggcttaagactgtatataccagatttgtaaaaacataatcttgatgactttactgcagatttaaccacaatcctaaagcaccattttattaagaagtactaaatgtcttcctgctccaatataaattacatgcatcgactgtcttgatagtaatagaagtgttttcaatgtcaggcaaagaaatttgatggttttctcatcctttcagtgataagtagtctacagtttgtttcattaacaaactttaatggtatttttctacttaaatgttggtaactattcaattgcagatgttgggtaaaaacatttacttacttgctatataaaatactgactttcccaaagatttcctttatcctctaggataaaactccaacgtctcagtcttcaaaatggcataccttttggtgaaaacaaataagattctaaacttaattatgaagcaaacaatagcaagtaaaaataagtgtttttaaactttttaattacaaaaaagaaactaaaatctatgctcaaaacctgattttttaaatgttcttccctaaaatctatcagtatgaatagcaaactagttcaaattctccaataagcttatttctttaaatacttaaaagattaaaattgtttgcacaatatacagagttaaacagaaaaaaaaagctatctttggttcatggttttcctcaaaatctaatcagtcttctcttgttcccaaaattaaacaaaggcttaaaggaccttcagtattttaaactattcaaagggtacattaagttacaatggctatgcgtatatacttttaatctttcctgcagtgaaaaggcttaaaggcttttgtcaaattatttgatagtttactcatattcataatcacaacttttaaaaatgatacccattcattaa

SEQ ID NO: 81414 - DNA, 1023 bp, Homo sapiens
aagttaaaaatttgccaggcgcggtggctcacgcctgtaatcttagcactctgggaggccgaggcaggtggatcacgtgaggtcagcagtttgagaccagcccagccaacatagtgaaacccccatctctactaaaaattaaaaaaaaaaaaaaaaatttagctggatgtggtggcacgcgcctgtagtcacagctacttgggaggctgaggcaggagaatcgcttgaacctgggaggcagaggttgcagtgagctaagatccacaccactgcactccagcttgggcaacagagcgagacttcatctcaaaaaaaaaaaaaaaaaaagaaaaagtaaaaaatggttttaaaaaccaagttttctaagaaaagcataaatgactaatgataatatgacaattgactaaagctgtccttactgtttgaaagaacaacaaccaaaatatgtatattatacctgtaagttattaaatctgaaactatgatattatgaaatagggtaggtggaaatacgagcaaaatcattaactttcatagtctgcctaagctgaattttgctcccttctcctgtctttccaaggatggcaaagtgattttagactttgtcaattttggtggttagtaatttttgtgagtgatgcatggggaaggagatgctatggtagattacattagtgtctaattcttgtgatgatgcaaagtgagatacattttctgtctttggtggtgtgagaaccctatctactggtagataacttacttataagcacattatcagagcagtgtgagggatttcccttagacatttcttttaccgagattccttaagtcacttctgcccttctcttaagggtttacttggtttacgatttgtctgtcttcacaaaaccctctgttacttataaggtcagattaaatttggaagatcagaaatatgttgtgttccttttaaattgcttcatttgtcaatttcttgggaagataatttagcacctactcttagagcaattttgaagcagatct

SEQ ID NO: 81415 - DNA, 1037 bp, Homo sapiens
tattatcaagtatatattttaggaatgattagtgttggtttagttgaatagattggtacaattagtagtaatttgaaatgatgcctatggtttcctaacattttgtcttagtgttgattaaagacataataatgtgaaataatatggtaatactaaggaatgagaaagtggccttacaggtgggcaatgtaaactttcctgtagaaggattgaaagtaaatagatgtaagactagaaagtgaaacaattctgtactgtaagagcaatgttggctgtgttaaataactcgttcccaaacatcagatccacctggggagcccaaatatttacctacatttttggagttcttaggggctgaaacttacgcttgtgattttgtagtaacctattctagagaggagccaaatttgtgatactcaagagcttgtatgatttctgcttggactgtattgttaatacatacatacatcttttggtctattggcaaatgacccttgcaagatgttgacattttgggtataaatcatggtgcttaataatctgttttcattttttatgtataaaattaaattctttttgtcctctgcagaaatatgaacctcaaactgaatcctctaaaggccccatacaatgaagtagacattggtggaaacatttagtaagtattattcaatttacatgtttaatctgtttagaaattttaaatactactttggaaattttgaaaattcgagtcagaattgtaaagagggatttagtgaaactcaacacagtacaagaaaatcaacatggaaatttcgcttattaatttactccaatctattattttctgctttcttcacttaggcaagttaaaatgcaaacaaacccacatttgaacatacctctaacactattataaacatggatgttgctaaatggttcctctttgtttttgtaaataaagttttattgcagcacagctatacgctttcatttagttattgtttgccgctgctttctcagtatatagcagcagcaagcagaggagttctatt

SEQ ID NO: 81416 - DNA, 1027 bp, Homo sapiens
ctacccagttttctgtaggatcttgattttattttaatgcaagactgctgaccccatgatcctgtgtgttcttcagagatactcttactgatgatgtataaatgaactttgattcagtaaggtcagtttgtaggtctcaaagtactttggttattgtggtacatcagaatgatagctagtatttactgagatctttctatatgtcaggtaataaaaatcctataaaagtattctttctacagccacaggaggtaggtactatttttattttacagatgaagaactgtggattttgtttctaagaaaatttccaggctcacagaactaagcctaatttctttttattttttagcaaatacagtttttataagaatttgaattctatgaaaataaatggattactcctaaatctctgatgcctcagtgaacactttttccttattaacaaaattctcacttttggctttggattggctttgcaggagtgcagattgatcatagcttttttcatgtcctaagagttgtcagagttttctcttgtagcatttttttctttactttttttttttactatctttaaatatatgactgtaagagtatgataaatatgctgttttctaatctctgctgttgtcacataaactaatatattttgagtaattttgaaatgatattaataatgtcattagattttctttggattttttgaaaaaaataatggttttagaaggaaatctggataaattttatctctgtcctgtgtcagaaaaatataaaacttgagttttttaaattaaggtactaagataaataaattgcatctatagatattgaaatatgactgtaatttgataatgcattttcattctcagtgtcattgttcatcataatagtatttacatcaccaacttcatttagagcttgaatcttgtaacaatagagattgaaaataaattggtttataattaactctgacagagaatgatgtttttacttttatacttctctatagaagtacatgtccctt

SEQ ID NO: 81417 - DNA, 1666 bp, Homo sapiens
ggtcatgatgaatctgaatcatttatttaatgataaaatcatctgacttctcacttctcacttctcccttcagttaaaattatttaagtaatggatttgtttttctatgagagacatttggtattttggtaatgaaagtgtattattttagttgcatataatttgaaaacagcattttatggcaaatctatcaagccaggcagatactttgcatttttgatcttttttttttttttttttttttggtggctacatcttttctgtattctcagatatgtcgttaaagatggtgccacctatagtggccattttcgttatctaaacaaaaccaacatctgttggattgaaaaactatgctatgatcgactgctttatgtgtgtatgttttttttttttttcaaatcccttaagattcttttctataattagttttctttgaagaagcttggaaagttttctgcattgagatttagaatccacagtgtttctgtaatttagctttccaggaattttgaattttaatttttgtttttactttttatgtacacagtataatgatgttagtgttaaatattaaaaatctgactcttcactgggacttttttatagatacaaatgtatctgtggtagtacaaggactttgttactttggcgtgcagtcttatcaaggagttgtgtgtgtgttttgcatacaactttacaatttcatagttgaaagctgttacaaaatgaaagttttgtgtatggtaggatatcttcaaggtgggtggatgttttctgtttaaaagattaagatgccaacagcgtttttttcttttaattttttcatcaagcacccagtcagcttgaagagtttcaaatggaccctaccactgagaaatcaagatggcagtctactatggggaattgaggaaaaatggattaatacaagagtcctgtgataatatacaaccaagacagggttcttttaacatggattccatgcagtgaatgaagacataggtttcttacccaacacaaatggacagtggatttgactttctaaagactttttttgtggacattttgacatttggagaagaaagatggcacactaacccagataatagtttttatgcctggaattttttgcagtttgatttgtatgcgtatgacctcttgaaatgttaatttttaataaaatttgtaacacttaaaaatttctcagtttgggtttttttttttaagtggaagtttaattaaatgtttagttttattttagtaatactttggcctttgtagttgccgagtggtaaagtgtactgaatatgaataaagctggtaaattggaaatggtgtaatcgaaaacattttacttggtttatgaagatttacgtttttcacaaagttgtgctcttagatggtcatttggtttaaatactgttttgtttgtgctttcatgaaacacctttcaaaacaactcaatgggtaataatagaatctgattttaatctgccacaagattttaatgaacttgaaacaaactgcttgttgctcgaaaattcaggatgagtgatacacatatacttctgaattattttgtgttgattgaaatggtttcttaagctttttaatactataaatacatcttgctatagaatattcatctgaatatttaaattaatgt

SEQ ID NO: 81418 - DNA, 1054 bp, Homo sapiens
ttttggtaactattacaaaggtggtaggcattattttggtagacaaaatgagttcttgattctgttttcccattttacatgagaagaataaatagttcaggttaaattgttttgtgttaatcatactgtttgtgattcatgtcaaatactgcagcatacacatccatggttaatacacgagcaccatttgttattgactgatgtgaggtggttggtctttgttaaattcaaaaatggaattttggatattgttcttgctacgaaatttatctttgtgtgtagagtatggaattgaaacagtttggattatggattttacctagattggacattgttgattttgtttggtgtaaatctaaagtggatttcttcagtgagggagagacatggttctggcagattatgttgaataaggaaagttgattggatttttttgggtgtgtgaatatgcttgtctgaatggagtgcttggtaggatattgtttctggaattagtaatttgtttctgtggatctcatggttttgatatttaggagaatttgctttgtgacattactttgataatttgcaatcacgtatgtcctattgttaataacattgttgaaatgggtgtatacttacttgatttgaaatataagggaagtgttgggatatgtgttttctgttggatttggacgtggagtttcttgggttactgatttaaaggtgatcgtgtttggaccatactcttgaatttttgcctgaatcagtatgggaagtaaatatattgtgattatgagaagtttctttggggggaggagtgtaatattttcaaggttatataatgggttaaagaattttgtgaaagaacaaagaaaaatggatattcttgaataaaaattggttgcattaacttttgctccagtgcaacttgaacactagggaggcgctcttgagttgtaaaagttacccctttcttccagtggagatggaaaattcccccttaaattttgtctttagattatttttaggcatcataaagaaggaaaaacttgaatttatattatgaaattaa

SEQ ID NO: 81419 - DNA, 1935 bp, Homo sapiens
aaggactgaaatatttagcagatctttagacaaaaggaacaaattacatttctctctggcttaaaaagggtgcttgagccagagggggttaagaagccctcccccctccccctgttggggtggtctggaggggcagggaggtgtgggggtgggggtccttaggctccctgggatggaggatctgtctctctctctctctctcctttttttttttttggtggagatgaaggggtgggtctatggtacatcacctgagttgtggggtaaatgtagagagtgtcaatcaaaggcagagctctcagagctgggaaggaggctctagatggcggctgtgccttagagagagcgcgctctgctccctgcctttgcctcactttacgcaactttccctaactttcgggcagcctcagggggcccccgtagccccctgcctttcctagggacttactggggtcgattcgaacctttttttgggagaaaagcagcttttaggagctttcttttcgtgccttgttggaaagaagcagccgtactgagagcccaggtcgttgttttttccagcttagaagccatggcgcacctccatttttgtgcgctctcctaatgaggttttttttctttcggacctgttttagtattaattattgctttatttttttgaccagttaacatatttgagggttattttatttatttttcgttttttaacggaggattttgcctttatttttaattatttgggatctgatatttttctactagtagataggactcttggtttggacatactacatggatcaggtaagttcacgatcattggtgataattttaaagatttatttgtttaagtttgccttgttttctgtaaatacgagaaattcttggatgacgcaataagatacagagattgttatttgtatctagtgtgctactttgagaaagtttccttattgatagtgatgcttccactgttcggtttatcctgttgttttttcttttaaggaaaaaatagaaatatttagttttttggtgcttaccgttgttgtgttataacaatatcgttaacatcgtcaggactttgttcctgataataaaaagcatcgatagaagccgggaccttacctttctttcaacttttgacagtaaatacctgggcacaggacttcaaagcaaacacagattccccctcccccttaatatttaagaattaaaagatgatgagaaataaggacaaaagccaagaggaggacagttcgctacacagcaatgcatcgaggtatgagctatcaactttcttcctttttgtctttttttttgggggagaaacctcagcttacaattgtttaccttgacagacatggattgctgtctgttttattgtgtttttctaatttggattcgttttttaaagcatgaccttgagattgctaatatgccacaccctaattttttggtagcaatttatgaaagttgagttgtgacttaaggcctcttacagcagtcaaaaggtaaggtacctttattcaaaggggcctttactgtaatgtacagtttttctgtcagtaaatttcagtttttaggtttttgtactgcagaaaaatgaccttgtcggtttagccattgctgcattgcaccattttacatacaaggcaaattttttctttgaagaatccaggatatctaaacttgtaactgagggccatagagaagccttgtagtagtaaattatagtaaatagacatatcagaaagttatatgaatgaaaaaatgtacatttaaaaacaaaatcacttaaaggaccctttgactgatgcctctcagtttatatttttatgtgactttatatttcttttgatacacttgacattttaggaaattttgatgtgatttatcaaaacctttacttgatggttagagttcctgcatttatgaaat

SEQ ID NO: 81420 - DNA, 1064 bp, Homo sapiens
atattataaattttaaatcatgcagtttaacaaggatgtgattcattatgtggttttccttcccaatttttacttttctaatttttataaataatacacttttctattaggctagtgaatttgaaagttttgaacatgatgtgttactaatatgctgaattctatttattttatttgactgaaagcatattgagccttgctttagaaaataagttaccaaatttttttgcattgagttgtcacccagtttgtagtgctgtcttaattgaattgcccatgtaaattactagattaaattgaggacagaaaagttttttactcatcctaagctgtttttttctggaaagtaatgacaatttgaagaaatgagaacctccagatatatttggcaaattattaaagattcagcactaaaattgttgctcccttgagtgtatcatttgcataggtctcacatgggttttggctctcttatgcaaggtttgtggttaacatcattgatcagactgtgctttctaattctaaaaaattgagcagtgttggtattctttcagtatttttactctcacctggaaaactacctggaagttgtcaggcatttgcttactggtagtggaggttacagctgtacatgaagcatgtactgactgtacttttaaattggtttgtcaagtatactttgaatcatatacctgatggatgtccaaaaatatttaagactctttgaaaagaagatagttacttttaaattagttaccctaaatttcatatcttaatacatgtacataattatgacatcacttccttttaaaatgtgcagctgtagaatgttagtggtgttttaatgtggtagattaatattacttctactgagctgaactgtccctgtaattagtacttggttccttctgccatcagagtttttattgcccaaagtatagtgtttagggaatactacgaaaatcacctttgcagcctgagccacagaagaggaaatgagtttgcaggtcaagtaaactttggtctgagaattactttagtatctggaaagaatgagtgcaagt

SEQ ID NO: 81421 - DNA, 1045 bp, Homo sapiens
gggggcggggagagaacgcagtgacgtctggccgcgtgcgcatgtcgggcgctttctcctccccctacccagggagccgcacgccgaggggaaaaggaagggaactctagttgggactttccggtgggcggcttctttcctggacgcgtttgctcctggcagtcttgtccgcccttgcctgtagcggtccgcaccctgtagtgtgttcttttgcccatttccgggaatggtttatcctctttgagaagcggctgcttttggagaaaaagtgcaggcactatttataaattttaaaggcactatttggaaatcttaaaatagaaaatttgcccagttttacattttcccttttcataccttagcgtcccttctccccgcccccgttcagtgtgaagagatgagtgggtttaattttgttacaattgaccaaaacgtttgagtgtcagaggcggatacttttattttagtgaaaacctcttgacgggtgttaacagctgtttaatacatggctcataaacaaagggaagattatttgaacttgtccccatgcgtttttacttggtaccgtacattttctcagttggcatttgatggagaaaaactcaggtcagtatgtgctaagtactatatatttaagattcacagtgggatagtttagtagaaaatagaaaatttcacgttcaataacattaaaaagtggcagaatacagcgttaggcaaccattactatgtaagtaaatgtcagaaaactactcttttaagtgttaatagcacttgctaatgcagggtgactgacagcttggctgatagtggggtcacttggccaaatcttcgcaattatcttccctaggcctccatttcgggaattctgagtcccggtaaacggttgggtttatgctcactgatttgccttgtttggaaacctttacaaggatttctggttaaaacttcatcgttcagcaacgatgtcttaataattaaattacacatactgaatttaagcaagcaagaaattcagtggatttatctactgtggacaaagttt

SEQ ID NO: 81422 - DNA, 1782 bp, Homo sapiens
tatttgagccctgattatgaagtgagggacaaggcttttctttttgaaataaatgatggaggacatagatatgtggtagccattcatgctacataatttagcattttattgttaatatgtttggttatgggtcttcttgtttggtatttcaacatgttctggactggatatcatactgaaaagtatttcagttctcattactgagtccctgtagtttggggaaaatgtgatcactgatcttgaaggagagaatgtttcagaagcatccggctaaggcaggattgtagagatagtcttgattttatactttggatttaattctgatgagtcattttgtcacttgtgtatgcttaactgttacctctgtgcctggcaagagctaggtatgagttcagcttttactttagtcctgaaaatttttgttcccagtttaggccagtgaagaagcacttatgattggacttgtaattttctcattttaaaaatgtagataatggtcatcttcattgggtcatgaagattaaataatatagtgcccataaaatgcttagcaaagagcccatcacattaaaagtgctcaataaatgtaagcttttagtaaggttattttattcttactgtttgtttcatcttactttcttgcacccctccttcatatcctaagttcttcttcaggagctaggttggccctgaggaactcgctggttgtcttggcctaccaggagagtttgtttaggccagttacaggagagatttgtgagaatgattttaggaggcaagtcctcatttagtcagcttgggtgcgttttacagttcatcctctcttagaattttttttttttttttttttttttgagaagagccagccttttgagagagcatatgactcttcctggactacaacagcttcttgtgtgaatcacagcccggcttttgccagttagtctgagtagataactacccacccccactcccccaagctgataattattaccctggtttatcctctgtctcatttcccctctcaagctgttagagaatgaatactgaatactgtggtgcactgctccatggatataaatgtaacagcagtaatatttacaaccaatgtctaattggctgtagcttgctttcagtgttcagtctaaaccataggactatatatttgtcttagcataatgccgaacatgcaagtctgcttaaactatagtcttaagatttgtgtgttttgggtttcctctacttcctctatttcctgtcttttttgggttataggtcagatgggttctactttttattcccatttcagactgtggagagcttctaaaaataccagtgtccatccctgcccctaggatctagttaatttttaaaagctctctgtgtttcaaatttgcatgtgtttctgtatgtttgcagtatctccgtgtgttttcaaatcttctgatggagcacttcgtgtactttaacccttggtctttccattgcctgtcccatttttaaattccctttttagtcttaatagctgcttgagttaggacctctggaagcaaaagtgggataggatgctgacggggaattgtaggcttgatggaagaggatgtttctatattaaatgtcatggcagatccagttctaggcatacctttaaaatgtatacacaggctgggcgtggtagctcactcctgtaatcccagcagtttgggaggcccaggcaggcggatcacttgaggtagggagttcgagaacagcctggccaacatggtgaaaccctgtctctac

SEQ ID NO: 81423 - DNA, 1020 bp, Homo sapiens
ggattcaaacagtggcagtttgactccagcattgattaagcatcttgtgaaaagttgctgtcaaattaatgggtaagaggaaacttagccgggtgtagtggttgattcttgtaatcccagcactttcggaggctgaggctggcagatcacttgaggccaggagttcgagaccagcctggccaacatggtgaaaccctgtgtctactaaaaatacaaaaattagctggatgtggtggtgcactcctgtaataccggctattagggaggctgaggcagagacgcttgaacctgggaggcggaagttgcagtgagctcagatcgcaccactccactctagcctgggcagcagagtgagactgtgtccccccaacccctgcccaagaaaaaatcaacatcaacaaaaaaagaggaaactaatgtatatgagactgcggaaaatagtaaaaatcttgcataattctgtagtttgcttctttttaaacactttgcattttaaagaagcagactcaaaatcacagtgcactgtgggtgtgattgatgccagtcacacattctgctgttcaaaaggccatgactctacatcaaaagattctagttaaaatgttgccctgaagtgatgctcatggggatagtataagaaacaaatgtgcaaagatgggtagatgggaggtactggaggcctcggaacttcacctttgtgcagtttgtcgtccattggcacacatgaactttggatttggccacacgttttgaagatttgtgctttgcttcaagtttgtttttttttgttcgaaacttagttcccagacaggttttgcatgagaatcacttggagaattttaaaagccaagctccctgtctgattggatttgggagccatgtagtaggtttgaggaattgtccaaagctctgggtgggtctgtggcatagctaggcttgagaactgttgtgtttatctgccgtctcggggaatagttcttgagtgtgttgtgtgttgacaatcttgaggcggagtctcgc

SEQ ID NO: 81424 - DNA, 1028 bp, Homo sapiens
ctctagtgggtagaggccagagatgctccccaacatccaagagtgtgtatgagacagctccccacaataacaaattatccagcctcaggcatctataatgccaccactaggctgggcacggcggttcacgcctgtaatcccagcactttgggaggctgaggtgggatcccttgagctaggagttcgagaccagcttgggcaatttagggagatgccatttctacaaaaaatgtaaaaattagccgggtgtggcagtatgcacctatagtcccagctatttggaaggctgaggtgggaggattgcttgagtccaagagcttgcggctgcagtgagctgtgatcacattacgtgcactccatcctgggcaactgagcaagaccctatccaaaaaaaacaaaaaccctatgattgagaaaccgtgcttgccttggtaaatgttggttgttagtaataaagttgagtccctttgcggtttcttctctggcctgatccagggacccctcttactcccatgacgttatgggcatacgtttcacatttattattgggattggtaatcagatcttttaatctcctttgaactttgggagttgctgaaagcaccatatattttataaaagtctaaagtttataacctaaacaatagctaactaaagacaagactcacagggctgaaaggaactcttggtcaaattggtccatctgtccttagggctttaatgggtgtaaatacattgcccgaggtggttaagtattcttttgttaatgaattctggggagaactccccttgtaactgcttttcacagcttggttatttacaaagacttttgattttacctgaatagaaagcttcttttgtcttttgtgtattagcacattgccagatcctgattaggtaggtatttgtgaagtgccttaactaatttgtaccttaaccaggcttcttgctagaatacatgtttctctaatgtatgcctgggtgctaatagtttggtgctatggaaactacttatatttggttattgg

SEQ ID NO: 81425 - DNA, 1086 bp, Homo sapiens
accgcgcccggcctgcttggtttggttttgttctgtgttttgtttttttcttgttgagaggggaatgatacttaacagataagacttcgtggattcatatatatctggtttcaaatcttactgtgttaactaggtgtgagagttaaatacttatgagcctcagttcagcctcatttgaatgaaggggacagtaatatccatgttcagagtttctgtcaagagcctgtccatagaaataacctgttctgtagcatcatgtaaacattcaggaaagggtagctattggggattttgagaatggtagcaataacgttatttggaatgtaaaagtataaatgtgaatttgaagattttggtcttatattactaaaattactatctgcaaatgttttaccatgagaatttttttttaagcagattcatgtgtcagttcttaaatatttttaaatctctctctctctcaaaataagtcactcagcctctgaagaagcttcgggttcagactcaggcagtcagtcggaaagtgagcagggaagtgatccaggaagtggacatggcagcgagtcgaacagcagctctgaatcttctgagagtcagtcggaatctgagagcgaatcagcaggttccaaatcccagccagtcctcccagaagccaaagagaagccagcctctaagaaggaacggatagctgatgtgaagaaggtatctactttgccctgcagtacaaatgtgctgctagcctaggacaagctagcagacctttgttgttcatgaaaactcattagtatatcttgatgatgaaacctacagccattttttctagtaatatacagtagtatatctgaggatacaaatgaagacttctttctgctctattaaggaaaataaatgacctgaaccatccaattatagggaggaaagacaaatttttatacgcttggtttttaactttatttatttatttttgcaacagagtcttgctctgttgcccagcctggagtgcgcagtggcacgatcttggctcactgcaatctccgcctcccaggttcaagtgattctcctgcctcagtcacccaagtagttgag

SEQ ID NO: 81426 - DNA, 1017 bp, Homo sapiens
actcatgtaagagtactcagtagtgagtaactccacatagtagatttttcatggaggagttgacttagatatcggctctcaaaaggacaaataagaacacaagataattttaggatgtaaacattataatatatgctgtaataaagtcataatagttgagctagaatgcctggctggtatcttgaagtgataaaactagttgatgtagtaacactgaaatgattttgccctcccagttaataagggctccataaaaacctgtgttgagtaaaaactttcatagctctagcagagggccaggtgtgggcatggatagacaggctagagtaaagcgcactttccctccttcctttctctgccaggttttttcagagtgttttatgtttactgcctctacctatatttcctaccatttggttattcctaactccttctgtttggaccttttgtcctttaactccaaggtgatgctaaggccgttacagaatctgtggactttgggttatgtgattacattggattctagttgtaaaatgcctattctgggccatcttttcttttgaagccttgattttcttcagcttacttcatcatttttatgttgttgttgttgttgttaaagtcattgttgataatgtcctttcttagtgacattgttggatcatttttcataaagatgagacagggtcttgctctgtcccccaggctggagtgcagtggtgcaatcacagctcactgcagccttgatcttctgggttcaagtgatcctcccacctcagcctcccaagtagctgggactacaggcacgtattgacacacctgtctaatttttaaattttgttgtagagacaggatctccctacgtagcccaggctgatcttgagctcctgaactcaagccattcttctgcctggacctcccagggtggtgggattacatgcctggccctacacttttaaatacaaacatttcacaagtctcagctagtggcttcttttgtgcatgttctgaacctta

SEQ ID NO: 81427 - DNA, 1892 bp, Homo sapiens
tttagtggaagcagccgctgtcttacctttctgtattattcagctgtatattttaatgatgggtaagcggtgtaccatatagatttatagctgttaagtaatgaagacattgttaaactaatatttcctaggataatatgcctattttaaaaaaaatggcgctttattgtctcataaatagaactagcaaaacaacccttttgatacttggttacttgaattctcttcaattgcaataaacgtttgataataataatgggggtcaagaaaaaagattaatgcgtggtctcttaattttacagatgtgggaagaatatcctgatgtttatggggtcaggcggtcaaaccgaagcagacaagaaccatcgcgatttaatattaaggaagaggtaaggaaaaaatgttttaagggcatgcatttaaactccctatcttacttcattctttctgactctggtatgtattaccattaaaaagactgaacttcaggcatgagggttaagtgactctaatatgagctatctatgaccagatacagtaaggcaagaagttaataatcaaataaaagaatctaaccagaaagatcatataatagtgaattttttagtagagtattatacagaactgacctcaaaatggtttattttttaagttgtctctcatagtgaaaattgattatatatagcaagaagtttacctttttaagcccctaacttctaaatctcctagatatttattaaatgggtaacttgtttggtaaacaaacagagcaatagaaatagtttgggatttattcctgaaagaggagggagtgcttaattaatgtatctacttttatttaacttcttaaatttggtttccttgctcatttttagtgtgagatataataaaatgagtttcaaacatacttactctaattgtgagagattgatcagtgatttttttaaattggtattctataccaggcttggttgtctatagaatcagacttctttcacctttctcattttgtgtgatatttttgtggattcttattctgaattaggtttatagactagatcctgaagagagattcttttgtctcaatgaaatgtctactttctgctttcttgggaggactttgctagtcttagctatataacgtacttctgatgaaagttaaatattgatagccacaggtcagtgagttgggtgtgggtttttaaataaatgtaccttaaaaatctaattcaccctaacatctgcattacatttgtgatgttttattttgagtgacctctgagctgttttgcctttgcttttgttttccatagtgtctcgcactaggttactgagccatgtttgttaaaaccaatcacatagttgtagaaatctttccctcttttacatattaattaacacattctctgtagggtacaagattaacagcaataggaatagtttgccattttccttaattgtggagagaaagagctactgaaatgtctgtgactgtaagctttccttggcctagtgctgttagcagagcactgttggctcatgagtgaacatactcttaaatgagtctaaaatgaatacatcagtagttggtgcctttaaggcacactgactaaatgttgtggcatttttatttgatagtctcaatctgcagtatccagtatggtccccactactcacatgtggcttttaaaattcgcattagttaaaaataaaacttccatttctcagtcacaccagtcacattttaagcgcttggtagtcacatgtggctgatgggtactgtattggacattgtagatacaggacatttacatcgttgcagaaagttattggatattgctgttctggaagtcaagctgagataaatatttcctggctttagagataactca

SEQ ID NO: 81428 - DNA, 2639 bp, Homo sapiens
atctaactggaaaactctagcctcaacacatccattctctgtgtttgctgtctgctatacttatagaagtggacctcattggtggccctggtttaggttctcaattcctgggggagatatggtaattagaatttattggtgaatctttcttatctgaaggactagctgttcatattccttcaagcatgcttctacttctctccagtttgactgtgtaagccccctctgaggggtaaactgttgtggacttggtctgagggagactgcagactcatgctggtctcccacttactgtaaacatcttcctttcttccttcctggtgatcaccttatattccttggattcttagcaaacatttattgtactatgctccggggaagcagaattagaccagtgtccagagtgtatatacgaaggtctttgttttaaagagactgaaggatattaggcaatactaacaggcctttctgtcttaccagaagcacccctacccgtctgactgatagactaattgcgcattctttcattgatttttttttttttaacctaacaaagaaacatctccatttgcctgactttggctaaactctggtacaaagacgaacaaaaagtcttggtgtacaaggacccatctactggggaaatgcatatggaaacacgcagtgctagtagaagttgaataatattcataaaattgctccactgaccgtccgtggaaggcctgaattgttgttttttccccctaaggtctccaccaattcaggtttagggtgaccgttgtagcttttaggaaggttctcaatctgcacatcagccacctcctttcaataagctttcaccattacttgacctgttctcccatgaagaatattgatttgacatttgtcttgttgtagctgttgtctttagtatgacctcattccctataaagtgacccataggcaaattggtaattgtttgatttacagagaagccccaggcacttgcctgtcagttttttcctaggtatttcatgcctagcagctattacatgtttcttccctcttctctgtaggtgagaaatgagtggggtccctgcaatatcttgttggattttcaagtaaactaaaactgtttgggatagtaggacgcctgtaggttatggctctttcaagccttctaagaattcaaggagcaaaggaacatctactgtatctaataattattaaaaactacatctttagctgaacagattagttatatgataggtttattgttgaaaaataattttagggactgtttccttaaatgtattctagagacttaaaatatctagtatagtggttctcagagtttctacccagtatcagcattacttgaatttgttgaaattcatattttttaggcctcaactgagacctactgcatcaggagctctgactagggcccagaaatctttttttttttgatggaggaggggcagataggggcagggtttcactcttaaccgcctagggtggagtacagtggcaaaatcacagctgactgcaacctcaaactcctgggttcaagtgatccttccgcctcctcagcctccttagtaactaggactgtagacatgctccaccaggcctggctcaattttaaaattttaactttaatttttctggagaggtgtcttgtattgctcagcttggtcttgagctcctggactcaagtgaaactcccaccttggcctcccaaagtgctgagattacaggcatggaccatctcacttggcccagaaatcttttttaacaagccctttaggtggtcctgataacattttaaaattttggaagcactgatcttgtgcatgttatggtttcaatcttgtcaataagagtagtaaatgaaaaaagtacatatatatccatttttatttatttttgttactggagataaaataggaatcgatattatgtagtccaggaaggatcacaattcaagtttaaatggagctagaatctcttttagcatgtctaaaatgtgcatgttctgccctttggatagtaaaattgaaattggttttgtcggattatttatcttgaaggattcttttagaaaaaaattactttgttttgcttttgatcacagagaaaaatggaaacaggaaccctcagaagatgaacaggaacaaggcaccagtgcagagagtgagccagaacaaaaaaaagtaaaagccagaagacctgtccccagaaggtgcactgtttgcttaagatctctacttgggatgagcttaatctgctgtagattgggaaggataatgtcgtgctgaaatgagagctttaatgagatgcattgtgttttgattctgcgttttagatatctgtggttcactttcagccagcctacattgcaggtcttactgcttctttcttcgcagactggctatcgtggggcaaacatgtcttccgcttttagtaaaactccttatatgtttggccagggtacagtctctttttgggagaacaaattgtttaaaacactgtttgcctggcttaaagcatacttgagtggtttattaccttgttcataaaatctatataacattaaacaaataatctgattgtgtagagaaggaggtaggctgaaatagcagcaaattatgctaatt

SEQ ID NO: 81429 - DNA, 1386 bp, Homo sapiens
tattatgcctgtttaggtgtatatcaataggattaattcctacaagtaaaactgttaattcctacaagtaaaatagtttgatagctatttccagtttgcccaccaaagagatactatcatgaacaacatgctgtgtatgtgtttttatatcaggtaatcctgatgaacatttgtgaaacattcacgttctttcccataaatgattgaggattatcagcattagaatgaccttcctgttggaaatccagatttctagtgaattagaatttcagggagtagggcccaagaatatgcatgtttaacattccccaagtgaaatgttacattctgatgtatgaaccactgctctgggaaatactgttatataaagtagacaccaaatgataaagtgaagacttagccttttgtttctcttctcattttagaacagtgcccaaacctcgtgttaaaaagcagccgaagactcagcgtggaaagagaaaaaagcaagattcttctgatgaggatgatgatgatgacgaagctcccaaaaggcagactcgtcgaagagcggctaaaaacgttaggtaagttgtaccccagaagtgtttcactggtgtgatgtgataaagtagttggttagattttggttctcataagtccggggttgtgcacttaatagataaaaataacagcctatgtcctgaagttgttttcagaaatctggttagctttcttgcaaaaagagtggtattgagccaaggggaataggaaaagagtagcaatagctcatttgaagccttcattcctaaaaaacaccacaagttcgtgtcctgtccaatggtgacttagtggcattatcttcatttcataacatttttttccattaaagatatttggattatattcctacttctgaattgctctttgaatcacagacgtttttctgaggttcagcttaacgtattgctacttgaatctgattttatcaagtactaataggatatgaagcattaataggaattatcattagtgaaataggccaggctcagtggctcatgcctgtaattccaacactttgggaggccgaggcaggcagattgcttgagcccaggggtttgagaccagcctagacaacagggcgagaccctgtctctacaaaaaataagaaaaagccgagtgtggtggcggcatgcacctgcagtcccagctacttgggaggctgaggtgggagaatcctgggagatggaggttgcagtgagttgagatcacgccactgcactccactccaggcaaaaaagctagatcctgtctcaaaaagaaaaaggaaaatgaaataaaggaacagatatatgcaaacactagtagtttactttatagaaatcaagtatttttttttttagattt

SEQ ID NO: 81430 - DNA, 2698 bp, Homo sapiens
tttgtgttgaagcttccagcagtctgggaatacttaaatttcatattcttattactgggagacaacatacagggttgacatttttaattttagaaatattgcttctctttttgcctgatgaaatagtagcaaattttttcttccattatggtttttctttttttgtgtggtagtctacttgtttacataataatctgatactaaaaaatgaaaaaaatagaagtgtccttatagttttctatatcttgcttatacaaatcagtataaatatagaatttttattttcaaattgagttagactccctacagttgtttaggagcattcatcagcactttaggaaaaaaaagtaagctttgagcctactgtaaatggcagatctataaaacaacatgcttttggaaccaaaagggtatggtttcttattctagtgacggttatgtgtggcagtttaattctgaagagatcatttctcatttattcagcattattcctcttgcagttacaaagaagatgatgactttgagactgactcagatgatctcattgaaatgactggagaaggagttgatgaacagcaagataatagtgaaactattgaaaaggtcttagattcaagactgggaaagaaaggaggtatgtgtatttggggagcaaattacattttatgtatgcttagtaagacttagattttaggtattttaactctaatgtgatgaattttagtctactgctgtatttgttgtgatatgtagaagtctttctgacccagtgtttcagagctgaggacaaaggtatgtgtacactatgtctttaagattttaaattaagctagtatagataagtgtcaatgttttataaagcagtgatatagcagagatacctgctaattaacattaagcaaatccacctttggttatttgtttcttaagctccttgtgaaaatatcaaactggttaaataaatattgtggtaatattgaagatttttaaatatctaatttagatatctcataactaagttgcattaaagtaaactttctgtaaaggaaataccaaaataatacttaatgctttttcttttggcttttttttttttttctttttttcattctggcttcgattgaggttaagaaagttaaccggggacttcgagtaggggaggttggaggaggatattttggtgttctatccttagtcttggagagagggatttgttttccgagttagtaagggaccaaaacaaaaggatgttgctgctctgtttttattgtttttgaataagggatttctttgatttcacctgcaaatttaggaatatgtaaaaagtggtttacatttttaaaatacttgaaatttttgattgagtccgttctgtgttgtttgtgagtttgtacttatttcaagttgaagtattttggtgcttcatccacaaagggagtcttcagataattgcattcttgggaagctttttaatatctggtgtaatatactctctttcaagtgtacttaatccttttgcagccactggagcatctactactgtatatgcgattgaagctaatggcgaccctagtggtgactttgacactgaaaaggatgaaggtgaaatccagtacctcatcaagtggaagggttggtcttacatccacagcacatgggagagtgaagaatccttacagcaacagaaagtgaagggcctaaaaaaactagagaacttcaagaaaaaagaggacgaaatcaaacaatggtatattttccatcatggattaaagaaatgtatttgcagcctgaaagaagggaaggttttaaaataatgcatggagatcacagctatctagaatctcagattttgctttgatcatctaaacatggagccatttacaattctattttataagattgtgaccttcagatactatatttttatatgtggctaccaagtttttggagttaactagcttatggagcgttattcacacattctttagttttcacaataagtgcatgagatttgtactgttattacccattttgtagatggggagaatacggcacacagcaattctgcaagtggactcaggttttgaattctgatgccctgaatccagagcttattctcttaagcaccttgttattttcctgtagttaggctggggtggcttagatgtagagagttaatattctggaactctctgggttatgatatacttaaaacaaattctggttttatacaatttgcagaaatgatgtgaaggaaattattaggttaactactgaaactgtgatagtcctcgtgtgtttagtttacttacagccttgaatgtctgggtgttgtatatgggaaatatgtggagctatagcacacaaaaacctaaactgggtaataatggtatcaagctcagcctgaagacatacctgtctgtgtggtgtgattagcctatttttgtgtctggaatgtgcatagatttttgtgtctggaatgtggacagtaattctggttttactactgtgcaaaatgtgctactttagtaaattacatgttttttctttgactcaaaactgaaaatatgtaccccttagatggtgaggtaggcttgtaaagcagttagaaatttgaaatcctctgaaatataataattctaatattaagttgctgctgttgtcatctgaaaggttttggtaataagaataactagtt

SEQ ID NO: 81431 - DNA, 1068 bp, Homo sapiens
agatacatccctgaatgaatttctcctgtaaattcacgctatggacacacatttcagactttgaaaagtcatgagtaaagaaattgtataactttttgatcggttgtttcctaaactgatttggccacagaatccacattttatgcaaaccatagagactgacctcactagaatgctatcctttaagcttctgggggtgaaaacaaccttcccttcagaagcttgtttctgaagggaaaaccaaattcacgcaattaaagggtttaaggtagatgggcggcatttctgaatttacaaatcctgttatggtgaagatcaactgtatttagcatatgacagctggaggcaatgttttgtactctttagaatcagataacagaaagatagttgtttctgaaaaataggagactctgactgccatataatagacaagacctaaagtgctatttaatgatgttcatagatttatttcaggaaaggggcaagttaactaaaaatattttatttgaggatgaactaactctggcttatggaatattaaccatgaagaaaggggtgatggagtgaggtggtgattcacacacatgaaatttaagtttttggccaggcgcggtggctcacgcctgtaatcccagcactctgggaggccgaggtgggcagatcacgaggtcaggagatcgagaccatcctggctagcatggtgaaaccccatctctactaaaaatacaaaaatagccaggcgtgggtggtggcgggcgcctgtatgtagtcccagctacttgggaggctgaggcaggagaatggcgtgaacccgggaggcagagcttgcagtgagccgagattgggccactgcactccagcctgggtgacagagcaagactccgtctcaaaaaaagaaatttgagtttttatgctttgatgccgaatatgtgaattgtggctagcgttttaacatagtagcagtaagaacattttctcagacttgggcttttgtttttcaggccctgaagcagagaccacgatttgtagctttaaagaaacaacctgcatatttaggaggggagaatc

SEQ ID NO: 81432 - DNA, 1808 bp, Homo sapiens
atggcattttctaggggcaggaaatactggagaaacttaactgtgcttcctcctgaatagtattgaaaagtgagggaaataagaaggaaattactcaaaggaatatactacatcgtttaaactgtgtagaaaattaggtgtacctgagatgtataggggtatggcttcatcattctccctttcccaagtgtgatcttctttgtttctgtattttaccctttaaactagctagtttgtagaacacagaaggtatttttagaaattatgtctttttggtgaattaaatgtcttgttttttgaatcagttaggttgcctttaactcataaattacttttagttctttctgatttgctgattaagcacatattatatatacgtgcaaactttcagtgtccttattttccagaacctttttataatgtttgcaatctgatgtcttacatgtaatcctaatttcctgccaaaatgactgtattctgtttcccaaatatattttcctaactctggctgtttcttcaattttaaatgtttttcttagatattctttttccattaatatcctgttgaaatctagcccattttgtagagtagtgtttctcaaactgtggttttaaggtagtgcttcccaacctttttggcactagggactggtttcgtggaagacaatttttccacaggctggggaggagggagggggatggtttctggatgattcaagcacattacatttattgtgcactttatttctattattattacattatactatataatgtagaatcagtgggagccctgagtttgtttttctgcaactggacggtcccatctgggggtgatgggagacagcaacagatcaccaggcattaggttctcataaggagtgtgcaacgtagatccctcacatgtgtagttcatagtggggttcatgctcctatgagaatctaatgccgttgctgatctgacaggaggcggagctcaggcactaatgccagcaatggggagcggctgaaaatacatatgaagcttccctccctcacccgctgctcaccttctgctgtgcagctgggttcccgagtggggaatcctggtctggtctaaggaatacctgagtcagaatctccaaaggtgtttgtcagcccttttccatatattgtttagtatatctagggtggggtccacaagtatgatctgtagcctacccctgctttagaccaaagtgtatttaaaacaagccccatgcacctatacatgtaggtctaggaaatagtgtgggtggcattaaacaacccagtggcctgcagtggaatggggtgggccagccacaggattcaccagcggtgctgatagctttctctattgatggagtctaaggttacatgcttgtcttcactttttacaaagcctgtcttctctgtgataaaagatagcctatggaaggtgatgtgaaaagcctaaaggtaaagagtctgacaaggctgtcatagtaatccaagtctaggtaggccacttgttattctgctttttatggtttctactttcttccttatgttgaaagctgaagtaattgcagatgagaagaaatacatttgaggcttatgaatgacaccttgcttggctgttattgtgaagcattggtgtcgttgctgtttatgcacattctgtgttttggtgaactaatgatttttttgtttttatttattttttctttctgcagaaataatagtgtaatccttgctgatgaaatgggcctaggaaagaccatccagaccatatcattcctctcctacctgttccaccaacaccagct

SEQ ID NO: 81433 - DNA, 1052 bp, Homo sapiens
ttagctgggttgcaatattaaatttttcttctctctgccctttttacttctaagattgctttatatgagataatatggagttaatactttgtgtaatattaatattatttttgctttctcaatagacatattactgaaaataatcattcttcgaatttcttaatttcttaaacagtgaggttgcataacttataaaaaaggaataaaagtaaaggaaaacaagctattttaggactgtagaaataagaattatcctaaactgttaccaaactttatttgggcatcatgaatttagaacacagtgacttaagtttatctttgtttagcagatcttttctttatagtaactttttttaaagcacctactgtgtgctagatgttgcgctgggtgctttacgtataatacctgtaatcttcatgatagtcttcaaagctgatggcattctttcctgctactgatgaagaattgactcagagagtcttaacacgcgaccctagcgagcaagaatgtggcagagctcagattcggacacaggtgtttctatctagtctagagctttgctctttcatcactgtatataaactatttctgggaaattgcttgtaataagagcaagccattagcaatgtttaaatatttgagttgcatgttgtaaccatatattttcatacaaattcaaatttatttttggtaaatactttcattaaaattgtgtaacttaaacactggctgatttcattggcctaattttgagtttctaagaatatagttttagctttgttaaatcattagttaaccgttaaagacgaaaaaagagaaatttataggtttacaaaatagcgtaaagcactacattccaaaaatgattgcaaacaaagaaaatgaactctaaaaaattgtagtcagagaagttttccttgctatctccagttctccttttctttgttctttttacccccacttgggggcgatcacctgcaggcacttactgtcttgttctccagttcctaacttgacagccaaactgcaagagcgttgtcatgagtcttcg

SEQ ID NO: 81434 - DNA, 1782 bp, Homo sapiens
ccgcctttctgctaagaaatatatgtggtaggtagatcccattggtattaagtgcaaacaagttgagtttggtggctcttggtgtttgtgtgcttcagggttggggtggagaataggcaagagaaggaccataattaaggggagaatacagaatcatatggtttttttgttttatttttgcccagcatagcaatttttgtgttcttgctgtggggcatgcagtaatagctggtataagaggcccacctataccttttagatgatgatactctcttttgaatagctaccaatctggcaactaacagaataaacagaagaggcctaatatatattgtcagtgaagaataaatgtgtcaatttatacctttgtaatggtatttatacagagataattaacacttgaaagcacttgtgggttcccttctgacctggtggctcgttctgttttgtttttactttagactgtgctgggcagtattaactgggcctttctgggagtggatgaagcccatcggttgaagaatgatgactctttattgtataaaactctgattgatttcaagtccaaccataggctcctgattacggggacccctcttcagaattccctcaaagagctctggtccttgctgcactttattatgccggagaagtaagctccttcctgtgtatttcaaaagatgctagaatgtctgaaatgccaatgctttttaactttcttagtagaccttagggaaaacagatggcatggtttggggaaagcaaagcgtcaaatggaggcagggatggcggtagtaaaatgtttcataatcaatgaaagaaggcacagaaattagcctgttaaggaggaaagcagtattgtctgctgaaaggctgaattagttaatgcacttgggaaataattgttaaatagataacatcagaccttttcactgttggtataagataatcaatataagtaaaatgaaatatacaaggtacacaagcactgaaaagtatgttatactcaaatatctgataaccgaagcatcaattttacatcttattcacgtattattaaagaactatggaatgtgtttattgaaaagatttttatgggagagatgatatgcacatttcataaaacttaaaattatccaatggtattcagcgatacttagaataacatctatattcattaatttggaggactccactcagtctggccccttgacaatagtctgattcctctcatccactttctccattactcattatgcttcagccattctggctatctttctgtcccttaaacatgccaagccattactattccttcttgactagaattatatttcttcttgtcttcacatggccaaccaccttaatgtttcagctcatcttaaacgaccacctcctttcagaaatcttttgcagattgcctaacctaaagtagccctttagacatcttatccctaacctgttttagtgtctatatagcatctctttttacatttatgttctcattcatctcatgtcattaaattatgtatgaaaatcgcagggattttgtttgcttgattcattgctggttcccattgtctagaatagcacctggtgcacagtaaacaattcagttaatagttgttcagttgatagatatatgctctacaatctttttttttttaattcaggattaaattttattttttacttttatttttatttttaaattttaaatttaaatttgtttagtaactttatagtttgcaaccatcatcattgtccagttttggaacattt

SEQ ID NO: 81435 - DNA, 2995 bp, Homo sapiens
ttttactcagtgggtgttcaggtgataaaggttccaagtctgctgttctattctgagtgtagctgatcttcctatcttacagttttcttgtggtttatttttacagcgtctggatggttccatcaagggagaaatccgaaaacaggcactggaccacttcaatgcagatgggtctgaggtatactatgcatggctttgttatttgagcaacttgggctctgcatcaaggggaaagtctctctcgcttaatgtattctgtttcagaaacaatttatagtgcaattcttttgccttgagaagaaaatgagaaatctctcatataaaagatggtgttttgttgtcactccagaaaaataaatatgtgcttatttatctcccctgttctgggttgacaacagagtggttctcctggtagcttccagataccaaatccttgggcgtggaagagcagtaaggcaggagtaggggagagttgggcaatagaattaatataagaaggttctgatctctgtactcttttggtgactaagtcctgaaaaatatatttgccatgtctcaaatttgttggacttctgatacagtgtggcttaatgttcttgctctcgctaacagcaacattttacaatcagtgtcgagcttggatttggcattatgaagtattttgtttggggggcacatatagaagagctacttaggatgaaatagaaggtatgacaacattgtagtttgtgcatatcaaatcatcagatgccatgggatttgagagaagtgggagagaaaagttttggtgtgaataaaactgtaataatgtgtagagctaaaggaagcagtggagacaacctgaagtagaagtgtttcacagagaatgctaatttctggagcctgagccactacttttttttttttttaaacagatagaacagacttagctttctgaagagctttaaaaactcttgatgcctgtgcctgttactacagaatgctctgctgtctgcctttagagtgtagaaatcctagttagactagtattctggctacttctgtagtctaaacatttacttcttgaggggcttggggcattaatctattcagagccaaggctctcgttcattaaggataagaggaatggaataattaaagacatcggtcatcaactaattcccattcctcctttccttgctccttgtttcctcagctgtaaaatcacaatgattctgataccccacttcataatattgctctgaggattaaatttggtaatcaacataaagcactgatcacattgcccagtgcatagtaagcgctctaaatatctgctatttttatcatgtagtgttggttgaaattggttttgtgttctccactcttagtttaaaaaatagtatgagtcgaatgtttcatattgccctgtctcaggggaaaaaaaaaattgctttttgcatagctctcagttgattcccactcactatgatggctatatagaacacaagttctctaccatttctgcagtattttaaaaattcctttaaaaaactaaatatttattgtgggacaaaatattatatgcttacttagaatattgggaagatggtaaagaatacaaagaaaaaaacaattgtacccctcattctagacacaacttgctgttcacgtctttggggtgtatttccattcctactagatggaaccatttatatgtttacctaattcggatcatgttgcatacagttttgttcccttcaaaattatactttgaggctaggcgcgcatagtggctcacacctgtaatcttagcactttgggaggccaagatgggggaggatcacttgagaccaggagtttgagaccagcctggtcaacatagtgagacctgtctctaccaaaaaaaaaaaaaaaagtttccccatgttattaaagattttacaaaatttaatttctaggcccatagcaagaccctatctctacaaaaaattaaaaaatgagccgtgcatagtattgtgtgcttgtagttccagctgttcaggagacaggcaggaggatcccttgagaccaggagtttgaggctgcagtgagccaggattgccccactgcactccagcctgggtgacagaatgagaccctgtctcaaaaaaaaaaaaaaattttttttttaaatttctaaatttttcttatgcttgtaccatttatttatttaactaccttaccgttagtggcattgagttttataattttttaacctttttcaacttgatcatagatgcagacgacatattataatccacgttatccttgctaaagagtgatatagcagattgttggttgataggatctttttgactccagatttcatttgttttagatatctcatcttaaattgtccactgtttatctttagacttctctttggagtgtggtggtgcttaatatttctcttaagaatcacagattatgtgcctggacactcctgttgatcacttctttattggaattgtttaattaaaattcttgtgaagcagctgtctccatttttatttctatggcataatgttgttgaatgtgactattagaacatggagaccttttcattgcatctctatgtgtatgctaaatatacccatttatcaagatggaactcaggactaccagtttttcaatgctgcttctctctgctacaaaggcatcagcttttgacatatatgattaaattccctgaaaatagaaatatttcaccttttccccccggcttatatattttattctttttctcctgcccccatatttttctgagcactcagacgcaggcaggtgtgctgtgcttgcccagtgtctactgtcattgctgtggatactgcagtgtcagtgcctgggtggttccacacatcgctctccagccaaacctgttttgatttttttataattttggcatgttttgtggtaattgaggatcctgtggttctcaacacttaccatatatgatctctttagtgcagtgttt

SEQ ID NO: 81436 - DNA, 1768 bp, Homo sapiens
aattgtttgtctgtttttattattgttgctgttaacttcttgtatattagttgtagccgggaggtagcactaattctctcactcccattgccttattagagtctactctactcctgttcatggcactgactttgcctcttaatcaaatgaaaattcattctaccatcaagtccctgacattcttttagcctccataaagtttgtccatcatatctcacttttcttcacacctgcaggggtttccaggtgtaagggcttattggactgtgaaactgtttctgagaaggccactgcataaagtagtatattgcattgtgtacaggacttctgtttcctgctctcgacaagggctggtggcctgggaatcaatttggcttcagcggacacagtcgtcatctttgactctgactggaacccccagaatgacttgcaggcacaagcccgagcgcatagaattggtcaaaagaagcaggtcagtatggagaggcttctggaaattgctttagggttgggggccagggggcttgttcagccctttcaggatgttaataaaatgctttttccctgttttgcttttatttcccctgaagcattgatttctgtttgttaactagcacagagatgttgtctttgggcccaagatgaacctattaaggaacttttctttttctctgtttgaaaagtacaacatcagcgaccttctatgtgtttatcttgagagagatatatgatgaatagacttagaactgaacattttctctattttagtatggaaaagttaaatatcctattgttcaagatggtttgtttttattatacatgacagtgttagctttaaaggtactttggaaaaccacacacttttttgtttatgaatcttaaagtctgttctatattggataacccgtaagtttcattcttggccaaagattctgtttttgtggaactttccatcactgaagcacgatttttattgatggaacaggccataacgacagatctttagaggcaattttatttaagactgtaacctgctgcacatagtaaaagtattgcatctacttaagctgcctgcttggatggcttacagtcttctatggttagagaataaattctgttaaaattttcccctcttgggttttgacagagctaatccttctctctttttttgggggggttggggggtggttcaggcataagcataacagttccttttcctacaggtaaatatttaccgcttagttacaaaggggactgtggaggaggagatcatagaacgggccaaaaagaagatggtattagatcatctggtgattcagcgcatggacaccactggccggacgatcctggaaaacaactcaggaaggtccaagtaagtgccaggaagattgggaggtaggcagaatcaaattgattctacatcactgttggatataataggattttctaccacagacattagtctgttcattacctggaagatgccaggccagaaccacaaataggatagcattttcactttgagtttcttggttcctttttttgcccatcaccccccttcttatgtgttttcctctctttcttgccctctcccttacctttgcttttggctgctcatgtgacatatgacacagcaacagcagtggagttgtgtgttgggtgtcagcctagcataatgtcacctttgacttttctgcagtgagaatccagattggattggcagctgttttttttttttactattggcaaaaatgtttgtgtggagatt

SEQ ID NO: 81437 - DNA, 1099 bp, Homo sapiens
gaccgataataataataataatatcaaaataataatatcaatattatcaagataataatgatatcaaaataataataaaaataagtttacattttgagcagattgttgagtgtcttctgtggtggtgtttcagctatgttttttgtttgtttgtttgtttgtttttgagatggagtctcgctcggtcgcccaggttggagtgcgctggcacgatcttggctcattgcaacctctgtctcctaggttgaagtgattcttgtgcctcagcctcccgagtagctgggactacaggtgtgcaccaccacacctagctaattttttttttcttttttttttttttttttagtagagacagggtttttccatgttggccagactggtctcaaactcctgacctcaagtgataggcccacctcagcccctcaaagtgctgggattataggtgtgagccattgtgcccgctgcagctatgttaaaggtgtattcaaattagcccttcctaaataaaatgttttcagatagttttctgtttaagaggaagctagatgagaaaagcctagctcttttattttggaccggggttgagaaggttgaaaattcttggtgaattataactttctgagtaaaaggccaaaggaaagagctccattctataacattgctagtcacctttctggcttacccatgcaataggtgaaccagtaggactgtaactaattttctattctgctggtttagggttaccatcacagactcatcctgtagatagaaaatgcgatgtttgagaaatcatttttcttgaggcagagtttatattttcagcagttaacttgacctctttctgaaggatagttattctgaagtagaacactttagaggttatttgatgtttctaacaactacattttacttccacagctcaaatccttttaataaagaagagctgacagctattttgaaatttggagcagaggatctcttcaaagaactggaaggggaggaatcagaacctcaggtaattaacaatgaggagagggaaatttttttgagaagtatgatctgtgagagtctaacttttctgtaagaagattctgttaga

SEQ ID NO: 81438 - DNA, 1052 bp, Homo sapiens
actagctaccatttattgagcccttacaatgtgctaggcatacttctaagtgctttaacttactgaaaaccatctgttataggtactattgtcttcatttttcaaatgagaaaataaaggcacaaagagtaaaattacttgcccaaaggagtaaacatgaacctgttttataatgggatattgtaaaaatattcatatatttttaatccagttcacttatcgttatattacaatgtctctgaaagtatgactgtcctaagtgggtatttctccaagacctgtctccccttatttgtcaaaggaaaattgacttgtctgatatggtgagaagttctgaatactaaagaattaagatggccttctcttagtcctttcaccacttgaacttcgcacttgttacagtgtgactttgcctcgatctttctcaggctcagacaaatgacagtgactctgacactgagtctaagaggcaggcccagagatcctctgcttctgagagtgaaacggaagactctgatgatgacaagaagccaaagcgcagagggcgtccgaggagtgtgcggaaggacctcgtggagggatttactgatgcagagatccgaaggttggtggaggctctgttctcactgagcttgtttgaaagtgcgtactgtaagtcttgggttgactggatcctggacatcgtgacagggtaggcagaggctaatacctacaaaaaaggaaagagaagctgggtcctgtcccagatctgtaggatgatccttccttctccaaggtttctttctgttgagatcacttttatttgttgttcatctctctatttctctcttattctctggttattcagaacattttcacaaagttcagctcggggaaggagataattgacatacatgtatatacagacttatgtatctgtatataaaagaaatatcaaaaataaaaatggtacaaataagtctaccctcactacctctcccctccgccacaatcccacttccacctgtgttagtactgacatcagtttgctagtggtttgctttgatttataa

SEQ ID NO: 81439 - DNA, 1373 bp, Homo sapiens
aggccaaggtttgcagtgagccgagatggcaccactaaactccagcctgggtgacagagcaaaactctctaaaagaagaaggaaaaaaaaaaaaagatggtatcttaaaattttttaaaaatattttttctgccaatctcttttttttgattgcagtatttaatctatttacatttaatgcagttattataaagtaggaattatgtctgcattttgctatttgtcttctatatgtcatgttttttttgtttatttccccattactactttcctttgtgttaaatatataatataccattttaattaccttaaaaaaaaaactttttttttcacttattttcttagtggttgccctagaaattacaagtaacatcttagaacaatttactttgaattaacatcaatttaatttcaatggcattataaaaactttgccccagttatagctcaccatccccatttgtgctgttgtcgcacattacatctttacacattttaaacccatcaatgcagttttataattcatactttatatagttagttgtctcttttttttttttcttttgagacggagttttgctcttctcaccaaggctggggtacagtggtgcaatctcggcccactgcaacctccacttcccaggttcaagtgactgtcctgccttagcctcccaagtagctgagattactggctcctgccaccacgctggctaattatttttgtatttttagtagagatgggatttcaccatgttggccaggctggtcttgaacttctgacctcaggtgatcggtgtgcctcggcctcccaaagggctgggattagaagcgtgagccacccacacccagcctagttagttgtcttttaaaatcagatagaaggaaaagagttacaaaaatgcatgtatactgtttttatatttacttactctattattccatgggtgctcttatttcttcatgtgatttgagttactattttatgtcctttcatgtctgcccaaaggactctcttttagcattttattttgaggcaggtctgctaacaatggattctctattttggcttagctcgcactgttaatttcatcttcatttttgaaggaaagtcttaatttctttttttctgtttctcacgtgggataatctcaattggcctatcttcagatttggcagttctctcttcttcaggctaatatctgctgctgagcctcaccagtgattttttttttcatttccgttattgtagttttcaactctagaatttctatttcactctttaaaaaatgtccgtttttaaacagcatttctgtttctattgatatcattttcgacctttctttttaattctctaggcagactttttttaactc

SEQ ID NO: 81440 - DNA, 1073 bp, Homo sapiens
tgtaaatatttataatagctgattagcatccttgtcttataagcctacatgctagacttccttagggatggtttctattacctgctttttttcctatgtatacttcatacttcatactttttttttttttttttttttttgagatggagttttgctcctatcacccaggctggagtgcaatggcgcgattttggctcactgcaacctccgcctcctgggttcaagtgattctcctgcctcagcctcccgagtagctgggattacaggtgcccaccacaatgcccagctaatttttatatttttagtagagacagggtttcaccatgttggccaggctggtctcgaacgcctgacctcaggtgatccacccgcctcggcctcccaaagtgctcggattacaggcgtgagccaccatgcccagcttactttttggttttctatatgtcccgtaatttttcccgtgaaaaactggacattttaaatcatatggcaactctggaaatcagatctcccctcccagccatgtgttgtgtttgccgctgctgttgtatttgcttgtttagtgactttcctgtactagttatctgaagtctgtattctttgtcatgttatgtgatccttgtcatgctatgtgtagtctctactcctttagcttagtggtcagctaatgattgaacagagatttccttaaatgctttgagcctgtaagtctaccagcctttgttgaagggctgggtatgtgttgttggggcacgtttcaatgctctggaaggcaattgacaactctgccttaactttcagttcctgcttgcacagttgctcaaggtctttctcaggctcagacaaatgacagtgactctgacagtgagtccaagaggcaggcccagagatcctctgcttctgagagtgagacagaagagtctgatgatgacaagaagccaaagcgcagagggtgtcccaggagcgtgcggaaggaccctttgagatctttcctctgcatggacacagacctgcacatgtcagagcttttcagagtatctatcctatgaacatctttcctcccagtttttctt

SEQ ID NO: 81441 - DNA, 1198 bp, Homo sapiens
catctgtccttacatggttatataacccaattatcatagtaatttggcatattacatgatgcccttaatgtgtcatgaagtcctggtttttagtggaaagtactggtgaccagcctgtaggaatggggatgatggcatgagttggtatgtagcatagtttagggtagagacttgcaggaagatagattggatttttgggaggagaggtcagtagagtttccaaaattgtttgcctaagaagttttaaatcatattttactgtgccttattccaaaaactatttgagacagtcaaaaaaatcttaacagctgaaaaatcattggttttctaataacgaaaaatatggtattgaaggtaacagtggtgaactgaatacgctgatgaaacgatataagggtttgtcacaatagagtcgtgatgattgaatcctttatgacacagtgaagtctataaacttgtatcttctaaaaaggatattagagctaagtcacagttctctagcatgttatctaagcaggtttatgtacagtcactgagaataaagttgatctttaatttgaatagatttttagcagtcattattttaagttgactagtttcaaagacattcaacatttattcatttttttggtagtgcaaggattgagtccactctatttttgacaatttgcatggctcatatgtcatcacaggatatgctagcatcaacataactaaagtaagtctctgtttttttaatatgttttattgatcctattcttaggttcatcaaggcttataagaagtttggtctccctcttgaacggtaagttcagtgtaatagtcccttatcttcctcttttttgcttttattatatagtacgttcttttttggtaaatttttccatttaatactaatgctgggaacatttttttttctggaaacatttatttacaaacatttatatattgggtgcctgttcattcatgtctctctgcagagggatgacaaagatgataaagacaggccatccataaaaagactttcaccttcgtgagggagataaagcaagtatattcaaaaccatagtgcgtgaaataatttccagagagatgttcatgtaactccagttgaaaagaatgtatgtagttattatttgtatcctagttcttagatttaataatgtcaaaggtaaaaggctctttatgattttataat

SEQ ID NO: 81442 - DNA, 1052 bp, Homo sapiens
caattctttatgatggaaaatgaatgtgttagccttcagtcaatgtccaggggttcttgttggagccttagaatgaccactaaaggaacgcaaagaaaagtgtctttgcaggagaagattatgtgaggcctagtggcatctcatgacacttaagaagagtgggcacagggtcctaaagtgtccccatatttgttcctcctcaggctggagtgcatagcacgtgatgctgagctggtagataagtcggtggcagatctgaagcgcctgggtgaactgatccacaacagctgtgtgtcagcaatgcaggaatacgaagagcagctgaaagaaaatgccagcgagggtaagcgaagttggctttagtgagtcttcgcaacctggcactcttggactggatttctgttgctaaagggcgttttaaggacaggcttgaggaccacacatgcctagtgatttcaggtgtttattctgagctgcgtttctgtgagcttaatattctactctcctacaggtctactcacaaatgaagttgatttgcagaaggtgtagagtgaagaaaaagatgaaatggtttttttttgtgttgctgtagaaagtttaaattcgtcggagtgatgtaaaaacccaggggcagagcttggtggacacctctgtattttggctgcaaataagaggtgttatagatcacaagcattgttaattatcttggatatatattgtgcgttatggcaaacacaaaggatttagagaattaattggaataaataaaatattggatgagtatcgtaaacatttttgggttacgttgagattttcatgccactagaatttgttctcattggattggacatgcagtgtgttttctctttgataccagaaagtgattttgcctgtcctgtgtgatatctttaaaagcaagaggtataggaatgcttgtgaggagagaactctgaagtagttattggtaaggacaccctcatagtgaactttaaagaaacgaagagaggccaggcgcagtggctcacgcctgtaatcccagcagtttgggaggc

SEQ ID NO: 81443 - DNA, 3294 bp, Homo sapiens
aacacttgagagttttttgaccttcgctagtgggatgggtaggaaaacaaaaagagaaaccttcagcactaatattataccctcagaatctacttttgttcatttggaaacaaagtagtataaaacaagcaggaagattaaaatacaactataaacatcagtgaattaaaaaagaattccaaatcttaaaagactgaatgttcagaggttattttacagacattagttgagaaaaaaatttgtcttatagattatatcttcaaaataacaataagccagagatatattcagagagactaagaggtcagggttcgttgatacatgttttctgtggaacttctgcagattttcatttaactaatgtgaaactggtatttttcaggaaaaggaccagggaaaaggagaggtccaacaatcaagatatccggagttcaggttaatgtgaaatccattatccaacatgaagaggagtttgagatgctgcataaatctatccctgtggaccctgaagaaaaaaaaaagtgagtatattttgtgtacatgcttagatggtcgtaccgtaagaaaatagatttgaagttagactttgtgtagttccatagtatttttactgtctcttctttaacataccaaaaaggcccctcttctaatgtcttcctgtttttaaactttctttagatactgcttaacctgtcgtgtcaaagctgcacattttgatgtagagtggggggtggaagatgattctcgcctgttgctggggatttatgaacatggctatggaaactgggagttaattaaaacagacccagagcttaaattaactgacaaagtaagtaaccctaccatgctagagatttctagaagatttgttgtgtaatatttttatatcgattacttatttctaactattttcgagggggcatcaaattagaaattagtatagtcattcttggaaatacttccatctttagcagattgtggcactgtttcacggatgaagataaagggaaaagacagtagccaggtgaaattttggggaaactgtaggagaaatcttaaaattctggtatttaattataggtcagatttcattacaataaatacccaggtgagtttgttaatgataaaagcattccttggccttagttattggccctttgtttaaaagtacatttgaaacaaccatatttcacttcctcacgtaaagattgaatgtcaccttggtattctttgtaatggaattaaacattggctgttcttctcccacaaaatcgagcctcccaccctatctgttgcaagtagcaaggccatggttggagctataagcagggaaggctgactggctcaaattttggtaggatttgctccatgttgtgctcctggcagttcaacagtgctcatcccatctggttttaggagggtgacagcaccctgccttaagcactgagaccagattcagtctggcaagagacccagttgttgtagcaaggaacagatcatgtcctggcgtagctcagtgctctccggcaatgctctaagaagcattttcaatctaaaacgaagctttaacctagctccagggattccctgctcctggaaggaggaaatccacgacggctgggatgctctagcagatgaagccacaagcccctcctacctgagttgttctaccctgttaacagcacaggtaggagccattgggagagctggatttctccatcccattttgtaaaatgagaacggctcgtgagggattttcagtgactgggagccatggacatgagataggatctgaggctttatctatattttgggtggttggggagggaaaggactgtgctcagtttttgttgtctctgtttatcctgatccactaaccaggatgtgggtggtggcgggtgcttctcttcctttcttgttgaagattctgccggtggagacagataaaaagcctcaggggaagcagctacagacccgagcggattacttgttgaagctgctcagaaagggtctggagaagaagggggctgtgacaggtggggaagaggtgagtacgctgccagctggttgtttttcaggggcctgaggctcctaccctgcagaattaggtaggaagagagaggccctctctgagcactgcacagaatgtcaccttctcatgggcatattttgtttttgaggttccagtaatgatgctttgcttggtaataatagaaatgttcatttaggcctggcgcagtggctcatgcctgtaatcccagcactttgggaggctgaggcgggcggatcacaaggtcaggagattgagaccatcctggctaatatggtgaaaccccgtctctactaaaaatacaaaaaaattagccgggcgtggtggcacacgcctgtaatcccagctacttaggaggctgaggcaggagaatggtgtgaacccgggaggcggagcttgcagtgagccgagttcgggccactgcactccggcctgggcaacagagcgagactccgtctcaaaaaaaaaaaaaaaaaaaaaaaaaaaaaaaaaattcatttaagaccacggcatcttggcagctttcttacaaacccatccttctgaaatgttgcttcaaattcatcctctgctccccagtcccactattccacacatactgttactgtttctttatcctactttctcaattttggaacatagttgcagttactgcattgaatacctgtgggtttgcctgttgttctgtctgtctctgtggttcttgtaatagtggatcccagagataaaatggacagttgtaatgcacagttaattcagaaactagaccttacttgctgtgtgaaataccaactaaattctcagtgaactcagctgagctttatctccttttgtttccccaatttataatttcagttcaggcccagaaagatggaatcccagctaagaaatacaagttacaccctgtactagcagcccatgtgtgcatgttctttaagtgctcttgcagctatgtcatttatattgatttccctgtattattataagcaaagcaaatttgaggaaaaaaacccataataccacacctcatttttttcaagtaatagggtcataagtctcattcttcatataatatgttgagtatgcaatatattatgtgttaggctctggaaaggcagaggttagatcatgttacagatcatatctgattaggcagataaacagtattttaaccttttccttattatatgtaacttgctttcaggttttttaatgttactattatgtctttaatatattatctt

SEQ ID NO: 81444 - DNA, 1067 bp, Homo sapiens
gtcaaactcctgacctcaggtgacaggtctgcctcagcctcccaaagtgctggaattatgagcatgagccactgtgcctggccaatacatacgtacatttaaatactagcaacctaatcagttattagctgactttgtataggtatataatctctttggtactcagtttccatccgtgaaatgagaataataaacttacgttgaagggttgctatgagaattaaatgagaggatatcagtaaagagcttctgcctctacagttgtaactggttattactggaaagtttagacttctctgagtcccttgaggctatttgcttgaaaacaagcttctaagtatagacagtgatgaaccactgggggcagtgcttctttttccagaaagtacataagtagatataaaatttgtagcaaaaattcatagccctgttttgtttcctaggatgatggcttggaaaaaagtccaatgaaaaaaaaacagaagaagaaagagaacaaggagaacaaggagaaacaaatgagttctaggaaagacaaagaaggggacaaggaaagaaagaagtcaaaagataagaaagagaaggtaatgatgcccttctgttcatgcagatatccacagcctttgcaattcgccatttggatttagaagtagaatgagatttgagggccctggaataattgtctttttatgggtatgttcaagaaggatgggtggggccgttgatgggatacctgcacctgtccttgcagagagaggggaacctgcaagtttggggtgttctttaaaaaagaaggcctttacttggtcttttatgacatatttcagggggaaatgtttgaatgagataggacaggtgagagaaatcggcatttacatgtaaatacgaaatacgttctcagattcatattagaggagcacaatccacaactgaatttgaatacttgaagagtttgagtcaaaaacaaatattagcaagagttattggaatataaatggatgaaaagccttgctattataacctttacattaggggttttatgaagttcattctaaaccaaagaattt

SEQ ID NO: 81445 - DNA, 2255 bp, Homo sapiens
agacctgcctggacaacatggtgaaaccccgtctgtactaaaaatacaaaaaatagctgggtgtggtggcgtgcgcctgtaatctgagctacttgggaggctgaggcagaagaatctcttgaacccaggaggcagaggttgcagtgagccgagatcatgacgctgcactccggccaggatgacagagcgagaatctgtctcaaaaaaaaaaaaaaaaaaagtacctgaagtcattttatatattcttctgcaacctttccttcaatgtaattgagatttgtatagagttcatttacaataatgtagttaatacagattcctaaaccaaagggtatgctgttaataaaggttgctacatgatactctagagagttctgccaatttacaagcttaacctcttgatgacatttctgtgcattttatggataaaggagtaagaagcccaaaaatagcactgatgaaattgaagttataattgggtacatttagagatggaaatgggaataatgtgtgagtaagctgctaatcagacaggtttgtcttcatgatgtttcaggattttattttactttttaaaaaataaactgagaccatcatatttacccattttaataacacaacataggtaagaaacctaaatcgcacggtaggattgcacaaatgacaatgactccttgtaactcttttttaaaagcctaaaagtggtgatgccaaatcttcgagtaaatcaaagcgatctcagggtcctgtccatattacagcaggaagtgaacctgtccccattggagaggatgaggatgatgatctggaccaggagacattcagcatagtaagtcttgaaatcggggggtgccagtgtctgcagccgcggtacttgctgtggctctgccttttataggtccagccagagcttcagttgagctaagcaatagtacattacttgggaaacacattgcttacagtatcggaagaccatgtgctcttcagcaggctggcaggaagagattttcttgtcttttattgaggggaagtttaaggagtggatttcatgtcttgtgctcctagttaagagaggctctcagggcccttagaggcatttgggaaagagaagtgttcactgagcaagtatttattgaatgttttctgtgttccagcccccagagttaccatgttgaatagataaccatttctatcatcgtaaactgtacattggagtaggggagttagataactacacaaatcatgttggtgcccctgtgacagggctctggaggagagagagtgcatactgtggagatcctgtgagaagggaatttgacctagtcaggggttgccaggagggcttgtgtaaggaagtgatgtttgagttgggttctgaaggaagaataaaaggtaacaggagaagaggggagggcaaggcgatggggagcgagtgcatggaccaggtcttgcacgggattggatacaggccagtgtgtcctcaaggtccctttgcccctggctggagctgcaggtatagatttcactgtgccaccatcccttccccacctctctgtggtctcttctccccatacttccacaaatccattaatcaaacggctcattcaggctgaaagaaaaagcggttttctttcaaatttgaaaatacttccatcctgtggcagcaaaggaccctgttgaccctgtcctgtaacctctctctgacttctttctctgagttctctaaaacctatacacgtatgtatatagatattgttttctttgcacttaactctgttttcttaagtctcttttttgcctgtgagctctctgaggacaagtattgttttatataaaggtcatttagatgctagaagtatatcaataaatgagtaaattgaataaatgaataaactaattacatagccagctaaccaatctgtttcctagtctttcttttccgagtgtttataagagaaaatgatatctaatgttctatggtaccatgatatttaaaaaatgctcttacaaatgactcatttaatcttgtttttatattatgaaatctttaaaagatgcagagaaatttcagggatataatagtcattgataaatataccatgaagttttgtcaaatctgaatttttttaagactcaaaatataaagctgaatcccttggtgttcctccctctcaacctatgctttttctgtctctctctctcttttttttttttttttttttgaggcagagtcttgctctgttgcccaggctgga

SEQ ID NO: 81446 - DNA, 1043 bp, Homo sapiens
cctgctactcacttgtgagaggtgctcagaagttgcctctcctttggaatagggggatgggtgcagaagtgacatggaggaggctgcagaggcagtgctccttgtgtgggtgtgcccatttgcagatctgctgacttgccacatgggctgtacccaagttggacattgagttcaatctgtgagcattaaataccacctccactaatgcgtcagctccatgaagacagagattttatgtctctcatctactgctgtgttctcagcacatagaatggaatagaatggtgctggggacagggaagcactcaggagtatttgttatgctgtgcccagtgctgtgttggcctgtgaagcagcaccctcaagtagttgatgatttaattttacatggaagaatatgttatagcagtaacatacaggaatcatatactaataagcattataaaaagtctataaatggatagtccggaaaggccccaggagggaatgaaatagttaggaaaggccctttagaagggagtgaaaattaggaagagggtctgaagttggacacataatcatgaaagacttcattcatttagggatcagaatgaataacaaaacagtataagctgaataacaaaaacagtggtatcctactagtgggagtatacattgtcacaacctttctggaggagaattcagcaagatttattaaaagactaaagcatgcagttttgcttccaggaatttagttttgagaaggagatagagatttaaacatgtttataatggaaatggcttggaagcccaacagtaagaaatacattcaatgtggctaggcgcggtggctcgtgcctgtaatcccagcactttgggaggctgaggcgggtggatcacttgaggccgagagttcgagaccagcctggccaacgtgatgaagcctcatctctacataaactacaaatattagctgggtgtggtggcacatgcctgtagccccagcccctcaggaggctgaagtgggaggatcgcatgagaccaggaggtggaggtagcagtga

SEQ ID NO: 81447 - DNA, 1058 bp, Homo sapiens
tcggctcactgcaacctccacctcctgggttcaggcgattctcgtccctcagcctcccgagtagctgggattacagatgtgcaccaccacgctgagctaatttttaaatttttagtagagacagggttttgccatgttggccaggctggtctcaaactcccggcgccatgtgatctgcccacctcagcctcccaaaatgttgggattacaggtgtgaaccactgcgtctggcccccaggactattatttcaacttccgattaagaagaacccagctaacatgaacaaacgaaaaagactgagggagaagtttacattctgtatgacagtgaaatggttaaaactgctaatcttgaaagagctcttgtaaattgagaacaaaacaataactgaatagaaaaatgggcaatcaacagagtgaagagacagtttatgtaaggggagaaaatattaccaaccgtacatctgataaggggataatatccaaactgtgtaaggaactcagctccttatgtagcaggaaggcaaatgctcgattaaaaagtgggtaaaggacctgaatagacatttctcaaaagaagacatacagattgccaacaggtatatgaaaaaatgctcagcatgactgatcatcagggaaatgcaaattaaaagcacgatgagatatcacttcacacttgttaggatggctagtaccaaaaagtcaaaagataagggttgccaaggatgtggaggaaagggaacccagcgcattgttgctgggaatgtaagttagtgcagccattatggaaaacaatgcagagatgcctcaaaaaaatcacaaacagaactaccatatgatgcagcagtccctttaccaggtatatattcaacgaaaatgaaatcagttatgttgaagaaatgcctgcacttacatattcattgcagcattatttacgatagccaagatacgtaatcatcctaagtgcccatcagcaggtgagtggataaagaaaatgtgtatatacacaatcgaatagtattcagctttaaaaagaaggaaatcctgtcgttcgcaac

SEQ ID NO: 81448 - DNA, 1104 bp, Homo sapiens
atgtctgtttgtaacatgtgtcaggctttcagtttgaacttcagcaaagtagtgcttacttcagcagcatacctacaagaattggaacaatacagagaagattggtgtggaagaaaacaaaaataaaaaataaggctgggcgtggtggctcacagctgtaatcccagcaccttgggaagctgaggcgggcggatcacctgaggtcaggagtttgagaccagcctagccaacatggtgaaaccctgtctctactaaaaattcaaaaattgggcaggcatggtggcgggtgcctgtagtcccatctacttgggaggctgaggcacgagaatcgcttgacccaagagatggagattgcagtgatctaagatcgtgccactgcactccagcctgggcaaacagagcacgactccatctccaaaaaaaaaaaaattgtagtgaaagtgaaattcatccatttcttgcagtcatcagatcattctttcttttcctgcagatcgaggagactggcagagggaaagaaagttcaactatggtggtggcaacaacaatccaccatggggaagcgacaggcaccatcagtatgagcagcactggtacaaggaccaccattatggggaccggcgacatatggatgcccaccgttccggaagctatcgacccaacaacatgtccagaaagaggccttatgaccagtacagcagtgaccgagaccaccggggacacagagattattatgacaggtatgcaaaaggctgtgagacaccaggtgccaacctttgccaggagctgtttctagggagaaagtgacgtatacatgaatgtatttatctatcaaattactgaagatctcatcatgcatgtgtcagccacagcgaatcccatgtcttggttataggttttatgttttgttttgtgggtcatagggagcacatttcacctgtgcaggaaaagagttttctgccgtcttttgaggaaatctagtgaagaggtcgccataaaatattagagtcaacaaccaaaattattaagctctgtgcgaggctgtcagccacactaggtatcagggatcccgagatgggtaccagcccacagtccttacctgcc

SEQ ID NO: 81449 - DNA, 3121 bp, Homo sapiens
gacatggagcatcttctcatggttttttttggccatttgtatagcttctttggagaaatgtctgttcaaatcctttgcctgtttttgagttgggttgtttttgttgttgagttttagtaattctttttttaatggtatcatgagcagtttaccatggtccaagctaaaaattttaatactcttcacactgagttggtttttaagataattttattaactagtcactcacttgttgcatatttaggttgatggtgttattaataacttacaaaataatttctgtggctctttttctcatgggctgggtccaggaatatggtaatgtttatggatcttaccagatttttcctaaagggagtgagtttgcaaaagccatcagtaatttttcaagtgtgtacttgtgtcactgcacacttgagccttatttcataggatgtattttgctaataagtgtaaaatgactctgttattaatttttttgattcctaataatgtgagcatttgtccttgaatatgagtatatgaggaagagccaagtgggtagtgaagagaagtggatgggaatctggcttcagtctttcgactaatccttgcatctctatttcaggcaccatcatgactccaagcggaggagatccgatgaatttaggcctcaaaattaccaccagcaggatttccgacgaatgtctgatcaccgccccgctatgggctaccatggccagggaccctcagaccattaccgctctttccacacagataaactgggggaatataaacagcctctacccccattgcaccctgcagtctcagatcctcgctcacccccttctcagaaatctcctcacgattccaagtcacccctggatcataggtctcctttggagagatcactagaacagaaaaacaacccagattataactggaatgttcggaaaacataaaggacagctcgtaaaggagagagtaagagtcaccaaacacgtggatatttttggtctgatcctacagtagccggttatctagaccagtaagtggagttttggacatgctgctgctgtcaactcactggctgaaggagcacttcaaggaatgggaggcctttcactgggtccagctctgattcgggtcaccactcctgcactttggcaccccatcccattccagcctagttctggcctcccactttgacgggcacttggaggaggagctgactgtgtgtgtaccagcttcactgggatgtgtttccccagtcaaggaacaggggatcttcagagtcatgaatgttttcttgccagggtcagtgttcccaggaccttagtgcatggtcggggcaggaactggtgcatggaggctgctgggacctggtgaacagtgtgtgatttggttgatttggttcactctgacatgatggatgctgctgatggggagtggcgagttggggcaagcgggtggggacaagcataggacttgaaggggagcaggtacacccctcaaatgtgttcttgggagaagtgatacactcggcctcattatgtgaaacctgtgggtggggttggggtggagaagtagagagagggcaacagcttccacaactgcttcatctctgccaacactaatttttcccacactgtctttgtacatttcagagctttggtctcctgagtgggcctccttttcccactgtgccagggaaggtaggtttctctggctgactgagtactgtgagtgaggcaacactgatgccagcatgggtcttacttgactggggagtaggctgagtgaggggtagggtggggtaggtggggagtagtgtggccagggaactggaatccctggtggatttctgattcctgtggtgagaaggaaagctacaggacctggagaaggggatgcagaggcaggcctgctgaccaacttgttgcaatcacaaaggtgggggtcctggtgcaggcagtgaacaggcttctaatgtggggttcagtagtgccagcaagtgggggaaactttcagtattgcgctaggtcaacacttcctgctgcatttccttccctttgcacagcttgaagaaatagagtagacagaatcacacatcatgtggtgggcagatggaaataagtacctgtggtgaacaagtttctactgtagttggagatcattagaattgaattcagtttctcttagaatataatcaggtataaacctaagttaaactttttcccaaacaaggagcatccaaagacacagtgacttgagctatagatagtaaaaatcatacgagagttgaactgagtcaggtttaggaagcaagtttggttgcatcaattaagcaggctcttttcaattgactgatgctggggccttcagttttattctcagtatagattgccagtattgttaagagtatccaaaggcctttctagatggagacagaataactgacttgaacatacagtgtgcctgtaagtgtccaggctcagagctggtgaaaacccttctgttgggcgtgtgcagggttaaactcctgaagtaacttgtgaggacttcagtgcttgctggtgtcctgggcagcaccatgaatgcctttaccaagacatgccaagttggatcccccgaatgaagcagatgtggctgtggtgtgacccttgctccctgctacacagagcatcgcagggctggcctgtgtggtttccagatgagggtctgggtcccggaagcttgtgttgagagctcagtggacccaccccgcttgctgaaccctcacagttcttggggttgtccagcctggacttgtagcacacatgtcctgaagcaaagctccggtgactgcatgagccacctggccacagtcctcccatggagggcctgccgtgacgctcagtggagagggcagggcctgtgtctccacttaggccacacagtgatgaggaaaccacagatggagcttcttgccgataatactgactctagcccatgattgccttgcccaagccaaagaggaaggttaggttggcttgtcgagcccttgagcgttgggagatggggtgggaaggaggtgagcccctgcagagagttgggtagtgtccttcaggaatgaaaggaggggcaaaggagtcaccagagg

SEQ ID NO: 81450 - DNA, 1040 bp, Homo sapiens
gagagggagagcagctcccctcgccccgcccctgcagtgtgaatgtgtgaaacatcccctcaggctgaagccccccacccccaccagagacacactgggaaccgtcagagtcagctccttccccctcgcaatgcactgaaaggcccggccgactgctgctcgccgatccgtggggccccctgtgcccgccacacgcacgcacacactcttacacgagagcacactcgatccccctaggccagcggggacaccccagccacacagggaggcatccttggggcttggccccaggcagggcaaccccggggcgctgcttggcaccttagcagactgctggaaccttttggccagtaggtcgtgcccgcctggtgccttctggcctgtggcctccctgcccatgttcacctggctgctgtgggtaccagtgcaggtcccggttttcaggcacctgctcagctgcccgtctctggcctgggcccctgccccttccaccctgtgcttagaaagtcgaagtgcttggttctaaatgtctaaacagagaagagatccttgacttctgttcctctctctcctgcagatgcaagagctcctgggcaggggtgcctgggccccagggtgtggcaggagacccagtggatggggccagctggcctgccctgatcctctgcttcctcctcacaaccccaagagcccccagcccggtccatccacgtctggagtctggggagaggagcagggtcttaggactctcagctctgagcatccctggcagggtcttcaacctctaatctcttcccttaagccctgtggccacacagccaggagagacttgccgctggctcccgcctcatttcagcccagggtgctcatccaggggcccagaacagtcccacctgtgctgctgtgcccacagcacaaagccaggcttcactcccaaaagtgcagccaggccctggagggtgatcctgccagcagccctacagctccacaccctacccacccatcggcagcccctctgctgttccccagggacctctcat

SEQ ID NO: 81451 - DNA, 1115 bp, Homo sapiens
gggtggctctgccctagatgaggcgatgtgtggctgctcccctggcccacagatggtagcagaagctggggttgccaggctgcaccccgacggtgtgttcgttcctttctcctcagccacctccccgtgcaagatcctcaagtgcaactctgagttctggagcgccacgtcgggcagccacgccccagcctcagacgacacccccgagttctgtgcagccttgcgcagctacgccctgtgcacgcggcggacggcccgcacctgccggggtgacctggcctaccactcggccgtccatggcatagaggacctcatgagccagcacaactgctccaaggatggccccacctcgcagccacgcctgcgcacgctcccaccggccggagacagccaggagcgctcggacagccccgagatctgccattacgagaagagctttcacaagcactcggccacccccaactacacgcactgtggcctcttcggggacccacacctcaggactttcaccgaccgcttccagacctgcaaggtgcagggcgcctggccgctcatcgacaataattacctgaacgtgcaggtcaccaacacgcctgtgctgcccggctcagcggccactgccaccagcaaggtaagggggagggggcggctgtagggcacagccctgccctttgtctctgccctgcgtggacactgagaggctgagagggcctcgggtgcctgggaatgggggaagacggagcggagcggggacacaggagcaccctccctgagcatcccaagggggtgggtctcagcttcctccctccttcctcgagccagcccggcctggcaggcatagctccacttcacaaatggggagcctgatgctctaagaggccaagtgaccttcccaccccaagtgcgtagtcagctggaatgctgagctagaatttgccccaggcccgggtgactccagaacctggcatattctgagcggccccacgaggccactgcgggctgctggttttcaaacccaaggaggcctcagcaagtgggcagcaggactcaggtcctgctcatggggccgcagccacacacacagccatggacccacgcaagtggacactcctgtc

SEQ ID NO: 81452 - DNA, 1035 bp, Homo sapiens
tggtggggggcagatggaagtggaggggcaaggctaaaaccttaaggaactgcctgtcagtgagcactcctgggagaatcagaacactgggaggaaagaggtcaaggagacagccttcctgccacatagatagaacattctggtggatggaaatttccacgagtgcttcagcctttctgcctggcttacacagaaatggatcttagagctactggccagaagatcacctttaccgaaagcatcttgcagtcatcctcctttccaagccgccttccagtaagactcacaatggaaggtccccaacctggagcaaggatacaagccaagtaagtgaaaaaaaggcactgtttctgaagcataaagaaaacctttcacccctttacttttaaaatcccggtatccatgacaactggacggagggtagaaagtggctgtcccctcccctcttcattgtttaactttcagttgctgcagcaactgagtatactgggcccagccagattctctgggtgctttcttctttcttagttccccctttattgtgggccctcctcagtgccaacattgctttgtctctcgctggagaagcctgtgagaacgaggatgggcaaagtgtcaggctcttggtgcagctgaaaatcctttgagatggaagaaatggctggaacaaaggggcagaggaacaaaaagccctgaactgcttcgcccctgcctcgtggggtctttatcatcttaaaccttgggatttgtgagtgtctaacttttcctttcccagggatggcttggcagggatacagacagagtgggcctaggaaactggttgggcaacagtctcagcagagactgcttcccagggagacagagcctggttaacttaggtcatcctctttttcttcattccttttttgattcttcttttttccctccctccctccctccctccctccctcccttccttccttccttccttccttccttccttcctctctccctccctccctcctttccttccttctctccctcccgcttcccttc

SEQ ID NO: 81453 - DNA, 1062 bp, Homo sapiens
ttggctatggactttggtggggctggtgcctcccagctgccaatctggaggcgttcccacagctgggcagaattttgcgccgcgcgctgctgttgctgctgctgctccccaggatgttgccccctacaaatacgcctcctgtgtccgcagccctcatcctgccatacagcctcagccggcgccccagcctgcggtccgtgtgcaggggcgggagccactcactgcctccatgttggctgcagcacccccgcacggaacagaagcagatgctgggagaacgcgtgttcccactcatccaaacaatgcattcaaacctggctgggaagatcacgggaatgctgctggagatcgacaactctgagctgctgcacgtgttagagtcccccgagtctctccgctccaaggtggatgaagctgtagcagttctacaggctcatcatgccaagaaagaagctgcccagaaggtgggcgctgttgctgctgctaccactcagacaaggaaaaaccgattcaaaagccaaataacccctcatggaattcagctcaaggcttgaagtcttcctagcttgtcctatggacctcaacaccaagaactacaaattgcaaatttaataggtcattttgtatcaaaaggtcaattgtgaagcgcctagaatttttcaatgatacgaatatgttctctgggttctgctgtggcccagacagtgttaacttttttttttctattgtgggttttgattttttccccccagaaattggtttcatttgattacccaagtcttacgtttctcaataaagaaaaaaaatctccattaaaaaaaaaaaaagaagaactgtggtctgcaccgcaggtagccatacagtggagggacagccttgctactggagacccgcctgaaccagttaaaagggaagaaaaatgccctggcatctccttcctttctcatgccagtgcctgccattggctgaattcatctaaaagccagatgacaggaggtctgggagatgcagcctgcagatgtcccctcctcctaaccatccgtggctcactacagagcagag

SEQ ID NO: 81454 - DNA, 1048 bp, Homo sapiens
gctggaaagtggttcagccgggattcaagcacaggctgtctggttttagaaccttcctcttttatcttgcctgggagagttttcatcgatgccactgttatgtgttggcattggccaagaggcaggcctgggattgcttgggatgtgcctgtttaacaatcgtagtcatttgctgactactgtggttaagaaatttttcattagagacaaatttccaaactaggaaggaagaacttcattgtcatttactcctgatgcagacttttaaaatttcatgagtgaatagacatgattccatataaatgattacatcacatgcaaataccatttcccatagcgtcatgattaagggctcctatggattacccagcggggagtgatgttggtgattatggaaggtggccttgtttccttgtttaggaatgctgggatttgatctgattattagaggcctctcttctagaggccaagcacctccccaggccacagaggatttgaaggtgatgctgtgtttgttcattacattttggaagatattcagaagagctgtgccttgtcctattacattttttttttctggtaaaaaaataaaaagttgcctatgattcaatcctttcttttttttcttttttttttttttttttttttttttttacgaaatagccccatggtgtcaagcagcgtgagtaagaatgtacagatagtgacatggatatgtgtgcgagtgcgtagagtgatggtttgctctcgggtataaacctaaggttgctgtgcctttacttcccctctagaaaaaaatgtttacacaaacattaatttgagtttatggtaggcagcagaatctaattctgagaatgccagctgtgtcatctatgcatgcgttcattcattcatgtggtcactggttgcctgcctagttgtgctaaatattatgttaggcaccagaagagatacagtgtgaccaaaacagacatgatccccatggaccggaatagaagtccttgtagtgcaatgttatgggagaacagaatagatgccctccctctgg

SEQ ID NO: 81455 - DNA, 1813 bp, Homo sapiens
tttctgacactgtgctatgttttgaattctgtaggaatccttggcggaagttgccttcagcattttaggcctgtctaaacaggtagaatttatctgacatttctttcactcccttaagcctcatgtgagttggcacagagacatgtagctttggcaaagaatgagaaagaaggttctggggaagttttctctgttaatatttgaaccaaaagacacggtggggcttggaaagtatctgatgaattgtttttaaatgtcatgaactatttatgtgcccccaaattatgtttgatcagataggtgtggccctgatcagtaataacagactggtatttggtccttttattaactacttcctctccaatttcctttccaaagccacgtgtcagtttcaagcattgtcactatgagcccaagatccagaattattattttattgtttagttttggtgttcagttgtcaggctgtgccttttcattggtagttttttttttgtttgttttgttttttaagtagaagtttttgcttttcctagtttacaggacacacagatttagctgctgtatattttattttgtgtactagctacctgatatttcggagtctctactcagtggtagcattatcttagtcatgctaatcctcttaggaaccctattagataggaatcatctccattttattgaagggaacactgagactcagtgaaacctagaacttgcacaaggtcacccaactgggttggaaatctggcctatgtctttttttactttctacccctgttatttgatttcaagctagtgctgtttcaaccatttcaatcactgcactctgttttgcatcccagggaaattatttcaccccaagacttgaggggtttcaagacccattccaactaagatttcagaaattcctctacctcctgagtttggaagtagctgttctgtgcattctcaggctcaatgcaaaggtgaaatccttcatgacaggggaggccttaaaaccacatccatgtagacctggaatcttgctaaaccctgttgtgaagataaacgcagcatggtcttgataaatatgtcatttaagagcaatttcctgccagatgactgtgtatatatgaagctgggtaatctggaaaagtctctatcctttatctgatccaagtgatgctgtaaacaggattgttagatttgtgtaacgaagctagcaatcacatctaaatattactacacttaattcctaagtgttcatgtgagaacaacttcattgtgtttttatgtttttgaatgattgtaaccttttaaatatatacagatgttggcatttcaaaacccaggaaaattcttgtggtgctattgattagatcaaggtactttttttggtgtgtatctattattagcattaagacacacttatcaaataagatcttttcaagatccagagtatacagacacggtggatgttttggttatcgtggtcttcgagaagctggggttacttctctgaatactccacttatccccagcagagcttctgagatatctcctagggatcctttagtttcatgtagagtcggtggctttctaggatgtgagagcaaatgcagaggctggtgtaaatggcaggggaaagtagtggaagaatgtaactaatactcccttgaaccctacaatctgatgtgccgggcacagcctcatctgcttttgagaacactcatcggtgttgtttaatattcattccaataagaagccattttactataggttatgaatggtaattttgtatttttgtttaaactattttctaatgcaa

SEQ ID NO: 81456 - DNA, 1017 bp, Homo sapiens
ttaaagagcttttagttggtcacctaaactattttattgttttaagtaccaataaatgaaactttataatagtcttattgcacagttattaaatataacatttcatgatgccttttaatatgtataatgtttgttaattgaacttcatttggaaagtgtttgaagattgtagttttaatttctgatgtgtgtgtttttcatagtccatcttttagcaatttataaagtgaactatttcttttggaagatgactaagacattgctgaaactatattggcctaggtccatttttcaaaatcatgatttgtaaatttactttgaaatttaactttaattgttaaagcaaatctaacagtgattgcaagatataggaaagtcatagctgcaatgtctatattttcgatttagtatacatttaaaatattgcttctcaaagcatattttagagggtatgtgttatattaatggtgaaataaatatatagggagttgggcatataactctctatggaaaaacctctatttctttctttttttttttgtgggggtgcgtggaggagacagagtcttgctctgttacctgggctggagtgcaatggagtgatctcggctcactgcaacctcagcctcctgggttcaagcaattcttgtgcctcagcctcctgagtagctgggattacagccacctaccacaatggccatgtaatttttatatttttagtagaggcagggttttgccatgttggccaggctggtctcgaactcctggcctcctgtgatccacccatctcagcttcccaaagtgccgggattacaggtgtgtgccactgcacctggccttatttcttctttgtagtagaaaatatactgcaggagtcattaaaggtgatttcatctctgctttgaacagatcactgctctggtggtataaatgagagattgtagaggagagaggttaaagaaggagagtcagactcatgactttatagtagaaaatagactcatgacttcatagtag

SEQ ID NO: 81457 - DNA, 1050 bp, Homo sapiens
cagcctaggaacattttttaaaaatctcgtaatattggtattctggggtattcctgatgaaataaatattaattcttctctttttaatgaaaaaagtaagttagtgatgtagtttctaggtttataaagcaggtgaaaataatgcaacttctactcaacgaataataccacaggcactatgcaagagtgtgggggaatatccaaagttatgtgtcccccagcggctgtaactccatcctcctgtgcatatggaacattttgctgttctttatggtaatcactttcctatcttggtgtttatatatggtgtgtgacagttacggtggctgtgggaaccataactttaagttctgtgacttttctgtgagtaaaaccagccataatgttgaattaatgtcattgctcacattgaatttccttgttgttataagtggaagacttatcacatatttgaataaaagctctgttttcatttttgataacatgtaaatgatggtggttaggtggattaattttgtcatttaattaacatcatcattcagtacagtgaggacaacttgggagaatatatatggtccagtctgaggggtgatacggtttaatcatacctctgtccactcctccatttgaaagtagaagatacaagaccatcattatccttggctaatgacataacactttaatcaaaagtgttattatccactttagtggatcccaatagttttgtggaattatcttcaaaatgggattggttaggtagagcattgattcaattaatagaactggagaccatagcatgtgatttttcaggcttcagagcatcagcaccgtttactcttggctctgcatgtgaaggcatggttattgatgctggaaatcaggcagaacgattgcatttgattgcattattgggaaatgatagtgtatggtataaaacacatacaaataaatctattgatattgggaaattcagtaagttgaataaggttctgattattggcataaagtggacttcagagagtactgcccaactcacctgggggtcctttt

SEQ ID NO: 81458 - DNA, 1002 bp, Homo sapiens
ttttggaacatcttttcaataaaggaagggtctattgactctttgatctgtcttctatgtctcttaggttttctttttcatttttcccatgactttttcctctcgggaagaattcttcagcttgatcttcagcttgctcattttcttgtcagttgtttacattgtactgttctgtttaccaattgttatgtttttcatttttataacctattttgtttgacaatcccatccctttttgagaatattaagtattcatttaaaatatcctgcttgctgctctatttcttggatatcagtttaatgtattgactgtctcccatttaggacattattttcttttacatgtttgattctctggagcggtttgcttatcattttatttgtgtttttctcttcccccatctgtggatgttatttttgcttactatgtcctgcaatttggtgatgatgaggagagccggggcatgctgcaggacagggtgagccggtagttcaggctaggttcttcccattcctcctggttatcacctgccacttaaagcttttctctctgcatacgcctgtgctatctgcttctgcttattttcaggtgcctttgccgggcattgctcagcctcaaggcataggacagtgctggcccatccagctctctttttgtgctgaacccaccagtcacactgagctgcactggccatcttacctgctgcctccaagcctggagcattcgtggttcacctgccatacacccttccaccctcctaccctcccactccaccactacccagaaacatctttgctgtgactctctactgctcatgtctctggatatggattctttcatgaactgatctcatgtggctttcatctttcagaactgtatgaagtatgtccttttttttcttaaaatttctctctctcttgctcatgttttctcagatgtagcattttaaaatagtgaaaaaattattgcctacttgttggtaaatagttttttttaatcaa

SEQ ID NO: 81459 - DNA, 1568 bp, Homo sapiens
cgagccctttaatctctgtgcagggagacattagcctggggagtggggaaaggatctttatttaatgaaagtcccaggcttttacatgtattttaaaattctgtcttgttttcttttccttttaaaggcacaagtgatccttatgtgaaatttaagctgaatgggaagacgctgtacaaaagtaaagtcatatataagaacttgaacccagtatgggatgagatagttgtattgccaatccaaagccttgatcaaaagctacgtgtgaaggtaatcacagatagctttcaaatctgctcctttattaaaaacatttctcagcagtttctcatgtcctcttagacgtgaacttgccaaaattaattcttttattaggacagattaaaaataataatatagaaaaaattccttatactgtttgttgaaactgtatgtttctcttcaatcaatgagatacactccagtgaaaataatatctacattgattgcatttcagtctaccaaatgtggaagaattattactggtactgcagtggtgacaagtactaaagcctttctcattaggaatatctttatacttaatagagcttcaagctaccccttgtaagcatcaattgctacaacatctgggttaaaactgcatgagttgagtgcaggatgagattgctatagaaaatttagcaaatttctatttaattggcagatctgctcactgtggaaaatactaaattttaatgacagactatttaaactacagagaatggtccattgtgcataacatttcaatggatataaatactgccttaaaagaaattgttgctgttattttggtcatagtaggcaaaatgggcaagattgaataattttgttctctgcattggcttgactaaatttctctttaactatactatgcaaagtatttcaagatctgaaagactgatttcagaatttccaacctattgcatttgttaataatttgaaaaactcagttggtttaccataataatgtgttaattgacctctgtcctctttgtaggtatatgatcgagatttaaccacatctgatttcatgggttctgcatttgtcattctcagtgatcttgagcttaacaggtaccgtatttttacattttaattgttattgatgagttttagagggaacttacgataatgttaaatggtgcttgttgaggtcaaatgacaaaaataacatatctgaacaaatgaaagagagctttaaagtgttataactgtcagtgtatttttaaggatttttgctttccaggtgccaaatatattagtcagatgttaagtattttataatgcattctaaagtgtgtattggatttcatactttgatttgttaatattcagtttcattaacataacttaaaattaaaacaagtgtttacattttatttgagtggtaggggagggggatcagttaaccaactgttgaattaaacaatgccaaacagtttctctactctgaatataactgttttattttcactaaattttgtgctttcttaacatcatgtctaatccttattcagaggtaggagact

SEQ ID NO: 81460 - DNA, 1028 bp, Homo sapiens
tgggactcttcttttgagcaaaaatgtggatacaaatcataatcttattttatttgggattatattttataattctaaggctatattagaacaaaagcatctttgatgatgacttatttgaaaagtatttttaaagccaattgaagtacctgctttttaagatgtgttataatttagcatgtttataatccaatataaaaatataaagcctatttataattaggtctccagtaatgcttcttgaattgaggcagtggggtgggtgaggagaatatttttcttttgacatcacttatgcttctagttgtagctttttatgatgaaaaccgtgattgatttactagtaaactcagagaagatagcttaaagcagtaggaaaactgtagtgtgacttttcagttaccttttcaaagattcaactaaatatctgctatttttaacttgagttccttttattacttctttttaaaaagtggccctgttgacacttgtgacctcaataaaagagatattttaatgttaaaatgtcttaaattaatgttgaaaataaaagtattttttctcatcccacctaaagaaggagggattttctttagcttcttcttgatcttgacagcattgctgctgcatccgtgactctggattcagtgtcagtgatacagtaggtgaccggtgacttgagctgggggctaggttatagcatgcaatgtaaatagttatttgtcacgtggttgacaacttgccagctgatatcgtcaaaaaatttcttatatattcaagtggggcttgtaaaggtagttgatttctccatgaaaatagctgcatattcaaatgactgcctttgtgaagttttctatagcatattagattatgtttagcagtaatattggcacttaaaagatatttaatattgtcaaaatttagagttttaacataatgccattttagtttcaatttatttcaaattgcagaacagttaatactagactcagcttggagctgtttttgtaaaagatctcaaagagact

SEQ ID NO: 81461 - DNA, 1004 bp, Homo sapiens
tggaattattcccaaattaatacagttttttttgtttgttgtactgtttttttgttttcatgcattcttcactgaattcaaatgcccactcctagtaacacctgttacctttttattttcttggttaaactcaaaggattggagaactgaatactcaaaacagccacatttatctatgtgcttattgtacacctacctctatctgcttgtctgttttccatctatgatctaatttagctcatctatctaatttatctacccgtctctatctgtcttctatctctatttcatctgtcaatcaatcaatctaaatgtcacactgcactgacccactgctgaatgtcgtaaccctgatgcttctgatgccttattatgaagtctaggtcagtattaacctggacagaatgacttctagaggctttcctcctccctggaagctgtagccttgtttaggtgaagctatcaatttatcagaactttcaaagcttgtatgtactccacaccagagggacagagggactgtcttccttaacatctcatcaaatctctcctctcagtgatgtttgactcagtttgccccaaaacctctcactgagcacatacacttgcggtagaacctgtccttggatacagggtgaattagactcagtcatcagaattgatgagcaggtaagagaaatgagaattagtgacggaggtattcaaagggtgcagtgagaccattatcctggcctttcaggtgggtggagtgggttggacgctggtctctgtgttgggctcaggaaagccctcagataaaaaaagactggaggctgaggcgggcggatcacgaggtcaggagatcgagaccatcctggttaacatggtgaaaccccgtctctactaaaaatacaaaaaattagccgggcgtggtggcatgcgcctgtagtcccagctactctggaggctgaggcaggagaatggtgtgaacctgggaggtggagcttgcagtgagccgagatcgc

SEQ ID NO: 81462 - DNA, 1011 bp, Homo sapiens
agtacaaaaattgagtgacaattttatcttataatttaaaaatattaaatttaatgcaaagcttttatagctaatgtatttgtacacagattattcatatctctggaactgataccatttttatctacaagtataaattgcaacttctgtggacttttacatgtgggaaatttaaaaggttttctttttattctcatgcaaggatttctgtgtagttctaggagaatttatgggtccagtatcctcttcagatgatagagaggagctgcagagaagaattttccctgggagcctgttccatggatgtatggatcttctcatgtcatgcaataaaagctgttgacaaggaacagtagttttacatgttgaaaaagcttgaaaggaatatttcagtgaaacattttataggctcaatgttttctctttagttttcaaagcagtggtcaacatagttggaatctgactttactactcatttttcttacgaagttgatttttttaatgcatttgtttccattgactacttactttcccataatgacttaggaaaaacaattaatgacagtcaaaatgggatttattggcaccacgagaacactgatatgtttatccttctgtctctgagactatgtatggagtaccagtacattatttggcacctggcaggtatgctctggtcagtgccttttcttacttctctctttgttggttggctgattggtattgtgttatatgcaagagagtattttggagaattatcccgtgggtattgcttggcatcgtcagttctggagtgccacctagttgaatgtaatcttgctttagatggccgtaggctgtggctccagctcctgacttcatgccctccttttaggatttctttcctcctgacctctctgccactcttcctggcctgggacagataagaggcaccacctggcctcggacagataagaggcaccaagctgacctgtccatccttcctcagtttcctctgcagccatgccaagg

SEQ ID NO: 81463 - DNA, 1050 bp, Homo sapiens
ggattaaaaataataaactatccaaagtatgaaaagtgatttattttaaacaaacataatggcattttaactgtctttgaaaataattcatcttattctgctgatccaaattccgtttaatttttaatcttagtaatttggtgtggattttatttcaaaaactatagtccctaaagcgtgataattaattagttttacataactgtcagacaggaatatttcctatgttttatggattgaaggagctctggggtacttgaaacttaaatcacttgccaaaagccacacaggaaaaaaaaaatcagtggacgattttgaaaatataaccgaggatatttctagcatcaaggatgcagcagatacagacaagttggaaaatgatttagggaggcaagaggttgtgcgcactgcacaattttcagtacagaatcaaatattacatgtcatctactctagcacaaagtagagaattgaagctcatgttgaagaatagtttataaaaaatgtgaaaattgagggtgtattaagacagaagtatgcagataattattttaaccaggtaatttcaggctttgcctcacagtgagggtatccaggataaccatatctctctactaagattcctttagcttgccagggtcaggctaaggatttaggaaaaattattcatcactaagcacacttagccatttggactaaggtgaagtgtagaattagttcagtatctgctacattcacccttggggaatactgcatttaatttgtggtctaacagggcttttcttgtttttttttttgtttttgtttttttcccaacctggtttctaaattctgtgatccaatatattaagcctgatgtgaaaaacagctgaaatgattttacatgacattggctacagccgaggtctgagttctctatgtttttctgatgcaagaatagttagtacggggatttaatacctcacactgcacccctagagcctaatactctgggaccaacattcttgctcactttgtattcacatatttaatctctatataaaggaaaca

SEQ ID NO: 81464 - DNA, 1013 bp, Homo sapiens
tatttctctggacaaattgcaccccatgtcgttgatctgcttttacagccaggcttgacacattcaccattttcctcctgttccctggcttccttagcctctgagatttacagcttttaaaactctagcactcttttctgccccttgcctttgagttaaaagctgaccagtctgtaatataaaacatagaattatggtaatgaataagaggttaaaagctatcatggcaagtaaaacttgagcaggtttgtctgactgatatggtaaaattatgtgttgaattaaaacattaaaacgctgtgggattaatggagaaagacaagaatgggaggtcagaaacaatgctaaatcagcacattaactgcctgtgggctagagaggctggctttaatatatgccttttgcaggaaagggaaaaaaaagtaatttagtctgttttcttcaggtgagtagaacaatggcattttaaatctaagaggcacctagtaaatacatttatttcaattcctttcctacataggggaagaaacagaggctgcaaaagatttagttagttcaagaaaaaacagtataatttggagtttttgactttgtgagttttgttacggcgctgacattcattcttttgtgcgttcagtgtattcaaatcttcaaatctagagcacattgtatgctgggcagaaggcacagtacttgaggattcagtggacagtgatacagaaaaggctgctgtccttgggcactgatgagcctcgggctactacaagtaagcaggcagtggcagtaggtggaatgagggctgcaggtcctggcatcatggataccaatttgggcttagaatggaagcggaggcttccttgaagaacagcggtctaagctgagacttgtaggaatagtggtaattaacaagcagacaggaagaagagctttccaggaagacagcaaaacataggcaaaggtctggagaggagagagagcacattctctccgaaaaccttgatggagtggaaaaa

SEQ ID NO: 81465 - DNA, 1003 bp, Homo sapiens
gtacaagagagaagactttattcaaagaatcttaagtaatctatcttctttggagcctgtctctctaaaattggtaaaagctattttttctcaggtctatgccaacgttagacgtggatagccataagcagttattctagtagaaaagcctgtcaaatgttttttaaagaatttgcttcacaaattccttaggcccagtgtaacctaacatttttaagtaataggtgatgcagcctgatgtcattacttttgtagtaaaccaggccacagccttgattcatgaaacaaatgataaattgtacttggaggctcaaggtgaatagctgtgtgtagtgtttgacaagaccaacatacttcactcagctactgctagtcttaaaatgcaggtattttaagaagaaaacaactcgcgttctaatgattaactgaaaaagagaaacattttattctggacaatgctgagaaatggacagtatagcaggtttcatacctacagtagaggcccagacagaaaattgtggtatatgctgcccaggggcacatctgatcataaattaatactgtcgaaagaaaatacaaagttaatctcataaactgtaaaaagagaatatagtaaacaatgggttaatgggaaaattgttagagaattgaaatgtttttcagtccagattatgttacctttcagtacacatgacaacacctatgttacccattgagagagatcagccaatgaagagtaggaaactatattggtttgctcagcacatgtgtgcagattattcaggatagccttattatagttgacagtatgctgctgagaagctgccaggattgtaatgtgttggggttaattcagcactaggaattgaaaccatcatggccaccactggcatgatgcatatgccaagattccacaccaaatcagtgattcttccttagcattcttagaatcaaaaagtgggttcatatagctaccttcctgttacttaagctttctctttat

SEQ ID NO: 81466 - DNA, 1034 bp, Homo sapiens
aactctgtagacctctggactagataagctataatacttgcatgttttaattgtaaatctattcatttgcttccaaactaaacaacatagacactcattctgtgtctgtatctctctttatctctctctctctgtctttctctttctagttctctctctctctctgcctctgcatgtgtctttctcacacaaattcaccaacattaaatacctggcttctgcagtttcaccagttccatttttgtgctgaacattgttgaaacaggctattctttttcagatgagcgctaaaatgcatttgattctcatttcctctatggatgatcatattttaaaaagacttttagaagtgtcaggtcttctcctttctattattatcatattttaaaattgggatctatacaaaatataatttaaatgatcagggtacctgatctagatggaatatttgtagtatttaaatctagtttcctgtttgtcattttttaaaatcagatcttatcaagagatgtggaccgtgtgaaaagaatcactatggcaatatggaatacaatgcagttccttaaaagctgcttccagtgggaatccacattaagaagtacaatagcattcgcggtaagcttcctttcttatgttcaaactatttgcttcttatttgcatctattcatctttctgaaatatattacagcgtaggtgattacgtgggggttgtctttctaagacagtacttaggtcaaatttacctgggaaaccccttaaattacccaaatcttagtcatatatggtctcttggtaaatttaagagcactactgttgtatatatatgtttaaatgtttctccagttgttgttacagctacatttgtatagccctgcattgtgtgtattttttttctttctgtgccagtgaccgcccataatttctgaaaaatggcatctgaaaaatcacaggactaaataataactgaattgttcaatttacattttaagtaaattattcccaaactttgatattaaagatgtttattcatttc

SEQ ID NO: 81467 - DNA, 1057 bp, Homo sapiens
actcagttcttcttgttaggatgaacattgaaaatctttctcattttgtcttctgggtctttctctttcccctatgtttttcagatattttggtatcttgccttttctaaggtttacttagttatattaaattaaggatatattttttcttttttcttccttcagaaagtaacattcttgactttcccatttgaaaaacaaattaatatgagatgttgacttagtgaatgaggccaaatagaactgaaatattttgccttgaagtaagtgcacctgtatatttccctatgaatagatttgtaaatatatgtggtattttatacacatgtatatacatttatatacatacacaagacgtgtacatggccattcccacacagattttgactatttgaactattattcatagttcatgttatttcagtgcttagacactgtcccaaggattttataaatttagttctcacaacaacctgctgatgtaggtggtgattactatcttctttttacagatgagaaaaataagcctatagaggtcaagtacagtgacagagctcatgtgtgtgtatgaggtagaggtggaattgaaacccaggccatcttgctttagtctgtgcaggcttaacccttcagctattctgcctctcactgatgcccaggatgcaatgtttgttgtccttgtatttacatagtgacaccgggaccaaccatactgattgtttcagatctgtatttagatattatgtgtggggattaagcctgttccaagctgtgatgctatacaggaaagaaaccctcattacatgggcgagaataattctttagctcagttattttattcacaagtgatgatgagaccaaaattaaagaagccaaacatggaaatgcccagcccctgggcatcacatgcatttggcatccttggaatccagctggataatttgaaaaaccctagagccttggttctagactgagtcccaaattacagtctgacttgtttttccccacctttgaggaatgcttttagatgatgtagagggattttcaaggggagaag

SEQ ID NO: 81468 - DNA, 1041 bp, Homo sapiens
ctgtgttccaaagcggggcttaaaagggtccaaggcttcactttgacttttgatcaaatttgttttcataatcctttcgcagtgccataacaccccgtgcagcattctccttttaggttattatttcagctaaatatgtagaaaataggtgaactttaggattccctcggtgcgtccccccaacctcacccctcccaacacacccccattctgagatgtttcccctgaattaggcatatgcaagaccaacccacatttaggacgtgataactttgtccagaccatcattgtaaacttcaaatgatacacagacacatttgaaaaaagatctcctctctgcattggagaatcctaactcaatcttgtgtgtctggagagctgatatagcaattttatcagactctgtatctcttatattgctttgattataactcagtgtttcctaaatgacactgaaaagcttaaagaaaggttttactagttctttcccaatggcagtttaggaaatatcggggagctgtctgtttgtgaagagcataatgaactccttaaattcatagtctgtgttgctgctgtaggaaggagtggggagtgcaagcttgcattccacctcgagcattttctacccactatgcacagttgcatcattgagaagtaagcattcctcttagatcagttcaaattgctaatatatgtgtcctacagcctgcaatataatatttacgtagcttccgaaagagacctgcaaggattccctgtaattcaagatggtagtctgactgatgggtgtagaaggatttttttttttgttttaaagaaattcttgtttgtcccatgagattttcacacttttcggctgacggcactgtattttactcatcctgtataaagctgtcagtgtattcattatatgtgtgtcttgaagactctgagcagatgacgggaacaattgctggagggggaaaacacatttgaatcaaaatcttcagaagagcatttctgtagtctctcctgttcctgcttctgcgtggactgtccctc

SEQ ID NO: 81469 - DNA, 1029 bp, Homo sapiens
ctcccctagtgttttatcaagcagtcgtgtattcttatttgtctttcaatcaggtatttttgatcactgtctggaattttgaactatatatgatccccttggcattgttgctgatctttgtctacaatttcatcagacctgtgaaaggcaaggtcagcagcatccaggacagccaggtaagcaaggattcggagttctgacatttgactgccgagaaatgtgttaacaacaaactaccaccaccaccaaatcatggcccaagtccatttcgtttgaggtgtaaggagcagccctgcaaaggcactcattttgcagtggaggtcttctatcatgaataatctggagtcttctttctgtggcatcttacgttcctgagtcttggcctgcatgaagggagcctctggttcatggttatcatttccatgctggtagcacatgtctgtgtgctcatctgattctctgtagagttcctgtgaacaacctcctcagtcactagcgagaaacctttgctggctctgtgggccattgctgggcatgcagagagctctgcagggctaactctggcctttccatgaaggcaccttatgcaatgttctctctggcttgaaggctcaggagattcccagaggcttgtcaactcccagggcaatcagagagtgggtgggcttagatccatctatttgcaggtgcccacatttgtctggaaattcccaaacttcctgtcctgttgaagaaagcaagaccctttctcaaagacatctctccgcatctactcatctcacttccactctgactctcctgctcctggccccctcattgcaccccataagatctttttctgctctgctctaggtggccaggaacttgtatttgtaggctttttttttatgatgtaatctaggcattccagcttcaagaaccaagtttttaaaacaaaaatctaaagtcctaagacttgattaattttctttctagatggatcaccttcacatttggtttcccaagagtcaatcaaaccctgactgtttt

SEQ ID NO: 81470 - DNA, 1063 bp, Homo sapiens
atagagcaatataaaaccacttagaaatgatattgattcaaaatccaaatactattttatattcatttcccaaagcaaaagaactacttgagaaagaagtacactccagaaagagtacagatctccccactccattttaatagcacgagctgtggcgttgactccatgtgtgtgtgcgtgtgtgtgtgcacgcgcacgtgtgcgtctgcatccctgcatgcccacaaaatgcctcatgggaagaatttctaaatgacagctcctggtgcattgctgggattcccaaagaataatttttaatttcatgtatcagaaatattgctgcttgttctttgttatgacagatgctaagctttttttcatgctaaatgccactcaatctatttctaatgtttataattcttcaagttttcaaattataggcttttaatattcagtgggatgaaacagaccaaacatattcttatttaaagtctaaaggtatatttttgcatctttagtctagatgattgaaattactgggaggattttgagataaaaatttttgcattaatctcttctgagaattctgttcatcctgtgacaaatactactcagtttttaagcatgtcagaaggattttttcctgacatggtcaattttcaggactttgtctcctgttttgcttagggaattaatagagaaatgagaagttttctaaatcagaacatgtaggagagatttaaagtaacaccctgattgtgtaattaattcttagttgtaaattcattttgatggtgttaattctctgcctgaggctcgaagctagtttattgcacctatggtgctatactcattggatacccaacgccaacaaggccttaagaaaggaaagatttgccctgatttttaaaattttttttcttttttaaaaaagaacaattgtgttacaacacagacacattatttgttcttagttctgcttacaaaagttagcaaaaatactcaatccttttaacattttataaatgaataatgaaaaatggtgggcttgtactcatcttcatatgatatatatttttag

SEQ ID NO: 81471 - DNA, 1095 bp, Homo sapiens
catgttggtcagaatggtctccatctcctgacctcgttatctgcccgccttggcctctcaaagtgctgggcttacaggcgtgagccaccatgcccagcttcagaaagtattattaaaagtatagtctacagtggagtcaattaaggtgtcaatttaatgacacctctgaaggtgattaataacaatttcgtgcaatattagaaataaaaagatgccattaaaaagtacattcttttgaaaagtaatcctgacatcggtatatagacagttgtagctagtaactgactaaaatatatgaatatatatcacaaataatcattcttcgtgtgtcatttttaaatatccagatgatcaaatttattttaatgcacaaaaatctattttttatttgaaaataatgtatttgtgaaataaaaatggaatagttttataggtccaatataataaaaccaagttatcagtcatcaataatcaaaaattaattgtttacttctactcttaaaagtattaacaagtccagatgataagttattctgttactcaagatatagtaagactctttagcctagtctttggatatttaatactccaaacatcaaattcattataaagtaacaggactcatgagcatcgttattttggcatactaactcatgctttcttcacaaccagaacctcactatttgggtgtttcacagggaaaaaaaattagacagttgaaataggaagtttttattaaatcgaatgacatggaaacttgagtcattttccaagaaattgttttgacctaaactggatgctgccgaaaagaggaagccacttttggcctttgggtcaaattccctcatgctttcaaatgttcctttataaacatgaatacttatgtggcagacagagctgggttttcaccattgtgcccattaatagatgtcggtggactcatgaattagtacgctctggcagcatatctaatttgtagcacaaactgaggaattagagtaagggaaaaaattcaaattaggataaaaaagtaaaagtatcttgaaagtttgatattgcagaaggaagcaatgaacctggttttccttctgcaca

SEQ ID NO: 81472 - DNA, 1036 bp, Homo sapiens
ctgaagaacactgataggagaggagtagggtgagcttcagaaaacctgtggagacagaggaagtcagagttagccagactgacgggattgcagaattctgcgagggacgcggcagcctccacggggaagtgaagtgcttggttctgtgggcttccctttatcacctcatggcaatgaggtagcaactgaggcttgcgcgttaggagtggtagcatctaagtgactgaacagatttttctggggggggagtcaatatttaagttgtaaaacaatgatttatctcttgtgtcactctattggtaaaaaccttgttattataacatgttataatattttctgtatcagcatgataaaaaatgaagtaactgagttaaatcttgcttttatgttttctaggaatctgagaaaaaggggttgattgaaagaatctatatggtacaggatattgtttcaactgttcaaaacgtcttggaggaaatagcttcttttggagaaaggattaagaagtaagttctaaatttgtgttgtggtgtttgcagtagacctgctatccacaaggacagtggggtaatggcagtggtgtgcgacaaagggaggcaagaaaatacaaaaacacaccaaagcaacactgttgggttagcactgtctgacttcagttggcttcttaacttcacagttgggtggtgcctcagaactggggtgaccatacggcccagtttattccagtcaccccaacataaatattactagtgttccctttcactcaaaaatatatcagtttgggtgacaaatgatagatatttaaaatgttaccctattcagaaataaaaagagaagcaaatgtgctatacaggagcctttgctatctgaaccacagaacttagtaaatgccttgagtaacttttctctccaattctccaaagaaagatacacatctagtagcaccatagatggataaatgtgaagttaagtcaccacatatatggatgtcttaggacaggatactactctgtggccctttatagagaaagttgac

SEQ ID NO: 81473 - DNA, 1343 bp, Homo sapiens
ttataagcatagtaaacgtgtatgtttaaaaaaagtaagttataaatgacttttaaacaaagttgatgaatttttattgaatttacagttatacccattattaatatcttaagaaaaaaataatttttgctcacagatatgatgcctatttgctttattcttgtaggtttcatataaattggcaaaagattcctgaatttaccctcaaaatgtttaatataaacatatttgaaagcaaacatgaatagtaaaatgaggagggcatcataattctttattcatttcctcactcaactatcagttattgagtttcagacactgacttggtctaagttggtctaagaatgagaaatgcaaccataattacaataatgatagcaacaccaactgttatcgcatgccagccatgcactcttctaagccctttaaacacactagctcctttgaggagctacttaaaggaataggattacatcattcaaaccaccctataaagtaaggattgttaatatcctcattttacagatgaggaaactgaatcacagagtgattaaatttgtagtccaagatcacacaactagtagctatgtagcttggattggaacctgtcctcctcattactacactataatgtcattaccctcaagaaatctctatttcaatgagggagaaacagagtaatagccaattagaattcagtagcattagtggtagggagaggtaagagagaattctgggagagatctgatcagcccaggaagagatgtaggagaaagacagaccgcaggcaattctgaaacagaagaaacttatcagcatctctgagaataggaagagatagctgggcaaagaattgatgaatgagggcttcagtagtggagagcccttgtgcaaacgctcaaagcccaagactatgtgggagatacagggagatgtaagggattgagttagtgtgtccgtgccatggaggtgcggttggcagtgcctagagatgaggcatgtcatgcaggccttgaggagatggaaaaagtcagtggaagaaagttcagtgaggcacgtattgacagcaaggaggataagaggacacagagtggggtcaagacccaggaaggaagatcatgttgtttggtaaaactgtttccattctggaacatctctaaaagacaaaagtgactgttgtgccgttgataatgtaaaaggaaatgtgtctgaggagagaagagggcagagtgatttaaacaggctcccaaccctgcagtgctttgaggggcagctgtgcccagcacagctgtggtggccatgtctgagatgtgtcttcagcccatgaacagagtactgttctg

SEQ ID NO: 81474 - DNA, 1008 bp, Homo sapiens
gattgcatttagatttaaatctgtaatttattaatagtagtgtttacttgcttgttccgtgtctttttatttcttctgtatctttcctccacttgctaggaattgaaacactcttgctattcttttagttgtcatcttagagttaacagcgttatgtgccacagtctaatattgtcacttttaatgtcttcccagtcagtgcaggaaccttcttaatctatgttccacatctctttgatatctgccatctgtttcttctttgtgatgccttctaaatactttctttggaaaatcttggactgtattagttctctgcagtttaaaatcctgtccaattcattcattgggttcttaacttcaattattatggtttgcatttttcaaaattctacttcatcaatttttcttgtttttcattttcttttggattatatcttcaagcatctcttacatgatttttaacatattaaacattatgatttaatatattggattagatttcaatatctgaaatcttttctttcagattttgctggctcttactcatggtgtcatgtgtctttttgtggtttgcatttttaagaatacacctatattccttggattttcatgtggagagtactcaaacatcatagttgatgatgcatttccttggagaggattactgtttaagtcaccttgggatactaccagtcccaggacctaccaatctaggtcctttcttaaatttttttgcttgaggcttttcaagcaacactggtagcataaactgaaatgatagatttctccacttagcaccgagggcatgatttatgtccactctatggtacaatgtgtccctccttccttattcttatcctgaatatgtaagctttatgcaatggtctcatattaaaatctccccgtggagagttcctaggcttcccctcgtgcccccaatctcccatcgtaccatgcagacaacagaaagcagctcagaatcccaatatttggcagaaaatattagag

SEQ ID NO: 81475 - DNA, 1142 bp, Homo sapiens
gggttgtaatttaataatcttcaaacaaaatgtttacgaaaaatgccaaagattctaaatcttatcatcccgtgtctgtttttcttcatgttgtatctcactgggttgctttctggctgagccagaattctgcatgatttgatttacttcaagttaatgaagctggctggaaaagagccttgcagaaattataaaagctccagtaaatctcgtagttgtacatacaatagatacccaagaacctcttttgttaaaccagttactcaatcttctgtgtaaacaatgcctcattgtcttgcttctaactatcatctagtttatcatagtctgtcattttgtaacgacctaagtcagacatttttaaacagacatgtgagatctgatcagtcatttgaatgaaaactttcagcagcaaaataaccccttatttatttaaaagtggaaccaatactttattgttgttcttttgctatagaatttcaaaatgaaattatttgcccgacaagaaggcatcattagttagacttgtttcctctgtagcccgattgaaattctcagtgttaagtttaggacccaaacaccagctgggacgtaagagcaggaccgaatcaaccttgaataaactgtatatagaaaacaattgttagttgattaagtagacattggatgtttgttagaaaggaatgttagttgtaagtgacatgttaagatttatacaattgtcaaaaacttttaggaaagattccagaatgcttttgataaaatttatcgattgtggattcacagtgtgataattaagtagggatgttgaagtcttgccaagttttcctggttcccttctcaaactttatcttcccatttctagccctgtctctctatcttacaggcatctacacctcagcaagtcagaaactaaacatcatctgtctctccctgtcttcagaaccccaaccctcataatctccttccagcttccttatttcccttaccaggactggcattttctgggcttggaatttctcggtcatcctctttttttttgttcctcgtgctgttgtcctcgtctcccaacccctaaagcctagtaggtccagtgtcaatgcattaaccacttctgttctgatttccaccacccaagtgga

SEQ ID NO: 81476 - DNA, 1026 bp, Homo sapiens
tcttagtcttgtatcttgttatatcttatttgttacatattcttgtatttatttgttatataaaggagatccacattgtgaattaatgaactcagtgttatgccaaattttactattcatagcacatttttcatgtttctggtagatatttttaagtaacttgatataatagattaaaatgtatatatttcaaaagagaaaaggaagcagtaagaaataagatagaggagggcctttgacaagatggcggcaggaggcagtggcgttggtgggaagcacagctcgaaaagcgataacgattctggtttcctggggctgcggcccatttcggcggacccagcgctgaggcggcggcggcggcgaggcccaagaaataagaagtgggactggcggaggcttgcgcaggagccgctggggctggaggttgaccagttcctggaagacgtgcggctacaggggcgcatgagcggtggcttgttgagagaggccccaaatgaaaaactcttcttcgtggacaccggctccaaggaaaaagggctaagaagagaaccaaagtccagaagaagtcactgcttctcaagaaaccccttcgggttgacctcatcctcgagacacatccaaagtccctgcccccaaagacgtcctcgcccaccaggtcccgaacgccaagaagctcaggcggaaggagcagctatgggagaatctggccaagcagggcgagctgccccgggaggtgcgcagggcccaggcccggctcctcaaccctcccacagccggggccaagcccgggccccaggacaccgtggagcggcccttctacgaactctgggcatcagacaaccccctggactggccattgtttggccaggatgagtttttcctggagcagaccaagaagaaaggagtgaagcggccaccacgcctgcacaccaagccgtcccaggcacccgccgtggaggtggcgcctgccggagcttcctacaacccgtactttgaagaccaccagaccctgctctcagcggccca

SEQ ID NO: 81477 - DNA, 1026 bp, Homo sapiens
agaacaacaacacattagctgactgaaaaaaggcagaagtaaaaaagtggacttatctctaattctgcactggcttcactctgaatcacatatttcagatgaagattttacacagcacctcatttaagtaaacacaataattgttgagtattactatcagcactaatacggatacatgtaactagtgccttataacttgcaaagtaaaacctcatttaattggacactcacaaccatcctgtaaaaggggcagttgttttctcttgtttctgctgtctagtgtttcctgtaatatattataccagtatttgctgagctcctacaatgtttcagacactgtactgaacactgaaaatacagcagacaaaagacagatgacagttcctgtcctcatggaatttttattctactgtggagagactgagaatttaaaataaataagaagagccttgtattctagaagacggtaagtgctctggaggaaaataaagcagagaatgaagttacagaaagatgaagagagaaaatacaatgttcacaaagattgacagggacaccttactgagacttgaccaggagcaagaacaaggcagcatgaaagaatagcaaggtatgagcaaatgaaaggaggggaggaagggaggaatggagggagagagggagggagaaagggagggagggaggtggggaaggaaggaaaggaggaggggagggaggaaaggagacagaaaggcccaattcatggtcaggacagtgtttgaagagctgtgtcagcacagctgggagttggaacagagagagggagggagggagggagcctaagaggtcaaagggggcaagatttggtgtgacataggaggccgtggtatgaacgtttgagttttgctctgagagcatctttggaggggaggaatggtttgggaggtggaccctggctgctacatgagaaatgactgtggcatcgagggttggctatgatagcctaactaggaagcaaatgtaatagtctaggtgagagttgatgag

SEQ ID NO: 81478 - DNA, 1039 bp, Homo sapiens
cagtaaacggcctgtgcacgtgcacgccggagcctcccgattggccaacactccctgatcacgcacggccttcctgcgcccacccacgcgtgggagcgccaatgaaatgactcagtgaccatctacaacaaatcagcaagaagcagggctcgcagctgaccaatggccgcccgccgggggtgggctgtcccggcccttttccaggcccaactgggtttgttaaagcgacaggcctctcggcgagccggtgccccatcgggtaccgcacggctgccgcggcggccttaccctgccgcgagcgcctgtgacagcggcgccgctgtgctcgcgaccccggctccgggcctctgccgacctcaggggcaggaaagagtcgcccggcgggatgggcggggaggctgggtgcgcggcggccgtgggtgccgagggccgcgtgaagagcctgggtctggtgttcgaggacgagcgcaagggctgctattccagcggcgagacagtggccgggcacgtgctgctggaggcgtccgagccggtggccctgcgcgcgctgcgcctggaggcccaggggcgcgccaccgccgcctggggcccgagcacctgcccccgcgcctcggccagcaccgcggccctggctgtcttctcggaggtggagtacctgaacgtgcgcctcagcctgcgggagcccccggccggtaagcgcaggcgagcgcctggggttcccccgccaggctgcggggccggggaggggctgggaggccgcgcaccctcgggatgcccacctggcaggtgagatcagggcgggcttccgggggtggggtccggcctaccctcgcgggtaaggagagaccgcaagtcctgggtgcgcagctcttcctggcgccccgcccctggcccgccgggcctgaccgggaccagtggctcgggattttctaggaccgcgacgggagggggccattgggtgcggtgggaacctgtgattggacaatgggggatccagaaatctaggtcctgttccttctggtccaagaaagggacggtg

SEQ ID NO: 81479 - DNA, 1016 bp, Homo sapiens
ttgtttattccactttattaaatgccaaaataaatataatgttctgattattttttatttttatatcatttatccttccacctgacttttatatataaagtcttaaaaataattctgtcatgtttataagtcctaatacagcttttgatttttttttaaaaaaatggtatattatttcctggaaacataatgacttcagggtaaaataagatggtgtcatgctaatttttgaatctgaaaattcactgtagttttcctaaaaggggagtcttaacaccctgtgtttttgtgcatatttggcctaatatgttacatgaggataagaaagtttgattcatttttttggtatttccttacaaccattctgtgaagatagatataattttaagttctatgagttctctagagtggcttaattaaggttgttttattgtttgaaattttcaagacccctgtattgaaaactcaagagaaaatggttggctgttggtttttcacttctggtccagtctcgctgagtgccaaaattgaaagaaagggatactgtaatggtaagcaaaatgcttgaaagtccaaatgaaagatttcattcattttcttagctaattttaagtgattttaaatagtgttttttgtaattatatgacgtgtatagtattttaaaacatgaatagtgatacattttttatataaataattgatatttaagtatttttaaaaggaggaattgtttccagtcaaactcctgttttttttctgacttcaatcctgttactttagtaacaaagagtataactagaggaatgagaaaatgccagcatctgattttaatgttgcaaaagaatctccagggttgtattgctaaaaagagaactactggagtatgaaatgctattagacattctgattccatgctggcttgatatatgcaaatgcatgggactggaatgtagtgtattaacaaacttaacaatcagattgttactggaattgccattagtgaagggcccatttcc

SEQ ID NO: 81480 - DNA, 1855 bp, Homo sapiens
atatacgtttgattttcctcatatcttatttacctaggagcatgtaagagaaagaagggagagaaaaggttgcatctgcaggatgccttgataactacacagtcccaaataaaaggcctttttctaacctacctctaatggggttatcagatatgtttttaaatctctcgccctgagtactcttcttgggagttgctgctgtttacagccacagtctcatctatcactaaatatgaaactgggccaaggggaaaattcagtaagttagcgttaaatggaagtaaatatatgtatacctaagagaatgtcaaaataaacaccaaaccaaaagaaggtaggagtgccatttttagaaaagacacaactttaattcctgtcaagagacctaggtctactgatggcagtcactgcattgtacattattccagttcttcagtaattctgtttaaactgtgattttctttattgtgttggtgcaatattttattatcatttaacctcaggatattcagaccaacaggattgtgttgctgctgaaagtctgagcagtgttttaccgtccccagcccccctcccacatggtcacatgttcacttgcttttccttccatctgttggttttgtgagctgagagcatctctggacacatggaagggagccagggattcctgtgatacagattttgaaccagcagagtactttggttttcttcatgtcctaagggtttgatccagaaaccctggtgcttcccctgcagaatactgtacttcatttaacagaatgattgatttttctttcaatcagcatgttcaccaaaaatagaaaagttcttctaaggttaaattttgtatttaaaagttagttggccatttgatcagggaattttctacacacattaggcaaatgtatgcttttcatcctctgggcttacctctctcctctgcaatcctggaagcatcgtgcatagttctttcattgtaagccgctatttaaattcccacaatgcaaaactgttagaccagtaattgtgctactgaaattgtcacaaaacgttattccttgatttggtttttaaattttgctttcgtgtgtgtgtctttaaacaggtaatgtgtatttaagtgttgtctaaacagttgatttttactttagaaaagatcatcttcaactgtttattgacttctgagttatatagttcatgccctgccaaggcattgttcgactccatgatactaaaacataatgaaagaaacaaactccagtatggagaagagaaagtttaattatttggttccatctagaaaagcaacaacttaaaggaatccttcactaggattgtcttatcacctttattagataaatcatgaagtgtccctgtgaaattgaagtgaaactatctctgtaggacttaagagaatagctaaaaggtgtgacttgccttattgaaatgatactggcatatctgactgtaagcagtaggttgaagatatcattttatgaatgtggagaattctacattgaaacagaaaatacctgggaatgaagattaaaaatgtagctgctgttatttgcttggttattcccctcttgctcttctttagtttgaaaaaacaaaaacgtggccttggaattttcattttgatgcagaaattttgaaattgaaaatgtgcatgttttggtgcacaaaatccttctgtgggcaaaactttgtttttgttttgcacagtaagaaacaataggcaagcgttatgtttttggtaagttaactatgaaagctttcttatttttattattaaaaatgtaacaatttaacccacaggaaaaaaaattactttgtatgcttgtttgaaccctat

SEQ ID NO: 81481 - DNA, 1031 bp, Homo sapiens
tgggtcaagagagccaggttgtgagagccaggtcttggaaaggaggataccagtagctggctagttactagggaggaaaacaacgcttcaggatgctgttcagccaaatggtagggtctgtggtcccgctgttgggaaggcagaggctgggacctctcaggagcttgtggggtccagagtggcttctgaatgaatgttctggcacctggaggaagcagccttctgcacctgcatcagtcagcagattatggtgttagtgactttagccaagttcttcctgtacctcgtgccttatttttatttcaatctatagaaaaaagatgaatcctaccacctcttggtaaaatggttctgtaaaaatgaaatcaaattaccgctgatatcagaaagtgacacaaaacaagaaaacatgagaaattcagttgtagggtataggttttgtcagactaaattcgaggtaagcaatacctgcttctctcttagaccccacacttaaaataaaacaaatgtttgccggggtgtgtggtttcttgtcggcacgctctgatgtgtgaggtacaagaggccagagggtgagcatcagaatggaaataataattattttttataccaatgtcttctcaagcttcaaagaaaggagcctctctccttgcacatgcaaacctcaatttgggagctgaggaaggtaattttcacatgcaaatgcatatgagttgaaatgagctgaggcaatgagcagattgttaaagagacaccattcctcttctcatccagtacaaaggagcaggggcttgggagaagcagctatttcttaaaggagcaaagggaaaaacctagtgagtttctttgcccctgtcccttggacatgtctctgcatccatggagctctccaagaactaatgattaaacttggcaaaaactaactaccccttagtaaggtacttgagtggagcaaaacgtgtaggtttgagtctgattttgttgcagatcccattcttctgcagactgatcatgggacctcaggggaatca

SEQ ID NO: 81482 - DNA, 1044 bp, Homo sapiens
aggccattaattggatgttagtcttaaattagtcagtgattcttagagttgcttttttgacttgttctgtttttttcaagttttatctgttctcccttctttttcctgacggttattttggaggtatcctataattttatgtgccatagaaatagaactgtaagcaagaagcccagtggaatcaattgcttcttgctctaaataaggcatgaacatttcacaacatttcaaagggaaattaacttgtgctccttgcaaatgttttaaagactatttctgaagcagcctgattggtgggccaggtctttaaaagtttgtgcgatcttggctgttgataacatctgcagcttataatggccctgaaaatatttacaggttatgcagaccttttgagggaaggagtttgtgggaaatttctttcttcctacactcagttacagacaaagcctttgaaacttgaccaataggatcataattgcatctgatgtgatttcccggtcagcctgaacatgccttaagtttctttaccagagagagtgaaactgaatatgtcaacagtgaaatgttcttttacaaaattgttgccgggatcaggaaataattgaccactgctttaaaaattaattttttttcaatctgtaagtcatacttttgctttctttctccagctgaatttttaatggattcagttgtcatccacaaatacttttatttgcatttaatttttaaaccagaaggatctttgcatcaagagatgtgaaaaatatgagaagggaagcgggggctacttttttgaaagtttgatgcccagcaaactgcagttctgaccttttttctcagtttgttctggtgactcatacgttatagagtacaatagcaacagcaattttgtggtggtgcagtgtgctgggaagtgctgggggcaaaaccaccatactgggtgtgtttttttctgtcgaatgctgctctttgacaggttgtgtggctccccttagtggccattgtcgtctactgcagccttggatgataacttacctctgtgat

SEQ ID NO: 81483 - DNA, 1032 bp, Homo sapiens
tttaaaagttatagagtaaaattcacttttagggggagtttacagttctgtgaattttaacccatgtataggtttgaataaccacaaccacagtgaaaataaacaatagtttcattacctcccccatacgcttcatccccgcctcccaataaccccagcaaccacgggtctgttctccatcactacagttctgtctcttttagaatatcctgtacatgaagtcaggcggtgtttagccattggagactgacttctttcgctcggaataatgcctttgagattcatccaccataatgtgtgtatcagtagtttgtgtcccattactgctgaagagcgcattcagttttcaaacaagtgagtgcctttatatagaacaaataagatattttcaggtagacctctctttggacacattttgctagtagggtggtttgagtttctccctttgtttgatggttctgtaattgtctttcttacaaaatattgacactttagccatttcactatttcacgttgaaattttccctaggtaatcaaaattgtgaggttttactttaacttttgctctaaaaccaccattccacaaaaccgttagcattcaagggaagaaaatactcactggggagtggagagtcggccaatttaaggcagagctaataagtattgtggttttgtataaaaacctaaaaagaacacttttgcatttcagattcctgaaagcccaacacaaatgatttctgaaagtccttgaacaaatacaagggcaacacttaaaaatattaaaccaggtggtttggagcccaggcaagcatgggacctgtgagatgacagtgacactgtggagtcggcctcagccctgcctgtcaccagggccttctgttctctgccttccccagacaccaggcccacagggacctcctgcactgttgtcccgtcaagcagggaccccttgccatcttctggactttagtagaagcatagcaaaaaatggagtggcaagagtgcagtgttgtttcgggtaccgagtctgcc

SEQ ID NO: 81484 - DNA, 1809 bp, Homo sapiens
tcatatgcagggtttcatgtgcagagtttttcatatgcataatccttatcacatatatgatttgaaattatttttttcccattctatgagttgtcttttttaggtctcgttttaatcgactcagtagatattattttgaaaaggtttttcttccagcacattagagacggcctgagattcagcaagtgagcatgatgtacccagtgtggtgcttggcatcttgttttgcgttgctgccccagctctggtgctgcaggtgggccaggtggccacttaatgactgactgttctgaatgctatgaagaatgtggatggctccttaaataattttttcagaacaagagttgttacttccttcatttgtcatctcttcttctaagtttaaatgagaaaacccccacattttctgacaatgtggcctatattatgaacagaaagaaacttgggtgttatttccacttaattaaccatgttgtaaagatctatcctaccccagctgtacataggaatatttcccctctgtttgtagaactttagatcttgactttttttctttttcttttaattacattttgtttcctagccagctcttcttcacaaattaccaaaaaacccccacaagatttcttaatgtttttcttgttaacttaattagtggtcctaatgagggatgtgaactggaacttagctttgtgttttcagaaacatttctgagtcaaaatcacatgtcacacgttttcctcccccataatgaaattggacaaattaagtacattttctttctcctcctttttctcctgccagtttttgattggatatttcccttctgccagatgcaatctgcttttgtcttctggctttcttctgaactttttagttttataagttgaaaaatataacctcctccacgacaccaatctggttttgtgactagctagttattctcaacgtctgaacttgatttggctgccgctgtctgagatacaaaatgtgatggcttctcagagccaagctagtgtggttttcactaatctttttctcatttaagatttagctccagatgaaggtgaaatattttacattctggccaattcgtaagtttgttggcactgaacacttcgtgccatttgctgcaagctgccttatttttattatcagagcatttgaaaaacatgcaagtattttagagaccacatgaaggatcttctcccttgactggagggggaaaccaagactcaaagaggttgtgagttgctgaggatctcccagcaaatccagcgtaacaacccacaaaccgcaaatgatgacgatgataatccaagagtcaagtattaaatataaaacaaagtattaatatttgtattatcccctttccccaaatctaatttctaatggatgaagatgaagaatgaaaccgctggctggactggaaagccccagcctgttgttttgtgcctgcctctgacagacccctcgcccagctgtctcaaatcctctttgaaatgaggcggggaaatcaataaatgtaatcaccctctttgagcttcaatttccccacctgtgaaccaagacctccccagcaggtggtgagaatcacatggtagcatgtgggtggatgtcctggaccagttagtggccttgttgatctggaggtaatgcataggataaagtgacaaacacgcacgcagaggctgtcacctagcagtgttgcagagtaagttccaatacaacagcattgtcacttcgtaaatagctgattggtttcacctcctgccacattttagcagttgctcgtggctgtctgaaggg

SEQ ID NO: 81485 - DNA, 1119 bp, Homo sapiens
agatgatcagagggcaaggcaaagaatgttccagaggctgattaaaaatggcaaactgtaattgatatgcagtcaaatgcagctgtttgggaaataaacaaaggcaagacccttgccttatacaacaacccaaataaactccaaacggattgaggaattacatgtaaaaaaaccaaatgagataaaattaaaatccacacccataatataaaaatgaatacaaaatttctttctactcatgatttaagtttctggaaacctctgtggcaacaggaattcacaactgattagcttcagcatgtacagactaaagagtaaagacccgaaaattaaaattaaacctatgataggagaggtatagatagataggcagacaggtaaggatgataaaatattcatggtagatttaggtggtgagtgtgtgggtgtccactgtaacaaatgtttgaaaacttttgtcatcaaatgttttagaaaaaggaaaaaaaaattataattgagtaaaatgacaaagatatgatgccacagtgctgcagaaggttttggagtaaggaggctcttgggtattgctggaagcagttgggagccctccctggttcttggcagggaagtggcagtctagccggtacgggggtgtgaaaccagataagttatccaccgcccactgcccatttcctcaggacctctggctctgcctcctggcgtccagactcagtggtggtgcccgcgcttggctctcacagaggctggctctgtccccagcactaggggctgtggacctgcagcaacaggccctccctgcttgctctcagcccttggctgcctggggggcatgcagaaggagtgctgaaaggaagcggagatttccaaagaagcctggtgatgttatggaggatggggtggggacagggatcctggctctgtatcttcagtccttggcaaaatgccctgcccatgattggaaggaaggacatgccagtgaatcttggggaggctgctggcaacctcggcagagatgctgggggcttgcctggcagggggcacaggttggagacacatggagtggattgaaagcaatggtgaggaaggtttcagcgtggctaggtggtggtaccagcc

SEQ ID NO: 81486 - DNA, 1028 bp, Homo sapiens
attctttgaggggacatggctgaaggctgccaggaaccccctttcctaggttgctcccgtgcctttgcaaggacttcagcttccacttatgtctccttatttgttacttcatttatttccttttgttattctcatttgttaattattaatggatctcaaatgtttatacatattaaaaaaacttctctcatcaaaaaagttggggcctttttctgatcttccgtgtaaaatcaaaaccactcatcctagccttcaagattgacatcagatgatgacgttcagcttttctcatttcttcctgtgtcctgtgcagcataataggatgaatatggactttgacgtcagatggagctgacttggaatcctggctctgccagctgactggcagagggggtaagttatttaacctctttgagagtcggtttcatcatttgcaaaatggaaacagcttacctacttcacaagacagtcgtgagaatgaaattatttatggcaggaaatctgatgcattggaccatcccagggcagagcctaggcatgaaatctgcaggactcccgggctcctccaggaagtgcaccctggcttgttcctcctctgtctttgcgtgttgtgctagaaaagtatggatttcagagtggggggcctgttctgtagcttctggtgaaagtttggcagttggaatcaccaccctggcagattctgcttggggacttccccagggacaatctgagtctgtttttgagctactgttcttggatttttttttttttttttttgagatggagtcttgctctgttacacaggctggagtgcagtggcacgatctcggctcactgcaacctccgcctactgggttcaagcgattctcctgccccagcctcccaagtacctgggattacaggcgtgtgccaccacacccagctaatttttagtagagatggggtttcaccgtgttggccaggctggtctcgaacttctgacctcaagtgatccactcgcctcagcctcccaaagtactgggattaca

SEQ ID NO: 81487 - DNA, 1157 bp, Homo sapiens
gcgcggcgcggccggcccgccgctttgtgtgtgtcctggatttgggaaggagctcgccgcggcggcggcggcgctgagggaggaggcggcggcgagcggagccaggaggaggaggaggagggggagccgctcattcattttgactccgcgtttctgcccctcgccggcctcgcctgtgacccggacttcggggcgatcttgcgaactgcgtcgcgccctcccgcggcggaagctcgggcgtccggccgcctcccgcgcggccagggccgggcttgtttttcctcgcctaggcagatttgggctttgccccctttctttgcagttttccccccttcctgcctctccgggtttgaaaatggaggccgacgacgccgacagcccgccccggcgcgcctcgggttcccgactccgccgagccctgggccgctgctgccggcgctgaggggccgccccgcgccgcccgccccgtccgcgcacccggagggccccggcggcgccgccttcggagtattgtttccttcgcccttgtttttggagggggagcgaagactgagtttgagacttgtttcctttcatttcctttttttcttttcttttcttttttttttttttttttttttttgagaaaggggaatttcatcccaaataaaaggaatgaagtctggctccggaggagggtccccgacctcgctgtgggggctcctgtttctctccgccgcgctctcgctctggccgacgagtggagaaagtgagtatgtgcccgccgcccgcggccactgcgggaacttttcctccgaggggctgcgccctgtttgcgaaacccgagttgccaccgtcgcagctgtcgggcccccgggctcgggagcggcggggtggggcgcagggcggctctgccgggagggaggctgcagcggacccgggacccgggctcgttcgtctggagccccgcgggccctggctccgcgcatccccgcgcgggaagggcttttctctttctccgtcctgacagcccagccgtgtttcccggctaggcgcgaggactcggtagggaagttggtgccggggcgggctccgcggttcccgggccccgcgacccgcacctcgccccttccatgcgcaagagcctctccgcacacagcgctgatcccctgcggcgc

SEQ ID NO: 81488 - DNA, 1004 bp, Homo sapiens
tagaggcagaaggtagatgagtggttgccaggggctgggggcggatggaatggggagtgactgctggtgggcacagggtttctttttggggtgatgaaaattgttctaaaattagtttgtggcgatggctgcatagctctaaatatacttaaaaccattggattatgtactttaaatcggggactttaatggtatgtgaattatatctcaataaacccttttttttttttttaaagaaatgtgatcaggttgaaaataacttgttatgctaccttaaattacgttaaaattattacatacatttgacaggctgatgtctctctctcttttcatttatgagtttttcagatccgtgagttgcagcaatacaacaaactgataattgaagcttagcaacagggattcaatcccgcagtagaaatgggcaagcaggagaaaaagaatcttggttctatgtagcttcagttagggattgaggagctggatttaaaaaacacaaatgctggtggagggcagatttttgacaatagaaacctcagctgaatctgaaatgatggtttttttcaggatagagtttaggagctgagtctgaagggctgtttgtatttccagttttattatgttttccaacaaagaaagacattgctgttttaagatgttttaaacactcattttttgatatgccacattgaccacaagtggtagtaaggactgaggatgaacagaacagttcattttaatgcagtattgttgtttcttttctttgcagttttattttatttcttacatagttccagggtctgagcaggagaaagaatctttaggatgcagtagttttaggatacactgtttcaagtatacagtgatttttataaaattaaaattccttacagaacgaaaggttttaaaatgtggcaaaggcatttttgttttgaaactgtgtgcatttatccagatttaccctggcctttcaataggaaaagacctagagaataattgttgtt

SEQ ID NO: 81489 - DNA, 1120 bp, Homo sapiens
ggatatagtttcttgatttccagtctgagatgttctgaaggaaaattctgaacactttagagacaacaaagtgcctaatgagtgatgcactctgatccctcctggaaaatggtgtttggcatcagcttagcaagaggaggttttccagttatttgtaaagatgtgatgtggctttaagtggggatgggggagggtagcagccccagtgtttgtggacattgagacctgttgacatttgggaagcataactgagttccactatttgaaaagattaaaactttgatatatgtacacatcccctcatgcctgcacccccatccccgagggtctggaaaagaattgatttgttctgaggaaggaacatatatttggaatataaaatggttagtaaacaaaggatctttaaaacaagttagattgttatctcaagagaagcatacttcctcggcatgatgttttcttttgttaaattgctttggttttatttgactcaaagtattaacaatacctttgattttgagacttttggacttttgaagactaagtttttaaatggtcaattttactcgtttgaaagtcccagataccatttttgaagatttctctccctttttttccactgatgccggctttacttatgttttattttcaaatcttaaggaaaaactgatatttccttacttgaactgagaaatagtcgttttccctccctcttttcttccacagtaaatacatgttgagtacttactggatgcagttctttaggtttagaaattatttgatactgtaaaatgtcttaccataagtttttaaagatacccgtcaaactatagatgttactgccatgtttattaaaaaaaaaaataaaacgaaacaaactagtaagcaagcttaaaatttttctttttcctgccctggactacagatttttttttcttttttttttttgagacagggtctctggtcacctaggctggaatgcagtggtgtgatcacggcttgattctgccttgacctcccaggctccagtgatcctcccaagtaggtgggactacaggcacacaccaccatgcctggctaattttttgtatttttagtacagacgaggttttgctatgtt

SEQ ID NO: 81490 - DNA, 2009 bp, Homo sapiens
ttttcttgccaccctgggctttgaattgaaggccagtgtgccaccttttctttggctttgttagaacgttgccctcagggtcatatgtgctggctgctatgaattcttactgcttgatggacagagaaaggtgagggttagatatctggacagggcatgacagggcgggtcatcgagtaggaacattgggaccttttgcttccaggcttgagcagtgggtgagaaacactgtcttcccattagggcagtgggtgaaacactgacttccctccatcctctgggcagccttgtcaggtgggtgtggaagctgaggtgtgtctgccccaggctgtgcagtcagccccgtgttctagcttcccgtgccgaacctggccctggaggctgtctgcctggcaagggggctgcacaaagctcggaggggcatttctggtgcttggtagatggtaggcctgcccccagtgcactgataagagcatgggctgagagtgccacttggattcggctacagtgggcggcagagtgggggtgactggtgttgcttttactctagagcagaggaggcagatgaggtagatcggggccccagggatgctgagctgagctgggtagagagaatttggttttgtaggatttggagacagagacaaatttggagtgtttggatgttcggggacctgcaggaggtatgtgaggtgtgtaaaatgcagcccctgttttaaaaagagcttacattgtctcttgagaagataaggtgtgcccagctgtggaatggaaccagatgcttttatgagtgaggatggagtgagcacactgggaaagagccctggaattggaggaagagatcattttgcccagagggatcttggaggtctcctggaggagggtacttagatgatcagaaggattatactagacttgatggggtggtcttggcatcagaactttaaaaatgtattttggggctggaagcaaggctggagaggaaggtttgtttaagttgtagtgggggatgaggctgggggcaaatcagggatggttttccaggtctgtaaaggctggggtaagaggaatggttggttcttaagagcaaaaaaaatcccttacatattggttctcttatttgtgctaagttaaatacatgggaggctactggtgtttatgaaataaccctgagcctttttggggaggtagtagtggatgtctgatggaagagatagaagactggtcccaggggttcttagtggcaccttcctctcaggtcatcactgtgcttttgcacattgcagttatatttgactacatttgattatggcagatttacttagaagggcactggaaaaaagcctcccaaattacaactgacacaggaaatgactttattttcttctattttttttctttgcttttctcccccaatcaacatacatttttaaacctgtcatctcacatgacctgccggtagaattgatatgtttaatttctgtagaaaataactggaaatatttcacaagctccagtagcttcctgttgtagggacccttaggactttggaatgagaagttttctattgagttgtcatatttggaaggataaaggtgccctcttttccctcgatccacatagtagactcctgtgtgcgggcatttgtttggtgtctcacgttgatgcaaatgcagccattgcagagtgagccccgctctgttactggatctccatttgctcaaaagagagcagtgtccccctccaaatctgcatgtctgaaagcattcatgcaggttcattgcatgggtctttgcattttacttagacttagcaaaaatcaggtatagtctttcctgaaaacaaaagtgaccattgtttttaatcaactgcagggtgtttggagttgtgaaatatttagggtcccgagtccattccagattcaacattgggaaagaatgagaaagctgaagcctggggcaggctctgtctgcagaaaccatgggctatcaccccctctccttagcagc

SEQ ID NO: 81491 - DNA, 1049 bp, Homo sapiens
ttaaaagtcatagcgataaagtctcagctttttgagagagtgggtttcagacatattttaaaatactactatacaggaaatctgattgttgcattgaaacaggatttgttatcacatcacggttagacatacccaaaaggcaaaaactacagtggtcatgatggctttacataagattttggaggagaaactgttagctccatgaaagcaggaactgtgttcactcttgaatgcctgctacctgcacatggtgaatgttctataaatgtatattaaagaaatggaggtccttagagttccaagatcaccgtcaatatcatcaccctaggcttcctcgtccttccagttacttcttttccagaagagtccattgcctcctttatatgaggtctacagagcgcgttcagagggctcttatcattgattcagcaatcacgtgtacacatagcactagaatgacttcacatatttgacctgtttaaaaataacgtgcagctatgacgaacagcgaacctttgattagggacacatttgcctgccgccagacactacaagtattatgtgtattgcttttttcaaattataatagtaatagatgattatgagaagaaaattagaaaataagttttctgtctctctataaaaggaaaataaaaattatccttaatctcaaggtaaccattgttaatattttgttgtgttttcctgagattttccccctagacttatatgtgtatctatatatttaaaaaaatgaaattagtagtatactatgtacacacatattgtgaatttctgcccataacattatatctttatcacctggaatgaggtctttaatgaaattattaaaattaaaattattctataaatgctaaatttaggtattttacaattttttttttttttttttttttttgagacaaagtcttgctctgttgcccaggctggagtggactgcagtggtgcaatctcagctcacttcaacctctgcctcccaggttaaagcaattattctgcctcagcctcccgagtatttgggactacaa

SEQ ID NO: 81492 - DNA, 1406 bp, Homo sapiens
gtaccctgcctcccactcttcctggcaagaccctgctcatctttcagggtcgtctctgctgagaagtcttcctgacctcctcggagatagggagttgtggggccttgtctttatgttcccagggttctgtctattgcgctattaaaactttttttttcatttaatttgccacttgctagagagatggttgttctgccttcgttgtgcaaaattcagtgatacactaatcctctcctaacctcttaaatcattttgactttcacagagtgatagtgtctagagagggtttttgttgtactaagttattggttccaaagaattcattttaagaggagtaaagaactactatagtatgccgcttactgagacaaaaccgacttctcacataagcccaaaggttttgttatgttggattttaccattagagttaaagatgatgattggttcactaatgtgctttaccttcacagtgtgcctgtagacctgtagtaaaagaaggctaattatgtttcctgatgtcttttatttccaactataagctaagcctatctcattttttttttttttttttttttttttttttgagatggagtctcgttctgtcacccaggctggagtgcagtggcgtgatctcagctcactgcaagctccgcctcccgggttcatgccattctcctgcctcagcctcccaagtagctgggactacaggtgcccgccaccacacccggctaattttgtttttgtatttttagtagagatggggtttcaccgtgttagccaggatggtcttgatcttctgacccgtgatcctaccgcctcggcctcccacagtgctggtattacaggcatgagccgccgcacccggccaacctatcccatatttttaaagaagagttgatcaagtagttacccattttaactaaatggataactataacattctttaatggaattgttgacagagggataatcagtgtttttgctaattcatgccaccctcctttgttgtatgttagtaatatttacattggggcaacaaaatagatcagtatttccattaatgtttacttaataacagctgctaaaaggtattactgtttgcagtaacacaaaagcacttacctgattcttatgccagcttctatagggtaggtagtgacagcccattttgcaggtgaggaagatggggtttagaggtgaggtgtgtctgcctgagagcaggagctggtaaatggcactctgggctcatgggagtcacgctgtttttttttttttttttttttcctaggacctcaaggttgtgtctaagacataatttacagttctcgtgtaggtcttccaaatacttagctacacagctttggggcgttttctcagccaaatgcttttctttagcccttctcata

SEQ ID NO: 81493 - DNA, 3605 bp, Homo sapiens
ggttctccagtgtagagtagattgattgccctgtgtccttcaggcagggtgcagtagtaagttattgatacttggctgctgagctgtcgttcaggccttggcaactgacgctctgcagaacggaccaggagtgtgcggtggtggagtccggctggcctgggttgcagatttaactttcgcctctgcctctgtgtgcctctgggctgtaagctttagtttgcacggttaacggggatggcctctcccatggtcggttggagtgtgttgcacagcgtctggtccagtgttggcactgtataaatgccagctaactggttagccacctaaactgtcagtctgcaacccacagctctgcagtgaacaattgaacctcatttctttaataataatacaggattcctgaaaaccaactgtattattgtttggaaaatagtttaaaaattatttccttctaactgagacgtttaccctcttgtctcccttcagtctgcgggccaggcatcgacatccgcaacgactatcagcagctgaagcgcctggagaactgcacggtgatcgagggctacctccacatcctgctcatctccaaggccgaggactaccgcagctaccgcttccccaagctcacggtcattaccgagtacttgctgctgttccgagtggctggcctcgagagcctcggagacctcttccccaacctcacggtcatccgcggctggaaactcttctacaactacgccctggtcatcttcgagatgaccaatctcaaggatattgggctttacaacctgaggaacattactcggggggccatcaggattgagaaaaatgctgacctctgttacctctccactgtggactggtccctgatcctggatgcggtgtccaataactacattgtggggaataagcccccaaaggaatgtggggacctgtgtccagggaccatggaggagaagccgatgtgtgagaagaccaccatcaacaatgagtacaactaccgctgctggaccacaaaccgctgccagaaaagtaagaatgatgctgactgctgctttctctctgcctctctctctcctctcctcctccttgacctcccttctcttctgagtgcacgagttccgctgggcagggtgcagtcgtgttgcatttaggacgtggcatgcctgctgtgcggaagtggttcccagtgggggtcttggttggctttcctttgcatctgggactcttggattgcgggactgtggcgtggctggaggccatcatggctgctgtcaagactgttcaaatcacatgttagaaataatccagcacactcctgggctagacacttgctgaccttcagctttgaattcctgatgagaaaggtgacctggtgtgcttggaagtccctgagccttggcagctgggggctgcttatgtgtcagctctttcatcctttgtgcgaagtgatattttttgttctgcaggacttccttagtttgaatggacttggaatatggttaaataaagggaaggtaaagcactaactcatatcctgtgaaagtggtccttaggtcctagtgatgatgttatgatactcaggtgtcctggttatgacagagcacctggcccaggtgggagacctctggacccatttctgcaagtcccaggttcaggctgtacttgcaggtagctgtgtagcagggtgcatttttaaacctctgggattctgttttcgttcttttatacctgtttactgaacagttgtgaaaatcttaagatttcacgagtgaaggaactttggaaagtatttactgttctgggggtcagatggtggtattttgaagcttcttgtatatttatctgcaatatgcttattttcccttgagaataactgagctcttgccttcatgtgatcagttccttaagaaccaggctgtttggtattaaaatgtgactctgagccttcaccttattgcattcagcaatagttatgtatattggctaggaagcttttcctcactggtttgaagtcagtgtgttagctataaatagctattatttaagtgttggcccagttaaagatgtaaggaacccatgttctctagttatgaagaaccaagaaaccccaaattgttagacttgcctaaaataaataaaaggcgagaccccacaggggtgaagtgtgtaaagtaaataaaggacagacctcccaggtagcccttcagttcccgttcaaccagtcctgaggcaggaaaaggatctgtgtaccctgatctgccacgcacttttctattctgcagaattggatcagtgcgtatgtgaacattgattagtgagggcaggggtcccactggctgcagccagtaccttgtagagctctgagaatgcagtcaggccactttaaggttggctggagttggagggagatcttatgctaaagtcacttgtgtggttgattaaaactgccctatcattaagttacccactggtttgagaaaacaacaaaatatattttttaaataaccttgacatttaaaaattttatctgaaaagtaaaaggtgttatcaagggaggcagcatggagtagaaaagagatgttgaatgtggtgatgagggccaggaatgaccttggatgggccagcccttctgggctgtagttgggcttttttaggatatttctagggcagtccagtacatcccttagtggtgatcatatatgggcatgaggatgttttgaaaactcataagctctttagagaagggaggtgccatatgaaacgtcattaagtggagagttgttcacgaactaggtaggtagttactttggtcttgccataggtttttggctgtttctgatgagctactgattgaagacccctggggtaggggtgaggcctgcattctgggtccaagtctaagagtggcgactagaaatgagcaagttatttaaattgcctgggccttggtttcttcatatgtggaatggggtaaagcctgccttcctcatagggctgttggaagatgaaaaggaggaaggaaaagcaccgtgaaaatgttaacgatggttagaaggtgggctctgctggtgacagacagagccttgatatcacctgttggttggtcacctgcttccccaaggccacgccctgcagccttctccttgaccatcccagccctgctgatgttccttgtgatttcacaatggagtacttatataaaattggtaactgctttccgggaaattgacttcccttccccttgtcctgaaaactcaggcatgggcatatttcttggagattttctagttgaatcagaacttcctcttggtttgcgtagattccatttagacctgcattgtccagtgtggtagccgcttattgagtaagccacgtggcttattgagtacttgaactgtggcttgtccgaattgggactgctttaggtgtaaaatatacactagatttccaagacatagtatagcaaaaactctgtacaccatttcattaataattactatgttgataacatgttgaaatataacattttggatatattagattaagtaaaatgtgttcttaaatttcacctgcctgtttcctttttattctttttttttttt

SEQ ID NO: 81494 - DNA, 1691 bp, Homo sapiens
attacaggtgtgagccaccatgcccgactctttttaattcttaatgtggctacttgaaaatttaaaattacagatgtggcttgcattctgtgttggtaagctgctttagagcatttcttttaacaccaggagttcttcccctcatcatctttttggctgagtcgtcactgcagcgctcatagccccgcatgtacctctccagccagaacccttaggaatcatttggggagctccatgaagggcattgagtccaggcagaatggctaccttgagttcaacataagcattaagatggccattcgaaaacattaagcacagaagaatcccattcaggtaatcttctgttggctggctgtagaactacggagaacatctggagaaacacgtcaagggtgtgtgtgaaatcgttgagcctactcgattttgtcgtgctgttgcgcggttttcacttggcactgtcctttaaactccttctgtgccgtgactctgcagtgtctggcagcgtagtagactctactccctctatggacgtgatccctctgtgggttctctgcacacttctgtatttctcggttctttttggatttaggagtggattttatacatttttgagtcattcctaaagagcgattgacccttaaagaactgtgtacagtggtttcctttcagtaagaacatagttgtgtggcaccccctgacatgtggtgtggttgattcttcttccttgtcttccaacgccaccctcttatgagtctcttcctacccccacaggtgccgcttctctgtctcccttccctcagtctggcttttaacggtggtctcctgacatagtccattcaggctgctgtaacaaaatcccataccctgagtggcttacacacaacagaaatactgctcacagttctggaggctggaagtccaagttcaaggtgcttaccagattaactgtctggggagggcccacactctggttcacagaagcaccttttcactgtcttcacatgttggaaggggcgagggattttttttctggcgtcttttttataagggcactaatcccatttgtgagggctccaccctcatggcctaatcacctcccagagccatcatactggggattaggtttcaacataagaattttgaggggacataaacattcagatcatagcatggctggagttctgtcctgggctctcttttcactttccttgttctcatctcatccactggtaactgcattgcctcctgtctccacctaaacttccaagtatctccagcccagaacccttttgagtccaggacctgtcattcatatccatcccagaacccttttgaacccaggacttgtcattcatatcagaccaccacgagcatttcactacagcctctgatggtcttccctgtttcctcacttttgcctattttttttcttttctattccctcttaagtgggccacacttttgttcccctggttcttatgtcaggaatgtgggtgtcctttggacacttccttctccagttggataccaggccctttccctcccgaatggaatggaaatgctgcttcagctgtgttcctctgctcctcccccttacagcagtgacatagcctctctcctgctattgtgtcctgtggctccaccgagcactggggagcttttcagtatgcactttttttttttttggagaa

SEQ ID NO: 81495 - DNA, 1053 bp, Homo sapiens
cggccatctagtgtgcactttggactgatgagctcccctacctgaaatcctgtagcaagtccctataggataggcatgtggtacagtgtgaagctcctgagtggtcaacagctaccccgtgacaacatgccacactccatgtgccactccctcccgcctgcctgctgtgtccttggccccagtggtgctctcccgtgctgaccagccggcacggctcacctggccgaactctagccttgccttttcctctcaaggatgtaaaggctctgcagatttcgggaggcctgtctcccagcacctgatgggacactttttgccccactgtaaattctgggtgtatcctccactgtatgctgtcaccccaagggcaagcactgcatctgcttagtgaaggatttattgttcggaagatacattttccccttgagcagagagtagcgtatcctggcagtcttcggtgagccagttgtaccaggattatgaaatgcagatgtttactgtgtcattgttgctgtcattgctactgaggagtactgaccagaatcatctgcaactcttagttggcagagaggaccactatggcgggtagctcttttctttcctgccattgtggggatgattccaggccaaagatgatggagaagtatggaaatcatctgaaaggttgaagcttggcacgtgaagccattcatgactttgtaaggcagttttgctgaaggccagttctgccctgggagggacggaggtgaatcctcctgagtacctgtggttttcttacttcctgctgaatttacctaagtgcctgttgtttgcttgctgtggaggctttctggtatttcatttcaggtgcagatgccttcactttcccacaaaaaaaaccccaacaaaacctaagaccttactgcaactaagtctccaagtactttttaacccattgggatgaacagcctgtggtctgctcagatcaccctgagtgcgtgtgagaaggcctgggctttgccaggaaatccaggaaggcagggccgggctgtgttggaagctggcttagctggt

SEQ ID NO: 81496 - DNA, 1859 bp, Homo sapiens
gcagtggctaacacctgtaatcctagcatttggggaggctgaggcaggaggatcgcttgagtccaggagctcaagactggcctgggcaacatggtgagaccttgttcatataaaaaaatttaaataattagctggttgtggaggcacgtgcctatagtcccagcactttgggaggctgagatgggaggatccgcctgagcctggggagatggaggttacagtgagccgtggttgtgccactgcacttcagcctgggcgacataatgaaatcctgtctgagaaaaaaaaaaaaagattttgtaactaagttttatggctagctttgagaaaggaaaataataataaaaaaagaatgtgtaaatcacctgctggatggggggaagaggggcacattgtctttgtagtgagacttcactcatgtgatgtgcagtatttcatcttaacattttttttttaaacttaagctacttgtgaagagctgagatgtttctgttaagcactgtgtggtctgctgctggtcttctgcaggccactgttccccagactgctaagacgatcatgacacaggcttgcattttcaggtggactcttgggaggggcttgtggaccctggaggagaaggcagccaggagaggggcatctggctttgtgttgttggtaggaacttgtctcggttgccctggaaggcctctgctctggtcagctgctcccagtgtgggggtgatctttatttagaagggggtcacatgcccccaggcctcattgctatgccttttatagtcaggcgtggagctcacattctcttctgcctgattgccgacgcttgttgccgagatggtgaagcagtttgtgtgcaggttccctgggacctggcttagcccacctcatttcttggggcgtgtgccttgtgcctcaaagactttgcttttggctaattgtcattagtgatggtgtcaccatcctgggcctccttcagaagtttttaatagggatctcgtctaagagaccaaaaagctttcagaaccactgacttgtggtgatttttgcatgccaagtatttggaaaatatctggagccccttcagctctcaccagttaaacctatttgtacaattgttctggtttcttcctgtgcttgaaaagcctctttctttgttgcgttaatacctctgtcttgctttcctcatgtgtatgccagtgtgacattctcggcagagtggggatgacgtggagcgtgtgggcccgtggttaatcttgtcctgaattgccttgctcaacttgcgtgtatagggtggttcaaaagttaagtttggctggtggtgaagttggaagcatcacttagaaacacgcctcctttgggcatatggtgtgaatcagggactctggctataaaaggtggggtctctgagcaccatcctggttggaatgttcccctgacttggaggtagcgagagacagccaaggtgtttgttccagggaggctggtgggtgggagatgggatttttctgtctgtggcacaggcagtattaagtagagcaggctgtttaaatcacattttaagtaaaaaccaaagtgcacagatgatctgcagaacttctgggggataagaagctgctttcctcgaagaagttcatctccaaaccagcgcccatggctcagcagccagcatggcagccccaggggtacatgggacttgggcatgtgaggctggtgagggacagggacagctgggtccagcagtgcctttcctagggacggttgccacgtcacctgtctgccctgtacttccatttcctttctttgaactcggggggcttgcatcggactacctgtgccgtttcctcaaactctaaaattga

SEQ ID NO: 81497 - DNA, 1068 bp, Homo sapiens
cagctttcccctgcttgttttccccatggcatattaacagcgagatctgcaagaatacatcattttgtacagaacaggatgtatttcttttaaactacgttcctgtgtggacaagtggtatcatatgcaaaggtttaaggaccgttgatgccttgagatagtgccatctgtttgcctcaggtatgtggtgctaggacaaagctgccagacctcaccttccttcagtgagacaggaataggacagtatttgaaaagcatctaacatgtttccaagcacataggtttttggtaaatggtggcagctgctgctattttttttttaaattaaactatctaagagttgcattctaagaccatctaaaattctgagtcttaagctgtgttgactatatatgttcactaccataactaaatggtccttctgtattgcttttctaaattgtagaatttcaattattgtaaatagcgggccatactgtaggtgtggttcttgctaatttgattcgtactgttcaaattcttgtgtctgtccagataaactgtatctttacagaacattcagcgaggtacatatgtctatatcggggtgccagtggagtcaccctagtcatatgtaaactctatttatttggttccgaaactgaatttattttgtttgcaagtttggtatttgggagcatttaagaaatatccatagattcttgtatgatactgacattaaatcattaaataccatattttttaaatgcctctgtctgtttgcatggataacattaaagtggttagagtgggcacagttattggtaaagattacaaagatgtgcatttttatgacaactttaggtctcacataggtagccaaccatctgctccaggatgaagcatgtgcctgtttatcctcttctttggtaacgctaggtatatgtgtgcacacgtgcacgtgtgcgtgtgtgtttgtgtatgtgcgtaccactttattctcccacccagcctcttctcctgttttgtttagtttcattttcctcctctcacccccattgcaggaaacaaacactggctctctgtcct

SEQ ID NO: 81498 - DNA, 1748 bp, Homo sapiens
cagatctgtgaacccaggctgccattctggatttccggatagatgcaaagtgcttggacgtgttttagcagctgctgagaccaggagttgggcttagtagtaaaaagggggaacaaaataaaagaagatcaggagacaaagagcctacagtacaaaaaaggaaagacgaaggttgatattattagaaatacttcctgggcagccttactgtttgaattaggatcacccccacccccacctcccagaggtattagttgtaatgcagagacaaatggaaactagtcagatccttgggtcctagaaaagaccagctttgttcctggggtggtaacctagtacaacgtttccgttcctatttcttgacctctgaatggccccttctgctttgctaagtagatgatattattaggtgcttagactattcttcagataggatgtaaggatatatttttgttctcttcctcagtgaacttgaaatgattggattattttgtaatacgtcgatactacttttagaagcttttgaataactgtgtcaaagaagctttagaagaggttttaagcaggattgcagagaatgtactgagtgtgtttttccactcacaaggaaagacagcagctgaatgcagaagtgtgtgtctggttctaactctttatcacttcagggactgtccaggcagcaccatccgttgggtctcctgcccttcctcctcccacccctgccttacccctggccattcttttgtgaccagtagtcctttatgaatggaattctgagaatgtataattttctcagaagaatgcttctttagctcaccaaatatttcttgtttgctgaggggggaaaaagatcctccttggaaaagtcactgggtgccaaaggtgggtgatgaggagagatgaacttctgggtgtgcctagcaaagctgtttctgttgataggcgattaacaaaacagccaaacttgacctaacagactgccattttgagaggaatttgttttgcaggattaattggcttcgaggtgtactggtggctgtgcagtgatgacggctgtcgtgcctcctgtgtcttctgctcattgtgatgcagggcaagtgcttaggcctcagacacaggctccctgaacttcgtgttcagtgctttagggtggggggacttgagacccttgacttgactcggtcccactggaaagcttctgttgcttatttgggtaaccccaactctatcttattgggcggtagtgttatcctaattcttggaaatactcagtgtagaataaagagctgatgaaaatgtgtaagaagggagtaagtggtcattagagagaaatggtaattgggatgatgctctgaccccttcagcaaaaaataaaaggtgaatggtttattatgagctagttcagattctgtttttggaaatgagcttggttatacatagtgcatttgaaaagcgtgaagcatggactttcagatgccagctcctcagcctcctgtaactccagtcgcaaaatccctccagtgtatctaaataaatgcaaactcatcagtgccttaccattataaagctgggctggagaggcaggtggcctggagaatcaaatgacaagaagtatagggagcagcccagcttcatgatcgggggaatttgcatgaaaattgtgtacacttaagcaccattgtctattgcagaaagcacgatctggcctcttctactgactttccttccagctctgagattcagttttg

SEQ ID NO: 81499 - DNA, 1012 bp, Homo sapiens
taggaggtggctgcaattggaaagttccagagagcttactgagggataacggatgtaggacaggaggctggcaaagcacctcagtgatagggcagaaggaaataaagtggttagggaaggagttgagagcaggaaattcaggtaggattgatgttaagtcttagatctttgaagtgactttctctggtctggcttttgctgttaccaaagtgaattattcataagtgcatatgagaaatgctgatgtaactcgattatgtggaatgaatttaaattcatttaagtcattcttttccactaaagtaagctttccctcatccagaatctgagcagcccgatagccaagcaggagtttccttgtgccatggccagtgattgatgtcttcttctatgatgctgctgaaatgctggggactctgaagcgcagctggagtgatcaaagcaaaattaaaatactttctcagtggtttgggagttgggtgcgttctgctgtattttttggttttcggcatctgggtttggtgtgcatgcatggtgagctctagctggagcagacgttacctactgaggctacgctcttcgtggtttctccttaaccatcacccacttgatcttccatgaagccccccaaatcttccttactgaggactcttgcttccaggttgcttttgtgctcatccattgctgggttatttggtcagtgatgatggtttctctgtactttttatcagtaggttcagaggaccttgtttactcctcattcatctctctccccaaacagttgagaaaccacttgtgggttaggactcatgctttgtttataatgtttgattctccaacctcacagctaatgggaagcccgtggaggagatactctgtaaaaatccatctcccatgtgggcttgaccccacttagtgtctgagtggtttggtcctcatagttctcttgggggaggaggaagggaaggaggaggaggtggcgatggcagtggcagcagtggtggcatcttgg

SEQ ID NO: 81500 - DNA, 1319 bp, Homo sapiens
ggtcttctctcagggtagtgcaccatgagagggagcacctgtttacattttgtatcctggacaccaatcttgccttgctctggtgctggccctgagaggtgcaggaattttataaagagatttacaaaacatttttggatgaccaaattggtccctggttctagctggaatgaataaacaaactaaataacagtagagtgtgagagtaagtgtgtgtgctagagaatgtgtgcacatgtatggcctaggtgagttcttcactttgctgacttgtgaattatttggggtcctatggtcctccccatcattcttattcatgtcagtccaccatcattaaggaagtggaagcgaacacattgtgtacatatcactcccatagagagggagactggggaagaggtttgagttataagtcgcacctaggttaggtctggatgtgtctttgcaggtttccttgctagttccttggccagagtttccatcgtgtccctcagctgcacaattaaggtgcccccgttttgtgcaagtctcatgctaggcagtatgagatgacacaaactaggattctgttgtgagataagataaaaacacttgacatttaaaagagagagacaacttatgcggtgtgacgagacactctacgacttttgccagaagagaaatagaggcaacaagtgctaggagctcagaggagggtaagttccacatttggaactttggattaaaagaatatttgggtctggttgaaatcgaggcctttcatgagaaatgtccacacttgctcagtactgtttgccgaacactgtatacaaggccctcgactcgtgaatgagttgtaatgcaaaactttgccaggcatttggaatgtggagtatactattttgtaaagatgaggtctgaatggtggtttaggtcccaggccagtgtccctctgccccccacctccatatgtgccctcaagccggtttggcttagacattatttatctctgactactgtgtacagcttagttccatggggaggaaaaggcttgatgaaccctaccctggaaggctggtggctctgttttctgatggatgaggtaggagtggtggaaagctggtagtttctactttgtgcctgtttaaaaagccccctctgaggccttagcacttaacagatgttcaggattgggggaataaaggagctgcctttgcagaggtctgtgggcatgcagtgggtgagagagcaggcactgagtgccccgagtttcctgcctgtgtgggcaggaggattctcagtggaatcaggagcatctccgcctggtgctggaggaggtg

SEQ ID NO: 81501 - DNA, 1382 bp, Homo sapiens
tgatttttgtgaagcgaggacttggggtcccaagtctaggttttaggttccctgctgtaacccgtggccaccgagagagagttttatgataaaatgtcagcaaagtacctgacaacgtctcacgctagaatgagtttcgtacatgtttagttccctctctttttattccacgctcccccaccccaactttaaatcagaaacgtgagggtgctgattgaagctttttataacttttcttattgagaattgttctctggagttgtctccaagaacaaaggaattccagacgttcttcttctctccttgtctcttctgtcctccagtcaaagaaaaactctgcatatgatctttggcctggagaaatattaaatctatgttaagtatgcagacatgaatgggcaaatgaaggatttgtggcaaagaagatctgccgaaacaaataagtcatgtaaatgggcagagggaaatattaaattgattgcatctttcagctcctggtacttaatgcaaagataaagtagtgggaaaaggttgtcatttgaaataatggaaagatgagggagttttgaagctagctgggatttttctgcctgttaatagagtgacttggattacagactataaagataaagagtagggccgttgcatttagtatggatcatgatgctgattgctgtctgagcaacctctgtactaagggaggagaagctaacatccccgggcctggaagatactggatactagctcattaaactcttgtgagaagccttcattagcattatgggaagacttgctgtatctatattatgaaggcatttagatttttttttaaatgcatgttcttaacattttttgtttattaagtggggcagtagattaggactgaatggatttgattctctcatcctacatagtgtgcccagaagccagaaggtttcccagaatttgtattatggcagcgagggcaaatttaattagcagataggaaaagctttggagcagtttaggccaatccatttaattgtatcagcaattaatattttgagaaaatggaaataattaaatttacatttcttctaggactttattttgttatcctttaaggttattgtaaatgaggagacttttgaactcacagactaaagcaaactacaccagataatcattaactttttctattgtgtgccacccttcccaaccagattgttccatagtatcacttatgaaccaagaacctgtgagcttgcaaaacgcatttttaaggagtctcaacttttctgatttgtgttaaagtttaggtgtgggtcccagaaatgagtttcatggaggggagaggttgtctctctgggtgggtaatacaggggccactgggggctcactgt

SEQ ID NO: 81502 - DNA, 1057 bp, Homo sapiens
gtgccattttctgattaagctgagacctctgtaatagacacgttgtcattttttcttgtgtctaaaagtttgcttgactgcagtgggtctccagctcagagcaggtctggctagagaaaacaggaggtgatgactggagcactttgcccttatggaacgtgctctgatgtagaaagcaagaggattttccttgcagtcactgaaggtaccttgtgtacacagaaagaagacagagggagccccggatgcctcggtatccctcagagccggatccttcagacctgtgcagtacctgtggatttggttagtcgatgatgcgctgccattaaaacaaaggcatcggccctggaatagagaagttcagtgagaacctctgtactccatgggcattttctaggaaataatttcacctgccctgtgtaattctctggaagaatcacagtgagttggaaggaaacttaagacttggaaaaggattgagaggttagcccagaccacaccagggctctgaaggcccagctggggttagaacctgggacaccctccagcccactgtctcctgttccctggccatttactgccccactcccctttctactctcaggggccctggatctaatgaggggattcgtgcagtttgctgcactaatacattgcaagtggtgccaacctaaaggtattctgatggtggaatcagagcagtagcatcttattaggtcagaatctgtatctcctcttccaagatttttacatgatttagtgttttctgaattggaaaaaaacaaaaacaaaaacacacaaaaaaaccatgtctaaatcctagcatttcatcccatgttgatgaaagggcatcttttttttcccctaatctgtggttagaactctcagaaacttttagaagatccctcctatgttttggaggtttgcagatttgaaccccagttcctcccacagtgcttctccaactcctggaatgaggtaaacctccaggcagcctgttgacccaacccatgcatgccggtctttgggactcctagatgtggaccctggagtgaat

SEQ ID NO: 81503 - DNA, 2931 bp, Homo sapiens
gctgatactatcataatttttaaattcccataggactcactgttaaaggattacaaggctgacacaaaaaatactgcattttgaatttgtgtctgatttatacatttccaaagagtggaattctcactacaacagctgttctttgaaaggttagatctttgttctgagataaattaagtggaaaaaggtgtagagcattatatgtactctgattcttcagggcttaatttaaaaagagcatgtttgctggtgaatgctggttcaatcattaagaagtttttgagaaggaatcccagaaagtaataagcacttatttttcatggaaaggaaccggaagtgcttggtgacctccacaggtaatcttgtattatttttgcactgtttggaattttttaaccatgtgcttttatttcttctattcttttcaaaggtcagtaggtgttatctggacaatagggttctggtctgttttctgttttcttcattgtactgtgcattaagaaaaaccctaatgtgcttttttttttttttaagtgaacctttccacatctcattgtccttcagtgagagcaggctgtgtgtgtggtcttggtgaactgtcccgttccctggagacagtatctgggggcctccctgcccttcccagtaagagctgggccttcacaggaatagaggcctaggattcgccttcatcctcttgaagagccctaacagtaggtcctggctggggtctggcatagaatgcccttggcacgatgtgtgtgagtgtgtctttccttagtaaatggccttgaaaatgccatgtgcttctggcaggcctggataaggtttgccctgcataacccttggaaagcacagttctcacttgtaacaccctgtctgcaggtccatgatattgtaattaaaaagttatgggatcacaagggcctatttaaagggcatctggtctaaaggcacagttaaaagcagaatttgtgtcagtggctcccttaatttctcaaatatggttctgtttctaaattcatcccactggatgtctgtgttgagttttctgttgatgaaagaatgtttaaaaatgaggcagatccaaattctaatgtctgagtgtaccactgcttaattactttgggcaggtcacctcacctctcttggaaagaaaggtgatatactacatctgtgattttcaatttttttttttttaactagacccacagtaaaacatagatatacaccatgatcccaggacagaataagtatataactaaaataagtgttttgaaatcacttcttgtctgacacagcactcacgctttctattcatgtagtaccacgatactttcttctattctaatgctggtaagagatgccttaaactgattttgagaactaccaatgggtagcagctagcggcttaaaaaggatgttattaaggtccttttcaccctgattttgactctgttggctctcagctgagtgccccatacttagtgcacatagagttggcctctgaggtcagcctcctgttttcctgtgaaaatgaggatggaagagagtcacttgtttccctccttcatggctaccccctgaggactgggaagaatttaagaatttgagtatatgttcccaatagcatgatgtgtttcattgttcatctgtaagcatttttaaatattcgagatctgtatcttgggtaatttttatcaactttttatttgtaaaataatttcaagtcagttattaaagtaacaaaaataatggcaaacttgataccttcccgtatttttttttcatatttttccttgaatgcttacagaaatattaaagaatattatcacatcattgtagtcaccgatgaattattttctggtggcttatgattagaagagcttgactcggagtggaaacagataacatttgagtgctctttctgttaattcatccttgtcaataaccccattagctaacttccagcaaggctgtgttaggaatgtggaatcaattagatgaattttgaaaataacttggtctgttctaaaaggccctatgagatccaaactgttgtggcctggtgcctggtaactttgatggccattttgaaatgttaccgtagtgataattcttctggaatctcaagtcattaaaagtgatatggctaactctgggccctgtgctataaaaatagatgtcatgggatgtgtgaatcctttcttcagtgttatagttaatagcaactgaaggaacgttttggtcaaatcccgaatacttattaggggctcactgcttggctgcatttttctcctctgcgtaaatcatctatccatgtaattattaacccctaagaatgaatagcatttttaaaagggttccattttcccctcatatgactttggttcattctcctccttgtttctgtctctcagtgaactttccaaaagatgggttatgatgaaaggtgaatcgtcgttgataactgctcttacttatctgtgtatcgaaactgcaggtagtgctcttcagctctgtggctggatttagtgcctcttctagggaggggtgggtgttggcacaaagcgtatcccatttccctgaatgtcgtgtggacacgtgagaggacagtgcaccctttgggcttggtgctgcccccttcacgctactgaaccccagggtcataattaaaagctgtgttagctcttctctggttagaggcatacaggttggaggcttgtacatagccgtgagccggttggtctaggccaggaagcaaaccattggaaaatgtggttagcagtgacagttgacagcatgtttgcctgcagtagtggtggttggtgctgcgtgttgactggagttgcttgcattgggagagcctgacttggccaagtgtgtagcttgagaccagttggattcctctcagagagacagtcttcaccc

SEQ ID NO: 81504 - DNA, 1133 bp, Homo sapiens
gattggtgtggagggggcaggggaagacttgcctaggagcagggcctcgcaggatgcagaggagtttgccaagtaccagagattgtggggtaggtgaataaaggctgagtataaggataagtcaattcaggcagatgtcctctaagaatgaaggtgagaatgctggcggaaaccagttgtggccctgtctgccttccctaggagactggacctgactttacaggcagtgacggtgaagcagggcagtgccacgagcagatctgtgtttcctgaagggtctctggcagctgtctggggaaggagggaagctggcagagccgtgggtggaggcagatgccattgctatggagtgagcatggggaagggggtcggaggccttttggagatagatacagcaagacttggtgaaggatgaagttggggcaggtagaggaaaagcaatgagcttacggatgactggagactgactggagaagatgaccacccttgccattaactaggataggaaacaacaaagggtaggagtttgacaggggagaatgtttgtgctgttgagttgttgagtttaggtgcttgtggcacgagcaaggggagtgagctggtctaggaggtttttggaaacactgacctggctgcagagagggagatcctgggacacctgttttgggagttatcccagtggggaaggatcactgggaagggggccacccctttgggaggggtcagtgggacgactcccaagggaagaggttggttatagggagttaaaagaaaggagcacccctcacgcgagcccatttttcaaggatacatgtttgtcttttagattctataaggagtagctgctacacagaaagatgtctacgtgtgggtgaacacctggcgtatcccatgcagggaggcttcagcagaccttggtggcgatggaaccaccacagtgatccgaggattgggtctgaaggctcctccgagtctccaataaaaggggttgttttgaagggctcaggttcttcctgggcttttttgggacagtcttgctctgttgcccaggctggagtgcagtagaggcaatcatggcttattgcagcctcagcctcctgcctctgggctcaagtgatccttctgcctcagcc

SEQ ID NO: 81505 - DNA, 1251 bp, Homo sapiens
acattaacttcgcagtaaagtcactgaccccgaacctgtgtcacttcaggcttagccaaatgctaacagagcagctcaaagcttaagcagaggtatgtgcttgctaagtaagtgtgtgttttggactaattggtgactaccattctgaacattaactgccctttgtgttttaatgttgccaggaggccgattgtgtaacctttggaggcttccctgagtttggagaactgaattcatgtggtgacttcctatttataatgtctttgggggagctatgaaataacttttcttctaagtgtgatttttgcttttttaaaagtttttatgttgttgtcaattgggtatttcccttctatgccaagacgaattgtaggttcaggtttctatgcagcctgtatgtaaacactggccctaaagaaggactctatcactctactttcagtttcttgcattaaaacaagtatgggtagcggtatccttcttatttctgcttcctggtcctgtgtgagaccctgaaaggtcctaatggcagtgctgattagattgtggccagggttcacccacaagttccgaagctggggaaggtggaagtgctgttaactgacttgtcccatgtctggggttttgcagcctggggagaggtgaccacccctcgtttcagtccaggtagggttttatgtccctgtcaaaaatgtgttgtgtgaagtaccttgactttcatttcccagggaagaaagcccgtttcaattggctcaagcggaaaagagcactgtgggtccacttaatggaagagtctaagagtggcttcaggaagtccactgggggctccccgtgactctgcccacctgcatattgtcttcattctaaggatccaggtggtagcaaaagggttgttacaactttaaccctgcatccccaccttcaggttcagtacccaagggtgagcaatctgttccagtggcacagacctgtttcaagaggtctctagccgtgatagtgctaggccactgccctccaccagtgtgttccagagaaagatgctctgatgtgccagcccaggccatgaggttcccggcctcagtaaggaagaaggaggacaaggtggtcccttaggagaaaatgtggatattcaagaaagagggtcgcaaaatagcaaacacccactatggctgggcagtacagggttgcagaaatatattttgatgtgtgatcgcattggagctacttcaaagagcaaacacaccactttga

SEQ ID NO: 81506 - DNA, 2626 bp, Homo sapiens
cttacagtggtgctctagaagccatgtactgcttctggcttctccttcctttcctccaaggctcctcctgcctcctcccaaagctctgtgccctgaaagagccttgagccattgctcagatgtcaaaattgtattaagcagacacatcaaattaaaacttttgggatcactcaccaatatggtttcctgtacagtactgccctgaggggggattacaagtagttatgcatccatttcattgatgtatcatttttattaaaaagaaaaacaatccaaccaagagaggaagtgtagccagctgcctaaagagtggcgatgatgggagatgatattttgattacattaatccatatcctgttagttcactttgcttctgtcgctgctgctggtgaagttactaatgtgaactaattacatttgctctgaaaagccagaatttttaatgcatctcagcaagaaaggttaatattatcaatttaacagcatgaatgaaacattgtgtgtattgaacttgaactgtcctaaaagcttggataataaaaacccagtggcttcttttataactcactggataaacagttattggtgagacatggataaggctttcttctctttcagttttatggggggtggtaggcagtcagcattagatgctgtctgtttacagggtgatatcgtaacttcgtgaaattggaggccacatttaaaaaggcactccttccttttaaaagctttgcaagggggctgcatatattttcctaattagtgggaatattttcttttttcttttttcttttttttttttgagacagagtttcactttattgtccaggctggagtggagtggcatgatctcggcttactgcaacctctgcctcccgggttcaagcaattctcatgcctcggcctcctgattagctgggattacaggcatctgccacctcacctggctgattttttgtattttagtagagacgacgtttcaccatgttgcccaggctggtcttgaactcttaagctcaggcaatccgcctatctcgggctcccaaagtgctaggattacaggcgtgagccaccgagcctggctggtgggagtattttcaaagagaacaacaattcaccacaccccaacatggtaacagtctttttgttttagaagcatctgtgaattgccaagactcgtagaactaagatgtattcaaagtcagtcgattttctggaaacgacccagtccctgaagatagtcttttggggagttgagtgttttgagagggacaccccctctacagggacttaaaatggaatggctttttgtgtgtgcacatggtacctgcagtgatttcttgtgtttaattacttcctgcactcatctgacttacacagtggtaaacaatgaggatgggaacaggcggcagctgctctgtgccatccaccgtcttgggaaccccagcgtggcattctctctggggcagcatgttgaagtgtttggctggtgacattttggtgaccagttggctcctcattgtctttcaatgtggagattaggaaccgagcgaggatttggaacccttgcgtttgttctgccaagaacatgacttgcctctggcctgagagcagtggagtaagctgataggagctagaaatactgttttgggtaggacttacccaaaagagtgggctgagtcacagaactcccaagtttgagccctgtcaaataaattctgaattgttctcaggtatgtttctcaattggaatttttttaaaaatttaatttaaaaaagacttcgaaaagttaccttgttctcatttttcttctccctctttgccccgtccccacaatatcttagggcgaagaaaagcaggtttgagaaaagctttttttcatcatgtatttgtaatagctggagcctgctgagatgatgaggtagagtggagggagaaagagaccttgaggaggtgtggagggggaaggggtggaaagttctgtcgtcttctgtgcctctctctctctcttgctcagggtctccagtcagccctctgggtttgtgcccttcgtgctgcactgacaggtcaaagccgactcaggcctttgatgtctgctctaggagcaaaagtgattcctggtcccgcagccgttcccactgccttgtgtatgaaggtctgctgctctgaggtggatggtggctctaggcaggctgtttccgctgggtgcggttgttgctgcaggtttttctatatagcttggtcatgctcctgtatctagattaaaatcctatgacagatgggcctgcttatatctaaacttattcagagagtcttatgataggcaacaggttaccctttaccggggtaaaacatggtttattctacagtttggtcccgttgtaaggccaggagatagagtctcactagtttgccccggctgaactcaaactgctggactcaagggatccttccgactcagcctcccaattagctgggactgttggtgtcaggcacacaccaccttgcctagcttgaagatctttcttctaaatgagcgggctttaaagtgatcagtgggacctgggcaggttggctcttgcctataatccaagtgctttgagagaccgagacaggaacatc

SEQ ID NO: 81507 - DNA, 2060 bp, Homo sapiens
agagtttgcattgctttaaaaacattggttataagtgagtgtggaaacagtgtgttcactatttttatgctgtggctgtgctgtgcaggagctgggcttttcgtgcattttagacagaattgaccttggttaatgcttgacttgggaactatgcagaaacatccaggaagtggtggtggctgatcctgaccgtcctcagttttgtgaagcaacagcctctgtgcctctttctctgcatgctctgttgacggtctagtcttgagagagaacctgctgctgtcccgtctgtcatagccttcctagcaactcttaggcctgcgtgctgtgttttcatgatctcccccaaagcggcactttgatgttttttcagagtcaaagtatcactgtggatatttatcccaaacaaaattgcaaactgatcaaatgttatgtcttttgataccaaatcaaaaacgattcttggtggctgatcaggttgtctcctaaaaatttgccttttgaacctatactgcctttatgagatgattatgaaagtagaaaatagcctgtgaaaaatggtacctttgctaaaaagaaaaaaaaatttttttgaaactaagagtctctgttgtccaggctggagtgcagtggcactatcttggctcactgcaacctctgcctcccaggttcaagtctcccgagtagctggaactgcaggtgcacgccaccacatgtggctaattttcatatttttagtagagatggggtttcaccatgttgcccaggctgttctcgaattcctgagctcaagcagtctgcccaccttggcttccgaaggggctgggattacaggcctgagccaccgcgcctggcctgctgtaagaaaatattaaacttaggatgggaaatgtgatctgaacaggattcctgtgaaggtacccagtgtaggtcttagtctcctctccagtgtacatttatggaggggcaagatttcaccattctgtgaagaactctgcgtgttgacgactgctcacgcctagggaataaatttcagagcatgcgtagatagtgccattttctacttaaaatactataatccattatttacttcggaaaataaaagcattaaggctgaaagttttgggttagtaatcttgatgttttaaaatgccttagcattccttcatttgttttgcttgccacgtggttttgctctgatttacacacctctgtgcatggctaatccactgtgccactcttggggctttattaactcttctctgccagtttttcccttagagaatatcatggccattctctaagatgataaatgggactaagagtaaatgcaggctgaaaaagcatttaacaggtcaaggatctgaagcttttaagaaggcaaaacaataaataagaaacccaaacagagtcttgaagcacacccatcgaaacccaagtttcagaatttgctgcagccttgctgccaaatcacagtaaaagctgaaaaggcttttgtggttagttacgtgtgatacaagaaatcgatgtgtctgagagaagtaggatttctctttttgagggggaaaaatacagcaaggggaaatgttttattaacaataaatatgcggcttaccatatctgtagggcacagatttggttagtagtattttggaggcaggataaaggaagatcctaaaatctctgtgctgtgtagcttccattcgagctgcacatgttaaaaacattctaggatccacacagtttaaacaaggtggctggcttaggaaatgcttctccccattccttggcatccccacaaccctattcccctactttctcttatgtatctggactggcttttaaaagatatttagtgaaatttaattttctagggaaactccactttgtcaaaagtgtagtattcctcaaggatagctttgctggtcggcaaatctcagttgagtgtatttgtggtttaaaaaaaattctttctgaatagaaatacaaagagtgataatgtttaacattttatttttttaaaaagctttacgctgtgtaaattgtgggttgacttcatgttt

SEQ ID NO: 81508 - DNA, 1345 bp, Homo sapiens
actttgtatatgctttccttgtttgatccttatcaaaccttatgagaagaaactaccattctcctcatttgatggatgaggaccctaagccctggagaggccaggaaacattcccagagtccctcaggaggaggactagtgctgggctcctttcctcctgttctgctgcctctgagaggagccaggattgaatcgtagccttgtcctctgacctggaggtctgggagtaactctcttatgacttttttagcctagtagaattgaacatgaacttcatgttttaagggatggttgcatttgtttgaatggtcacttctttttctatcagtattagctaatatagggagaaggaagtcatgcttctcaagtaaagcaacagtatctgtgtatccatttacttgattgagctttctactgaattacaggagttaaattatactttgttacactcttgatattacaaaatgatggccatgcctttattataaaatgacaccagttattctttcctggaggatgtgccttgtgtcactagccgcactaagcacttccccactagtggccccatgtggttgtgtgtcatcgctgactacctgttacaggtgaggaagctgggtggtgcagagacagaaagccggtggcccagtcaggagctcctaagtggcagagccctgtctcctgggttccttctcctgtctttcttgcctctcacttgaaataagagaggacatcagaactggcctgaatggggccctggtagggcaggaacaggacacctctgtggttttgttatgatgtcctgaggataaaggagtgaaaaaaaaatctttgaggaattgaagatttctttatgaaagatggctgaaactcctgacagcttttcaaattcatctttggagaaacttccgttttctctttcctgttccgaggcttaaagctgccctgaaatctacacatttatcaacagtctcttgtcaagactccagggagacaagaactcttatacattgctgttgagagtgtaaaacggtacaacctttatggaaggcaaattggcgttataaatgcgtgttacctttgacccagaaattctacttctaggaatttatcttaccaatacacctgcccacatacaaattgcagcattgtttttgatagtaatacgttagaaataacccacgtgttcttcagtgggagactggttaatacactaagatatatgcacaaaatggaatgctctgctgctgagagaaaccacaagtatgccctgcacccctgtgaatagatctccagtatattaggtggagaaggcaaggcaggcttcttttttgtaaagttaaggagg

SEQ ID NO: 81509 - DNA, 1408 bp, Homo sapiens
gaatggttacaaattgtttgtgtgtttttgtaattagaatgtaatagcaatcgtctaccagatgagctgacattgtaatgacatgaagtcagtaacaattatgccttacaggaaaattaattctgtaatcctatcatcccatattttgcctaagagattcgatttggctgctgctaggctgcttaggcaggtgacagcatggtgggacacttctcatttttctggttagactacttaaccataacgttcatggtgccacctgaaaaaataattttatcgttttagacttttaaaatatttttaggctttttttttttttttggcttaaaaaaagaatctgttctacttgggtattttgttctccttatttcttagtgaacaaagatatttgctcgacttctatcccagaaggaccatcctttcttcttccttttccttacctctaagggatatgaagctgtgagagggaattgcatatagcaataccattttgattccagtgaaagttcttacctttctcttttgtcattctcaacctcttacctgaagagtccattccctcagtatatagagcatctggaagtctaaggtgcaggcaggactgaaagagctgagaaaggcctcacatcaggtgacactggggcacctggctgtgctcccttgttggggggtcccttggcctgggcagttttgcgcttctccctgtttccctgtgccctgagactttgtgggtcacaggcaagggggctggcctccctgatcaagggcccttggcctaggagggcccctggatttatctagtccagcttctcgtcgtccaggtgcaaaactgatgctctgagatgtttagggatttgtccaagagcagagttggagccacagtccaaatcttctgagcctagtatggtattctgtcatccttggtttcattttgttctgttcataaaaattgcccaaaactgctgggcaaagtggctcatgcctgtaatcccagctcctcaggaggctgtggagggtggattgcttgaggccaggagttcaagcctagcctgggcaacattgggagaccctgtctcttaaagaaaataattgcctaaaactattcagggttaaaaatttgtctctaagcttaagaatttggaaaaactcagaaaagtagccacctataactccagcattctgagaacagttaagtgtattttcttctagttttttgtttgtttttgagacgggatcttactgtcacccaggttggagtgcaatggcgtgatcactactcactgcagcctctacctactcaggctcaggtgatcctcttcacctcagcctcccgagtagctgggactacaggtgtacaccaccatggccagctaatttttgtgttttttttgtagagacagggtttcat

SEQ ID NO: 81510 - DNA, 2025 bp, Homo sapiens
acccaggctggggtgcagtggtaccatcgtaactcactgaagccttgagctcctggcttaagtgctcttcccaccttaaccttctgattaactaggattacaggtgtgcatcaccacgcccaggtaatttctaaaaaaaaaagttttttgtagaagtgatgcctcgccatgttgcccaggtgtctgtcttgaatgcctggcttcaagcgatcctctcccctcaactctcaaaaggctgtaaccctgattttaatggtagtgtaaagtgacatgggatgaaggaaccgtaacattcttaaagtttccccattgttgggcatttgcattggtcccagttttttataagtaaagaaggctgcagcaaactctgttgtactacttaatctttgtcctttatttcaaattatctccctacaatacgtcccttgaaataggatttctgtggaaaggtatcagtttaaagctcttgacccatatggccaagttgctttccaaacagcttacctgttgagactcggacctatgcttctaaagcctatgtgtgaaatgttcacattgtctttgggagaagcttcccacgaataagaaaaataagggaagaacaaataacataattgtttggatatatgctgtggtttgtgtggacgtctcccaccctttcccttccccagcccaagtcagtcttctgtataaacaacttacataatacagactcttcactgtttgtattatacatgtattttgtgagtctgtgtcagtatttgtttacacgggaattagggcatcaggctgtcttcctagggttcctctgtgcagacttgtagacagtatgggttctttgcgtgctgagttgaggtggccccaaacctttcagacagttgctcagatacctggcagttgctcatttacccttccagaccttcctgcctctatattagccaatgacaagcagatgctttccacaaaacattcgtgtgtgaactgttgacatttatgactgttttctgagcccacaccaggtcatttttctataaaatcagaactgtgagagctcagggcatgtggccatcctggataatgggtcctgctgtctggggagtcgttttcatcaaaattcacttttaaagaatagagtgtttattaacgaaaatatgtgagccttggctgggcactgtggctcccgcctgtaatcccagcactttgggaggccgaggcgggtggatcacaaggccaggagatcgagaccatcctaacgcggtgaaaccccgtctctactaaaaatacaaaaaaaaagttagctgggcgtggtggcgggcacctgtaatcccagctactctggacgctgaggcaggagaatggcatgaacccgggaggcggagcttgcagtgagcggagattgtgccacttgcactccagcctgggcgacagagcgagactccgtctcaaagaaaaaaaaaaagaaagtatgtgagccttatcccccaaatgtacctgacatgtgaataatatggctcaaactaatgatgtgtataatattaaattgactttgttattataagtgatacataattcaattttagttaaaatgcattatttcaatcaatatcaaatattgcagaaggaaaacctaaaatagtagccaaagttactcagatgagataaagaatatgtttagggctggaaaatcatactatttttttttttttttttttttgagatggagtcttgctgtgttgcccaggctggagtgcagtgacatgatcttggctcactgcaacctccgcctccagggttcaagcgattctcctgcctcagcctcccaagtagctaggactacaggcacgtgccaccacacctaatttgtttgtgtatttagtagagacagggtttcaccatgttagccaggatggtcttgatctcctgacctcgtgatcacctgcctcggcctcccaaagtgctgggattacaggtgtgagccattacgtccagcctttttttttttttaaataaagagggtctcaggct

SEQ ID NO: 81511 - DNA, 2074 bp, Homo sapiens
gtggtttcttgttttttctttctctgtgtttcactaatgaaacaggattacagtaaattgactcgtgtatgtgtatacatccatctttgctggtactatagaaaagtgtattgctggctgggcatggtggctcatgcctgtaatcccggcaatttgggaggctgaagtgggtggatcacctgaggtgaggagtttgagaccagcctgaccaacatggcaaaaccctgtctctactaaaaatacaaaaattagctgggcgtggtggcagtggaggctgaggcaggagaattgcttgaacccaggaggcggaggttgcagtgagcctacatcgtgccactgcactccagcctgaatgacagagcaaaactccattgcaaaaaaaaaaaaaaaaaaaaaaaaaaaaaaaaaaaggcattactgccttgttcctgatttaaataaaaaaatgtgttttaacaaggaatatgttaagttttggtaaatatagtttatcatatttaagttgtgtatactcattcatgttttaatttttatcggaagaggctgatgaattttatgaaatgcctttttggcatgatataattgtgagcttttgcttttatttggtggtgtaataaattacgttgattagatttcccaatattgaatcatctttgcattcctggaataagccctaatttgttatggtgtgataatctttggatatgttgctatttgatttgctaatatttttttaaaaattgtgactgtagcctacaaagccctacagataggggtctttagtttttttccttgtttgcattctatcaggtattgatattaggattatgttttttaaataatttaagaagaatttcaccctttcccagcatctagaagcatttacataatataggaaataacctgttttttttttttttttaagttagagtaaaattaactggaaaacttcataggcatcccctgtagtcccatcccagaacattttaaaacaaattttttagtttttcagaatatattatagttgttctgttcagcttttaagccttttctctggattttgatattttctacttgctgggaaagaatttatctacaatttgagtttatcgcacagttatttgtaatattgttatcatttctctggtaatcataaccctttctcattactaacacatatttttgctctttttttgcttttttcccccttaatcaagtttgttagaagtttatatattttattgtcttcaaaaaactaggtatattaattttatatttatcctgcttttaatttcatctcagtatttaatttttattcactttttccattcctttaagtttattaagttgaatgcctgtctcatttgctttttagtcttcttaaaataatggcatttaaggctatacattttctttgaaaattgcttttgttacgtatttttggttttagacagttgatctcctttttgttgttttctagatggtttgtaattaaaatatttatttgatctttgattctgacattacttagaagtatgtctgtccttgaatttttcttttgcttaccttttgatattgtttatatgatttatgaatgcagctctgaggtatctgagaggatttattaacgtttacttgcatccaagtacatgattaagttttaattgctttgtggacattaaaaaattatgcccttggtaaaatgcaaaggttttattttctgtatttagtaaatcaaacttactgattgcattatagtcagatcttccaaattcatgtatgttttcagttgtcaaattgacagttaatgatgcaccttttataatttttttttttgagacagagtttcactctgtcgcccaggctgtgtagtgcagtggcgtgatcttggctcactgcagcctctgtctcctggattcaagtggttctcctgcctcagcctcctgagtagctgggattataggcacatgccactgcacctggctaattttcatatttttagtagagatgaggtctcactatattggccaggctggtctcaaactcctgacctcaaatgatctgcctgccttgg

SEQ ID NO: 81512 - DNA, 1041 bp, Homo sapiens
aggaccaagtatgtttattcaggccactgtcttccccataaagactatatttgtgtacatttttctttgctgtattgtgagaaggaggtagaaaaaagatgtgcatgtctgcatttggaaacagttctgagagtggtgctgcatcagcggggctggattgccctcaactataagaaagtgggatacttatataaaggaagcataatacagcatgtttctcttacaggaaggactgtttcttagagtcctcatcctctgtctccatcactcagtatagcaaatcatacattccatcaatgttaatgacatcaattgtatgcctgtaagtatgtacacacgcacaggggcagggggcacttcttcactccacagctggaaaacttgggacaaaatgcctagccagcttggcccaaatttgagggtattgccatctgtatctcagtgcaggtgtttctgtctgatgttcacagtctgtttatccagagtgccccagaaaggacagtagtgttaggttaaacctgtgtatgtctgttcttggttttaataacagtcctgtctttggaattatttagtgtgttctctcatttctcaggaagtcaggatgttagtgccgaagcacttctctgacttggtccgacattgaagtaccttcccctgcattacagaagaacggccccccagggggtctgtttgatgaacacatgtattattgcagtgagatactctagaaatagcttcatgtccttgcaaaattgccagcacaagtaaggacctggaaattgttgctatgcatgtatgtcagaagatttcttaaccaattctgtactgaataaaataaaatttattttcaagttttgtagggacctggggcaatatgtcagatagagttgaatattttcaaggcatttttagttcatggggcacatagttggcttaagatatctatgtgtatcaggactgaaaggtaaagtgcccgaacctgctaatgaaagaggtgtctgtgtggccatctgaggttcagccacaatgtgtcttgcagaa

SEQ ID NO: 81513 - DNA, 1055 bp, Homo sapiens
gctgagtgcatgtcgctgcggcattgcaggcgtgtgtgcatgttggctcttgcaacggggcgtctgccaggggttgtctcgggcaggagaaggaggccagactggcaccacttgtagtgattggaatgtgtctagtccagctcttcagttccatgtaggaggttttaggatggagattgtgttttgggaactccaagtcactgtccaatttggagagtattatgtaagaaggcttatgttttctgattacccatccttcgatacagaccaaataataccacagtgataaaaatgggaaaggagctgtcgctcagctcttcttggccgtgttgtttgcttttcgatgtctaatttatgaaagcatttcaaagtgacatatatactgaacagcttcgtcttgccaaatgtaaaataaactggagatgagtttagcacagagctttgtagattgttgtcctcttggtagagtcggggcctaaacaccacctggcctctgtgccagtggacaggtgacctgcctgtcctactgctggtctctgcagctctctgtcttgggcaaccctggctctgagttccagagtgttctccagtaggagagtctgcaggggcactgtggagcacctgggtatgtgcacatctgttgttggctggcgttgtctctgatggcttggggtgtcacagagacatgacagtactgtcactgcatacctctcaagcttttgctgagtcctacatgagttgcaggggcagagagggagggagaaaacaatgcctagccacactgagaaaggggaaagtgctacagagtcctggaaggaagcgaggatggacatggacggggaagcattcataccaggcaggaaaagtgacttcatggaccagtcacagaggacagggccagggatcaaaccttccgtaatttgcctccacagtttgtctgagactggctacctggttgagtctgccagagccctgtgtgcaggtactaccactcactgtcacctccaggcaggaaaggccatgtgaatgcatgcatctttgcaggaacttgcccc

SEQ ID NO: 81514 - DNA, 1088 bp, Homo sapiens
agtcaccgtggtacacctgacgtggctgggactcctgattttttttttttttctttttgagaacaaagaatgtgtccttgtcttggcatggactgggtagccttgttcacctccccacccatctctccttattggtgaggcattgtaaaccgtgttaacaggtagcatccacagaaccctggaaaggttgtgaagtccctttggaagcctaagggttttgatctcatccaggttgtaatcttaaattctggtacaaattcccttgttacaactgggttaagtggttttaacctcttttgtgccttcattttgaatgcttagactggaaagtcgttcagagactcctgaccgaataaagcctacttccaaatgagtgggttgtccaggtgtgcttgtagatgtcacatacttctaacaaggctctgcagctgcgatgtcaccttgcccagcgtgacctcattagcatgtatgtggctttcagtggccatgtactttgcttctagagctttctttcccattctgggttcttaggagggggctgtgctttgtgtgtggccaggcagaagtccatgttttagcttttcaattctcttgaagaaaacaaatgttgttgataagaacacttgtcatggcatccgatttgttcttgtgagggctgtattagcaataaatagacatttagtttgcatatttaacacctcatcttctttcagcccacacgtcttcactacaggattagcttttcattacttagtagagcttttaattacctgaagctttcgtgtctttactgggatataacttttctccttattaaccagaaaaagtcacagaaaatcttgtaatttataatggaatggagtaatattcacaaacaggctttggcaggattttttttgttattgtgttttttgtttttgtttttttgttacactagttttatcacaagacaagaaagaggggaacttttagaaataaaaattatgtgctaaaataattaaccttcctgagtaacacacacagaatgttggtatagtgtttgcaccagaggaattacatatggaagaatgctgggatcttttaccaaa

SEQ ID NO: 81515 - DNA, 3904 bp, Homo sapiens
gtgggagatttgtttaaaaaatttttttatagaggtaaaattcatatgacataaaattgtccatttaaaggtgaacaactcagtgacatctagtatattcatactgttgtgcaattgccatctctatctagttccaaaatacatttgtcatgccgcaaggaaagcctgtaccccttaagcagttaatccccattcccctttccgctcagctcctggcaaccaccagtctgcattctgtttctatggattcacctattttgcatagtgcatataaatgcagttatataatatgtgaccttttgtgtctggcttctttcacttagcataatatttttaaggttcatccatgttgtaatgtatcagtacttcatccctttttatgggtgaataatagtccattgtatccagttgtatccagaagatttgcttttcattgcctaacttcagggcttcagacacctcaatctttgttctgagatggatgtaaacttaatgtatatctctctctctcacccaatgatcatgccaacaccttttttttttttttttttttttttttttgagacagtctcgctgtgttgcccaggctggggtgcagtcttggttcactgcaacctctgcctcccaggttcaagtgattcttgtgcctcagcctcccaagtagctggggccacaggtgtgagccaccacacctggctaatttttttttcttttctcttttttgtttttgtagagatggagtgttgccatgttggccaggctcgtctcgaactcctggcatcaagtgatctgcccgcttcagcctcccaaagtgctgggattacagacataagccaccttgcctggccatgccaacaataattatttagaagtatgttgagaatacatcccaataatagaagtgaaagctctttaaaaagaaaaatattcaaaacttaccagctgatcttatgtttcatttagaatggctgcattctttgcagtaccctagggttgtagaaattctcccccatgattgcacaacccactccttctcagccagtgtgcacctggagtcagctgtgtttggccttaaggtgtccatggtccagcagggagagggcagatgggtcagtgttgtcctgctagtgatgagtatcccatggtgggcatgctgatgccacgcaagggagagggtgtctggttctgtgcagtggcagtggtgcaaccccttaccaaggtaccgtggggacctgggttagggcaggaggaggaaggtgttctctacagactgcagggcttggaggcagcctgtcatggggaagggtgtggatgaagggtgagccgggaccccaggcaggtacggagcagttcaaggccgtcaagtgtgcttcattcttcagtcattagggtgtctctgaaaggtttttcattgaatcagaattcccctaattcacgaattctaaagcttaagtaaattcagtaataataaactgtcaattatccaagcgatgaatataaatccataaggtttttcaaatccccagaaatccctttcgtctcccacctggttttgctgagcgcctgtctcttctgtctcttttctgattcccacctttcacttttcctccatttttcgcttaatggatttatactttaaagtaggtattctgaaaattccaattttatgaatggtgtgacggtgagaactttgattcattgaaagataaaaataatcattacattttatactgcaagggtcatccttaatattcttcgtatttttaatatagctgcatgatttgagtagttgagttggggattggataatgtatttattgattgattaactctctgggggtccatacatacccctctttatatccctgtggtccctttttagtccttttgtaaaaacttgataatgttaacctctgccaaagttgatgcggtagttgtgagtggtgggacgcaagcgtgttgatttattcttggagacagcagaaacagcaccaccttcaactgttttgtcatgatcatcttgtaaccataattctgtgctaagtcagaattaatgttattttgttaattcaggttattgtgaaaatctccacaggaggttatttaagcaagtcacaaattgatgtttctgtttgtagaaaaactccagctcatccagccagccacattattccagggctgcatggtgtcagcgtagggaccaggctcggtgtagagaccaagggtgcctttccccttcctttccgcccgttaattgcctactcgcccagtggtaccttctgaacttttagaaatccagataggatttccacatggttcattagaattcatttatttttttccatctgtatttctttttgttgtactccctagatcattatttttagttactttttacatgcattggttaggtttttcatgtaatctctcagtaagcgtactgggggatgagtgacctcagtatttaaatttttcataggtgggatgaaatgtcttttctgagtgtgagtatttctgttccattcttcttttccaggcaggctctcattctgtgctgcagtttggattcagggagcactgacccttctgtcaggttgctcctgctatgaaggatggaagggcattttgatacatgaggcataactgtaattatccggtggggcttggtttgtgctgttttccacctcttcgtcatattttggaaaactgaggccaaaagcaaagttcattttcccctttaaaagcttctttaaaaaaatgatgaaagagctttatcaatgttttgaataacccagaaaatatttcttattgttgataatctgcagtttgcaagtgcagcgaatcttgtaggtagatttaccttgagttttttgaaacggtagaattaatgtattaaaacatatggtttttagttaaaataggatgttaaaggaatagagcgcacgaacaaaaaactttccacttgaacccatgttgtttcatctgacagtgggtatggtgtccctggcaggatagggcttccacctcctgctggtgccggtaggacagggaagaggtggggaacactgtgtctccatctcccaagcatcttacctcccaagtcagatccctggcattgtttgaatacttgcgtgtttgtgtgtggggtgatgttttcctgagaatgtggcaaaataatagaaggtcccagggttcctcagtctgcagaccatagctgagtggtgtgtgcctctagccatgaggtgaagcataggtgaaattcagatccataggaagacagacagactttgcaagttagtaagctaacttgctagaggaaacggtagactcctgtgctggctgccaactaaaaagcctttctccacagttctgttctcatgtacaccctcaggaccttggatgagcttgtgtgttcaggaaattgggcaccgagattttttttgtatctttgattttagttgatatgtagtccttccaaggaaagtattcgttggatgccctttctacactttggcattgtgcaagaggtatcaaattttaaagtaaaagtgcacaacctggccaggcgcggtggcttacgcctataatcccagtactttgggaggctgaggcgggtggatcatgctgtcaggagatcgagaccatcctggccaacgtggtgaaaccccatctttactaaaaatacaaaaactagctgggcgtggtggtgcgtgcctataatttcagctacttgggaggctgaggcaggagaatcactttaaccagagagttggaggttgcagggagccgagatcgcaccactgcactccagcctgggtgacaaagcgagactccatctcaaaaaaaaaaaaaaaatgcccacaactgggcatggtggctcatgcctgtaatcccagcactttgg

SEQ ID NO: 81516 - DNA, 1040 bp, Homo sapiens
agacaggaagattcttgatcttctttgtaagcaaatagcatcaaagagtaacatttctgtacctttgtggtatgtaccttgtggctaatttgtccatgaagggataggcattgtgttttgttgcttaagtcgcttaaggcctttaaagcatttccaaactcacctatttttgctctaaggggtataaggtgttaaaaaatgaatggaagttaactcattctcaccttgtctgctaacttccttttgttctttttctgtaagaactcataaagctgtatgcatcagctgctcccaggggccttctaaggcctcagtccaacaacagtgctacaggtgaggaaaggaaagaagacactatgtcatcatgtcattcttttagacttggtaagaagtatattcaagcagatcagatgctctcagaatcacagcgtgttgtactgctagtaattaaaactgaagtccacattgaataagaaataattttttattgattgctggcatttgtgagaaagggtttaattagaccaggatatggaggggacttatcgacagttccgttgtacattgttgacatggttattttctgtatctcattttgcctgggaatttgtcattctcttctattttcttatcagtagcactgcttttacacttattagccctagctgtttgtcttgcttatttaaacttgtacatggcacatgctcaaagatttttccaggcaaaatttctttaaagcaggatttgagattttctatccccttccgtctgctggattattccggtgagtgttaatctcccgcctttgtcttagcctctctgtggtcttcggttgcttccttgttctctgtagatctcctgagttggccattagctgtcaacagtcagcacttgctgcctctcaagtctcttcccctcctggctctgccctggttttgctctctgacggggatctaaattgggattctttccagtgtggaatcctgggtgtccaccatgtcactctgacttccagatgataatgagtgtgaccatgggct

SEQ ID NO: 81517 - DNA, 1014 bp, Homo sapiens
gactccttctccagctgggcagtcccaggtttgagtcctggctccactggaggttgtctgacttggaggttaataataacctgccttagtcccagagtccttagagggaaaataggttataatacctgagtccatgtgtatcaagccattgctggttccaggcccctggagcactcagaaatggatgacccccagctgggtcaggccaagtcctccctgctgtagcaagcgggaccattgcctcgttccccccacctccacatggaaggtgccttttgtgtcctgccccatctctgttttaacagtcacaagactgtaggcagatctaaacttgtttgcacattattatcacctggggagctttgacgattccaaagccaggctgccacccccacctctagaccaactgaatcaccatttccaggggtgggactgggcatccgtgttttcgaggcttctgggtgagtaccttgtgcaaacaagttcagggaccgttgccctagacactgttcttcccctcatgtctcaacctgggcctcctaccactgccaccaccacagctatgccacctgggatgtgtcccaagcccccacttgtcggggaagcagctggggaggggtctttggccacctctgcagctataaggatcagagcaacacctggcttctgtgcctgtggcccctgctggtgctgggtccctggtccgcactgaaggatccaggcagagtacagtgggtctcccaggtcagaatcccctgggttgcttgttaaagctcacagggctgggccccaccccagggtttccgattcagcaggtctcgggctggttggatgatgagaatttgcatttctgtcaagttcccatgtgatcctttttggggtctgggaccacactttgagaaccactggtctattaaacaaatctttgcaaattagggaggtgtgttgtgggaggaagagactgatagttgaaagaatatttgcctaaatacagtgcctagtatttgccaagta

SEQ ID NO: 81518 - DNA, 1029 bp, Homo sapiens
cccaggctggagtgcagtggtgtgatctcaggtcactgcaacctccgcctcccgggttccagcaattctcctgcctcggccttctgagtaacagggtctatgggcatgtgccaccatgccgggctaattttttgtattggtagtggagatggggttttgccatgttggccagactggtcttgaactcctgacctcagatgatccacgcgccttggcctcccaaagtgctgggattacaggtgtgagccactgcgcccagccagattttatttctttaaaaaagaaacttactagttatcaggacacttgtgttcttggtacttgattttgtcagcattatttttaagagcctcttccctccttccccctacctccctgttgagcccaggctctgaaataacataggtgcatgtgaagttcccctacctgccattaccagacattggtgctgggcggccctcacctccacctcctctcacctgaggccacagcggtgtgcaaggatgtggtctgtcttgagtgtgttttcaaagcagctgtttggtctgtgccttggatgtttttccacagataagcccaaaagagaaccacatcttaaaacgcccgtgaccttgaatggtctttccggaggggcggctggatttgtgctctcatcgtctcaggtatgtgtcaagccactgttgtttcagagctggacacaggtgcttaggaaaattcctcactgaagggttttcaggatttacaagttcttgctgtttttgtgaccttgtgtggtttctggtttcacagaaggctttgtttcttggttcttgttgctgctttcagccttggcctgtaatcactgggcgccagggagggctgcggtctgtttcccggggtgtgctcagataccgtgtcagttcacatgtgttgctgcagcggcagggggccaggcaggaggggcgggtgtcctgaagcacgctcaatttgctgatcagggccttcacttggattttgcacttgccgcagtggagacattcctcgtagcta

SEQ ID NO: 81519 - DNA, 1031 bp, Homo sapiens
aagaccagcctgacaaacatggagaaacctcatctctactaaaaatacaaaattagccacagtggtggcgcatgcctgtaatcccagctactcaggaggctgaggcaggagaatcgcttgaacccgggaggtggaggttgtggagagccaagattgcatcattgcactccagcttgggcaaaaagaatgaaactctgtctcaaaaaaaaaaaaaaaaaaaaaaaaaagagagagagagtaaataaaattgtaaggtgaatatgttatctacttgatggaattttttaaactaccttgaaaagttttatagtttcctatttacagatgaaattaacatactaattataaatcatgcctcactattcactttaggcagtctatctccttaaggatctccttacggtttagatagataagtgaattgcttaatgtttttggaagtaataaaactgcatttctttttaattaaacaatccagataacaagaagtaattctaataggaaacttgtaggatgtatttacagaaaatctacacaatcttactgaacaatgtagaaaagaagatttaccagcctgggcaacatggcaagctttgtctcttaaaaaacaaaacaaaacaaaatttagccgggagtcgtggcatacaattgtcatgtccacttctcaggaggctgaggtgggaggactacttgagcccaggaggtcaagactacagtgagccacatttgtgccgctgtactccagcctggatgacagagcgagaccctgtttcaaaataaagaaaaagagatttaaatgaagcgaaatgccattttctctaggtgagaaactggaatattatcaatgtcacttcttcccaaattgatttataatttaaaaacaattttagtacttctgcagcttgtttggagcttgataaaatgattgtagagtttgtcttgaagctttaatagtgaggcaggtttaaaattgggggcaaaaaagaaatgggttttagggtgtagaagggacttgcctgatcacttttgct

SEQ ID NO: 81520 - DNA, 1083 bp, Homo sapiens
cacttttaaagaagaaacaaaactcagtaacacatttggataaaaacctgaatatgtccattttgggatgaaaggaagcagctttgtttaccatgttgaattaagtggaaaacatcttattttaatcatgattgatagaaatctaaatttgtaaattctgatttttatgttttttttacaatgaaaatacattttaaatgtcaccatccccttccccatgaagtcttcattacaactaattttgaaaatactctctcatttatttatattatatatgcatatgttctactgtataattttaaatacttaaatggggttatctttttgcattgttctgtatcttttttcagcttaataatttaccttgcttataattattgtcagtgcttgcggacctgctctttatgcatttttaaccattgcataaagctggaatgatggacatgatttctttaatcactccaaattagtcatttagttgtttccagttttttagtattacaaataactctgcaataaacgtgtcttgggtatgcattcttttagtttaaaatagtcttgttccttcagaaagttgctcaataatagacttagaaattcttttgtgctaattactgtaattgctcattttaagatctccttttattgttttcatagtatataatcctaaactgttacaactgaaatagtccttgagctaagaaagcaatgtggcttaaagataggatttctaaatagagacttaaaaattaacctttttggagctgtgacttcctgatgaagtggcagcacacaggctgaatatgttctacatctggatggcccaacatcatgatgctgtgatttgcgagaagctctctgcctgcctaggctgctggaggatggcaagttaatttatttgttgttgggagacctccccctgcccccattaaaaaaattattttgaaatacttgtagattcacatgcagtttcaagaaataataaagagtaattccatgcaccattttcctccaatagtaacattttgtgaaactagtacagtatcacagctaggatattgacgttaatatagtaaggatata

SEQ ID NO: 81521 - DNA, 2742 bp, Homo sapiens
tatgtgtttagaagggagcaagctgttaaacatgggaaatagttgctagtagtttgtaattttatgattacaattttaaaattcaattttgcaactggaatttgacttgattggttagtgccttacagtaattaacctccaaatcatcagaatgtcatcttgttatttaggtaattgaatctacttttcttgtatacagaatgctttttggaaacaatacactgtatatctagtttgtaccaagaactaattgtacacagtcagatacttgcagttcttttggacttgagtttctttatccttctatcagatgtcacaattccctcttccctttgtagcatatgaaagtagttgtgtgtgcactgtatttgagaatgtcaagtaatagaatctctagaaaacattcatgatttcagtcccaggtaatccagagttaaaaataatgttcataaggaagggtagcaaaatttagattttaatacttataggaggtgtgttaattggccccagggccgcaggctttagcgttcagaggactttagccccaaaggttttgtggaacttttccagagtcctcaccagtacattgggaataaatggaatgcctttggaagtactttgaagattgaattcgatagtgttggtaaagcagtctagcctgctgtgattgtgctattgatgcaaatattctctagcctgtattatttttccttggagctcaggaagtgatccccacccacctcaagcagtaaaggaaagagaggcaggagggtctgaccatgtgaggtgccccaataaagcatctgtattgtaaatcaggaatgtaggtattgggtttccttaaaacaaagcacacctacgtgaccactagctggagcacaatgtgggctcggtctgctgaaagagtcagttggttgcggctgtctaatccaattatggatggtcccagcgctcagcctttcagctgctgcccctcccctgcagactctgcctctctcaccctcccttttagggcttggtctgtggctaccccagaaatcacgtgcactcctaggcttcagcgagtacagccttgttaatctcagacatggaaagcaagttgcctaggtctacagatgagtattcagtttccccaccagttgacctcagtgcaggttttgttggttccagtcatttggggtcagcacctgtttgaagccaggacacttagaacaaggtggaggaaaacctgagggtacatacagtgtggtttccttggctcatctaatgcagagtcagaatgattagccacattgcaaattgtctttactcagtggtttaattgttaaccagggagttaattttttttttttattaaacaaagaagaaaacacctctagatttttctgggacagatggccccattgaaagaggccatgtgctgcagcgaatggccaggcctcgggtgtggcaagtgccttccagctcagtgcttgctttgtgctcctttgcctatttgaagacgtggatgaatcaaaatctataagcctatttcagtcaagtattctaaggaacctggaaacacaggggatttctctgttgcctctaatacagtgaaaaaccactgtctttttttgttgttgttgttgcattgggggaagaaagtccaggtttgcatgtacattttcactcataggatttttttttagaatagtttggggaggacattgtgctctggccaataactgggccagtgtctggtcacaagatgatcaggcaggtgcctgcatgactgtaggacagagaactgggcagctagagagcctgtgtggaacgtgaagcctttccccactttgttgccgtcctaaccttttctcaagtcatggagaattgatccttagacattccttacctctctcacccacttgaggattgctcagagcctgggtttcggattgaaatagcactatttctggttggtgacgacattctgtgagccagcaatgtagtttaaatatccacaagagcgccctggttccatcagcgccccttcgtaattggtcatgagacttggacctccttcggggctgggactcgggcaagggagttgagtagagcttctctttctgggctcctgggaaggattcatggcataaaagtgggacttcagcattctctgggcacacctgtctctgtttttgtcctctcctgaatctttctggcctgcagagcagaataaagtcactctgtgccaacctgacttttgttcatgactatattaggggcatggatagaaagtgcccccatagcactctcagataaaacaccttcaaacaaacccagaaacccatgctcacaaaaccacccaccttaaattatgaaactttcaggctgactaaatcctgaaggcgttggagcgtgagcaaagggaaaatggtgacacagagctttgcccttcctaatccaaatgaaaagctctgtaaccctccccccacctttgctatcaagaaatgttggacctttgggaagcagatgtagagtattgatccttaaaacagagacctctcaccctaggtctcttaaaacagagaccttaaaacagagtattgatccttaaaacagagacctctcaccctaggtctcttaaaacagagacctctcaccactttctaactgaagtgggttccacattggaagtactttgcagaaacttctattaccgcaattacttttgcaccaacaaatagtatcctcaactcagaa

SEQ ID NO: 81522 - DNA, 3956 bp, Homo sapiens
cataccttaaacttaactcagatcgtgattgccaactttgttctctgtgtgtaagtagttatattattcctaggttatggcatcttgatttatctttgaaagaagaaaaccctcactgagttgacagggacacattgttctaggcttctacaattgtgctgatgacgctttttcccattggaatgacagggatgataaggtcggctggctagcctttttttaaaatgtagaaaaccacaactttaatttatagcatcatcattttccttatgtatgtagtatgtttcaaaaataatccaatgtcagattcttgcttctgtgatcaaggtcttgtttttgccctttctttgctcaccacctccctgcccctgacgccgagtcctcgccttagaggaggtggtcagcttatattgcaacattgaaaatgttataccttacaaagaaggtgatatgccatttcttaattataatgatgtgcaacagtgacttctgatgtagacctttaacattgggccacgcagctttttctttggaggaggggcatttcaaattggatgatgctcttatagtttaataaagaaacaagcaaacaaaataggctatacagggcatgtgttcttaaactctgtgacagtggaggtgaacccagggccctttcatggccttgggagggtcctcagctttgggggcgagttatctgggtggaaaagcaccatgggaggaagaagtcagagaggcgggttgctggagctcagagaataaaagcaagtctctgccctgaaaatggccctgatttgcttcagatgtactctgtctgccaacatttagtgtctgtgacttagccaaaggaaatgtacattaactgttcagtttctatgtagtttgtgctctaggattttgcctccggaggatttctgtgaaggaagctctgttcaagtggctctgttccacttgggtttggaaagaggccgggacaggtgatttcgaaggaaggatgaggacaatggaggagatgggcttggtcattgcagtgtgtgaggtggcccagcttatctggcattttggggtactatatgtgccatatgaggtgggtatgggtgtttgaagggaaagggggtggcctgggcaacttgtgtccttgcctagaaagatcatcactctttttatttaaaagaaacatgtgaaagagccatcagggatagttttgtcctccctcttcttacaagtgatcattcccttggtagggcagtgccagaccctgcttgtgagcacagaaaacgccataagctcctcatgaaagcatgtctggggaagcttatctcaaatgcagtttgcacttgcaaaggtcctgtggtatagcgggggagcaggggagatggagtctgggagcggtgaaggctgggtcactagctggctttgtagcctctgggcgtgttgtttttatcctcagaggggccactgcacctgctccatggtctcttcccacagcagacccttctgtctctgtgcctcgaggggctatgtggaaagcagagaaagactcaaccagagtcttcccttaaggaaatcggaaggaaaacaaaattaacggcattagaactgagtatgtattaaaacttctactgtcttacaaaatttagttttctttcttatttttctttccatgttgactcagtaggtaaatggactaaacacacattcatttagggcaggaagaacttcatcatttgattacctttagttcatttaccttataatgcctaaaacaaagcagaaagtgacgttggttaatcaaaaagatcactttcttttttgtgttcttttgtgctattgtgagatgcctcttctccagcaagctgtagttgttcacaaagtaaagctgttcctaagccttcattagattgaagcttgtcccagactttctttaaagaagtttgcatagcttagttcatgctcagatgattcagtgatgatgatgggttgttggttagaaattacttaaaaatgcctaatacattattgactgataaatgttaagacatattctttaagggtctaaatcctattcttgtggagctgcaaagatcttgggggtgtggttgcccttgtctgttgcatcatctttcaaatgcaacagctgtaatgatattctgtatcttgaaaaacttaaaaaagcaacaactaacttatttgtatcttttcctctaatatttagtttttacttcacttgtaacttattacatgtattaaggagtttatttttatatgacattttactcataaaaggatgaaaccaagattggtgatctgttcacatagattaaaatcctgtttgtgaccacttaggtgtgtaatgtgtgacttgtggactgtgtcagaggaagattttccaaccaaaagtacccattggtatcacagatgaaaagtccttataccatctgaaaaaaagtagaaggtggggagaagcttgaaaacctaaggaggccattaggaaaggctgtatattttctgattccgtttaaaattttaagttggtgaaaatactatgtgatcgaaggatgaacatattttagtaaatagagttatagtgctacaatgagataaatttcacaggtaaatgtgacgtagctaatgcataatcattctttgtgttgcatggcaattctgtacaaatggaaggtagcatgtttaacgttcctgttatttcacataaatacagactgagagtttcagtggtctggtttgaaagggaagaaatagaagaaggaaggagagaagttggcagaggagcaatctgctctaatatcctccagtacacaatctagctataggtcctcacctggcagggtttgaggatcagaatggtggctcaggtttagacaattctccctgtttgtggggcccagcagctagttaagagaaaaatcttttttccttccctattaccctataaggtccccaaattcattgtatgtagaatacttgagtcagaataactttcctaacacttaggtttcaggtttgttaggtatgcctgacagctctcttatcaactcccatttatttgctaatctaaatgaaagtttgatggtagagtattgtaaatgtagggaaggtgaagtgttcaccttcagatggtagctatttatctcagcaagaagagcagatgactaacacccaaatacataaccattattatataacttagcatttataaggcatttctatgcatcctgagagactagagcactctcaaatgaggtttcagagtaagattaatctttgcaaatgaagacaaattagcaaaatcttcctatttttaaagtgtgccttttgatttgatacctatttatttgtttggaaagaagcttttaaaatcaaaaccatgaatctgtggttatcttcaaaggataaattatggtaggtggttgttacccaggttaccattttaagatgattatggctggcccaaattaggggatcttttcatatatgtattatatattttaacttcagtcttttaaaaatgaatattcctaggtggcatgggagggtgggaaggtcaaaagcccaaacttctcttacttattggctgcttccttgaacttagcgtttttcttttggaaaagtgagcttttgtttttggatattttgtactgatactctgtgcctacacagattttgttttggttcaataagagttgatattttgccaggggttgcctcccatgagattccaaatacagatgtaagtttaacaggcttctgaactggatgtttctatgcgctgaaactctgtaaacgcgtgtagctttgtctaccattgtatattgctgtattgatttgttgggttgttttttttcttcctcctgaaaagctctggtctgtcctctgctgatacaaagactggtccattccccagggtcactgcaagagaacctccagggcctggccac

SEQ ID NO: 81523 - DNA, 1567 bp, Homo sapiens
gcagccgtaacaagtgtcctgggtattcctccctagaaaggaaatgttggtcacaaatggcagtgtcctctgcattcagttcagctatgtgactgaaagacactgttcttcagcagctgtgagtttacaagatgtcgcacattgagtatttttctctagcttatttagaaacgccagtctagacttccgcagttttggattcgtggccatagttttggcctttattagatggccctcaaaggtacttttcaggtggacattgatttcatgccagctgtcagagatgattttccctagaaatggctgggtatatggagacattctgtattagaatggaggtatacacccatctcttctgtattagagagcaggtgttgccccccgtggtgctcagattgcttagtgtgagaaggaaaagaccagtgataagaggaggaaaactgcgccttccatgtagctcagttaacagcatcatgattctccaggatggccccatttctgtttttatttacaaaatggacttgagaattaattagtaagcaaactgtctccattaggtaagtggcattctgatttgtctgtgtaaagttccatttcccaagtaatgtgttccaaagcatttttatgtacaactactggaaactgctgtacaaatgtttgctgctatttggttgtaacaaaatcagtaatgagtttcaaaatggaataatttcagagcccttcatctacagtagtttgggaaacacttgaaataccaagtgatctgaattcactacaagctctccaactggaaaatgtgcctggtgtcgtcttcaagcaagaatcccccgccccttaaccactgctgctgtggacttgagtcttcaaccttgttttgtagactttagcatttgtattgtgtcatccttgacacctccccaaccccagccttcccagctttgattgcttaccttagcaatgctctcagcttggaccagaaggcacggatgtttccctgaccttaacctcactgtgtatcagctcaaggaagaagccagatttgctgatgttgtaagcactaaattatgttcataacatttaaccctcacatccataagcaaactaagtgggaaaatattgactattgtagcagtcatagattgtttaggaagcagcaaaaaggcaaatttttctttaaagttcaaaatggggcgaaagagggtaggaaaggaaaagtttattaagaaaattgtatactacattaatttgactttgccgtctagacttaaattaaattcatgtatttttttggtcttaacacattgacatgtatcagtaagttaaaaacttaaaaatacacaaatgattagattagcattattatgtgtttctttcttgttttttgttttgttttgttttgttttgttttgagatggagtctcactctgttgcccaggctggagtgcagtggcatgatctcggctcactgcaagctccgcctcctgggttcatgccattctcctgcctcagcctcccgagcagctgggactgcaggcacccgcaaccacccctggttaattttttttgt

SEQ ID NO: 81524 - DNA, 1071 bp, Homo sapiens
tttaccttctaatgagcatacttttgtcgatcaaacagggtgacctctctggtgtctctgcacactacctgtatggtctttgcgtagctgatggggtctcctgactagtgattggtgattttaatctggattttgccacagcacttattttctaacatatgacttaatttacttaataattgtgtctattgaatgtattcttatacatacacacaggcatgcacacacggacacgaatataagctttacaaggacagaaaccttatcttttatttatttcttccttgtgtatcctgagcactgagaacagcctggcacaaagcagggctcaggaaatgtttgctgaatgcatgttcacactggatgtgttcgaaggctctcactcgcgactcctgttggcttgtggagagtgcatctagctgtaaaagccatggtgcttggatgtcttggggtgctgagcctgttcccccctcatttgggggtgtggtgctatgctggcgtttgggtccatgccccgcatttctgatggctgccccatctgccctgtgtggggtggcagagttctgtgtacacagagttacatttcgttgttcctggcttctctatggatgacagcagcactgataaatgccacacctgctttctcagcagtcttgcggggtgatttttcctcttaaggaagtcacctgatgtccatgctgagtaggaaatgcatccaaagctttgggagctcagtgttggcccctgggctgcagcccgagccccgttttagagctgtgtctcccaggcagctgtgatgactgctcgaaagcccactcagggggaaggtaaacctgatgcccgggtgtttggacagtgagcatggcgagtggaccgttacctgtgcatagagttgttcatatgtggtgacagatgttgggctgttatttagtaacttcaaattgtttttctttgcgtcggagccatgtctaggttctgagtgcttctcccaggtcagatggagagctcttcatttggggttgggggagcggggtggtgttttcaggtgcccaaggcattccatgcacatgc

SEQ ID NO: 81525 - DNA, 1028 bp, Homo sapiens
gtatttcagttttctttagggaaggtaccacaactttgggtaactatgcccctaccccaggatttaagatgttttgatggttgaagggcgatgtttaagagtgggaccagagaatattgaggtattaaaatctcactaaatctgtattcattatatctgtattcatggtataattcatgtgcctccccctttcgtgagcccctcaaacatgatcatggatatgttttctccacccgtaaagtacgttcatattcatagaaaacccacagagaactgcagacctgaaggtttctttgtaagagctttcattggatagctagaagggctgcagtaagtttaaaaaaaaaaaaacccaaaccaccctggattccaggctgcacagcctctaggaggtgtgggtaatccctttataaagcttggcataatttctgttaagacttgcttattttgctctcagcttgctatcttgatatgtttgcctttgaggaggttagagttattgtgatttaatcacagaccatgtatttcgcaagattcatttggtatctccagcttgttttcttgtttcctcggctgtcagtccacaggcagaggtgggaggcggccggcatgggggaccgagtgtggtagaaaggagtgtttacttagcggaggggagtgctgagggctgctgttaccttcccagaatggctgatccccagcagtgatgagcaggctgggatcgtggtgttaaatttggtattttctagaaatatatagcaggctttcccctccacctgccccccttcaaggtttcgaagccttgtgttttgcaagagttgagaggggaacagttaatagcttggattatcttgtctctggagagaatttatgtatcaattcaccggaagactgctctggtattagggcaacaagaatggttttatttctcccttcctttcctgcactctgttcttatgtaattcttgtattaaaaccattcctggtaaattagaacatgctcttgtatttgggccctgctttgaaga

SEQ ID NO: 81526 - DNA, 1227 bp, Homo sapiens
tgtacttttatacagctggcagcacgggtttgtttgcaccagcatccccacaaacatatgaggaacatgtacatcttaccacggttgcaatgtcactaggcaataggaattttctagctatattctatccttacaggaccactatcgtatatgcacttcatctttgaaacgctgttagctgcctcatgactgtatttctattcctcagtcatgggctcaccatgcagtacacatgtgtggtcactggagggaatggaagaacactgaggaaatgcatagcctgtttcatatatttattacactattatttatttagaggaatgttaagaaatcttgcttttatgtagttttagaatgccatgaaatatctagttggggcattatctgccattttgcaaggtaatcttccacttctgaataacgttacaagtaacccgcgtttggaggactgatttgggactaaggcaaggaatttaggaggcacaagtagaggggaagaaataaacacatgacttttgtttttgtttttgtttttgttttttgaaagaaggacagtggtttgcttgttgattctgctttgagaggatggggatgcactccagagaaagtgaaacggggctatgggaggaagagagcagcgcacacacagcacctgcatttgattgtgaatgcgattgtgactccttaggcaggaaggagagtgctaagaccgtcatcatggacactcagaaaatacctgctaatccgtttactggaagatacagggagctgcagataattattgttttttaagatggagtttcgctggagtgcaattgtgcaatctcggctcactgcaacctccacatccccagttcaagcaattctgcctcagcctcccgagtagctggaactgcaggcgtgcaccaccacgcctggctaattttttgaatttttagtagagacagggtttcaccatgttggccaggctggtcttgaactcctgacctcaggtgatcctcctgccttggcctcccaaagtgctgggattacaggcatgagccgccactcccggccgctgcagagaatttttaaaataaatgatagattctcacagataagaagtacaggataattatttgccaaagtttgaaactgccattatattcaaaggcattctcttttgggagtggttttatatttaaggtttgaatttagatgacctcaatcttgaggtgttatcggagc

SEQ ID NO: 81527 - DNA, 1057 bp, Homo sapiens
ccaaaaatggggagaagaaattgtatctgatataagcgtggctctacctgggagaatggccattccgaattactggaaacaggaagaagacttgctatgatgcttccttatatctgtgggggaaaatcaaacttacattctgaaaggaaacttaatacttcatgtttttaaacacaaaaggatattttttcagagtagcagttataaagttgttagtttaatcttttagttcagctttttttcttaccagaaaaataattagtagtacaaaaatttatgcgtttgttttagctctattctgatactgttaagaagatacatgacataaaaacaggaatattttcagtcagtgattacaatttaaaatcatattcgaaatttaataaaaagtttaaaagaaatcaccagcataagatgttgtcatttggctcttggggcaaaccagctctcttctggtgaaagaactttctggatgaggtcgaaaggcaacagaaaacctggggaacaatggctgtctttttaatgggagttgctcctattcctggtggtaacaacctcttcctgttgctcctttccgaatggaattgcctcagtgaagttgttgaagaagtgaggagggcgaaatatgcccatccttctacagtggggagaggcctggcgcatgaaagcaggcctttgtgtatgccgggctgggcccatgcaaacagggcacaatcaggctattgtttgtttgggaaaagctatggcatcctattgcaattatttatggaagaaaatatttgatgtttttggaagaggttaggtgtggggggtgatgagggagggaggaaagagactgggcttacctcttgtcccattcactccaaatctctcagtgcgtaggatagggtccatctggtccaaaggagagttttgtgtgactctgtgtgttggagtgttttcgaaatgcagagaaattcagagcttctctagctttggctagagaaggaacaatggaagtgagtcttattctacctaagtttgatgtggggcagcctgttctgtagttgccttccaa

SEQ ID NO: 81528 - DNA, 2032 bp, Homo sapiens
ctacaacagtcagtctagctgctgggtggagaaggggagaaggaggaatagtggaaaaagcagggagaccgcttaggaagctgctgggaccgtgcatatgagagatgttggtggcttgaaccagtgctgggtttctcagcattggcagtattgacattttgggtgaaataattagttggggagtggcagggcggggggtaggggtgcagtcctgaaccagtgccaggtttctcagcattggcactgttggcattttgggtgagataattagttgtggggggctgtcctgtgtattgcaaaatgttcagcagcttcactagtctctacctgctagatgccagaagcccacccaccccgccccctagtcatgacaatcaaaaatgtatctagacattgacagatgttaacctgggattagggggtggggagaccaaaattgtaccctgttgagaaccactggaccagagtcatagcaatttgtagtggatagatttaggaatatttgaagacttgtaaaatatagcctgaagggaatggagactgggagagtgaaagatacctctgagacattttggcttggacagaacagggggtggaggcttccattcctgagctgcaaaggagtggggagggaggagcagtgtagtttgggaagtgtgtggtggagaaggcagatggggcaggagctctgtcttgcatctctcaggtcagaaatgcctcagacatccagggggggcaagctaagatggagttgaacacagcagtgtagggctcaggggacaggccaggaatggagagaaacatttggcactcatctacttgtagcttccctgtcgagaaaaatgaaatcatccaggggttttcaaattcagtggtctctggaccccttcacactgttaaaaatggaaaaccctgccactgtctacatgtttatgttgccccagtaatctatgcattgaaacctaatcaccatgtgatgatattaggagctggggcctttaggaagggattaaatcgtgagggtgggggacctttatgaatgagattgtgcctttataaaagagagctgctttgcctcttctgctagaaggtgccctccgtgaaccagaaagtggagccctcacaagacactgaatctgccagtgccttgatcttggacttcccagactctagaactgtaaggaataagtttctgttgtttaaaagctacctagtttaaggtgttttgttataggtgcccagacaggctaggacaaacgccaataagctttcgtttatgtgggttgtatccattgatacttgctgtatgaagaattaaaattaataactttaaaaagatttattgattcagaaacagtaacaaaacttaatatgcgttaacgtacttttatgttggataaaaactatatcccaccccagtatatgaatagagtggcattgttttatgtgtttaatctctggcttaacagaaggcaattggatgatcatacctgcttctatgtttattctgctgccaatatcacacagcttctggaaacttccacggcacacattcatgagacaataagagttaaaaaggtaaacagtgtcttagtagtgtatgaaaatagtttaatctcatagaccccctgaaaaagctgcagaatccttacgcgttcacaaaccacactttgagaactaaagatcaaggagtacagttttctcatttttatgctgttcagagtgtggttgaagttcagccatcactagtccttcacggatagttcataccccaagttgatggccttgtggaattgctgatgctattttcatatatatatatatatataattctagcctttttctctggtcttataagagtcacatacgtaggtaatttcatatcctacaaatatgttctaaacagcagaatattccaggaaaccttaagtgataactgagttgaaagagtcatattttttaagcaatacaatttaaataatttttaaaggaaacatttctaaaggacgttttacattgcttgcattaaaaa

SEQ ID NO: 81529 - DNA, 1653 bp, Homo sapiens
ttgtgaatgatgtggttcaaacaaaactgaaacaaaaatagtttttctcattaaaaatatgtttgtcgcatagccagcactcggaactagggagggtaacatggaagtattgtcattctcggggctgactggttgacagcagcctatacaggagtggagaatattgacagggctgcccgttctccccaggtcgaagagagcaaatgcacatccctgtgtgcacggccacctggttcctctcctcacttgctggtgagtattgaacggctcacataattaggcagaactcaggaactttcctccctatctctttcactcttctgaaatgccctttatgttttcctctgctctttcagtcccagtgccttttctctggtgcagcctcatggttcggtctcaccttcagcttttccttccctccaatacatcctgtaaattattgtcagacttcttcttatctaaataactcgtttaggtaaggtactcatatgttcaaaataccatggtggctccctgttctctgtgatgtgaagtcctaaccattagactcagctttcccccaggacaccttggcttatcttcttgctgctttccagaggcatgggccattaggctggttttctgaaggttctgccaaaaggctgggcccttgtctcccaccccactgctgttactcatgtgttctcccacttgctcggcattctttcccatgctttttccttgatcatcacttactagctaacatctattttttcctaaacactctgttgcagttgtagtctgcagtcactctcctaagacttgatcatctattacgctgtttcgttctttattttttaacttttcttcttcttttttttttttgaaacggattctcgctctgtcacccatgctggagtgtactggcacaatctcggctcactgcaacctctgccttccgggttcaagcgattctcctgcctcagcctccctagtagctgggattacaggcacgcgccatcacacctggctaatttttgtatttttagtagaatcggagtttcaccatgttggccaggaggtcaggtcgaactcctgacctcaagtgatccacctgccttgacctcccaaagtgctgggattacaggcatgagccaccatgcccggttgttttgttctttaattttacaaacttggcatagcttagaagaccatatacagtggcaccatatacagtggcaccatattagtggcaccatatacagttttccctgagaaaactggtacctcccaacagataccaaaatctgggaccaccccaacagataccaaaatccacagatgctcaagtcccttttataaaatggtgtgatatttgtgtatagcccatgctcatctttccgtatactttaaaccagggatccccaacccctgggccacagaccagtcccggtccatggcctgttaggaaccaggctgcacagcaggaggtgagtggcaggccaactagcattaactgcatgagctccgcctcctgtcagatcagcagaggtcctagattctcataggagtgagaaccctattgtgaactgaacatgcagggaatctcagtaatgcctgatgatctgaggtggaacagtttcatcccaaaaccatccctctcccccacccatc

SEQ ID NO: 81530 - DNA, 3008 bp, Homo sapiens
actgcaatgaaaaatgcaacgactgtaatttatcgttgaagggcattttcaaagtgtatagaatgactaaagcttaagtgtattaaatattctagaggaagacatatttaggctataaatctagacttcctttggaatttgtttcctttttctcagccaggtgtatgaagattttaagttcttaggcctcagtgggaagaagatttaaggttccaagagtacatttgtatctcttttaaattttctattgtttatcagtgacatatgtaaatgttttagggagctgtttactgtaacattacctactttagctctgtgcagttgtctggcaaccaatgtgataaagacagagggaagtgctgtattttgttgctgacaagtatatcttaaaagtgcaggtgcacctgaataggcaataaagtattaagagctgctcctggagcagtttgctctctgtgacgtgtgaaaagtctacggggtttataattggtctggccatacggctgcctaggattagactcttttcatatcccactaaacactctccttagaagcaagcacaaggagatagtttattttaaaatgtaattgctatgttactaagatttgaatttgagtaccgagaataaaccatatttctgtttagaggctggttggcttaaaattgtgtctaatccttcccctgccccccaactccgaatcagagaatgaataacaaataaacatgacaatgaagtctcatgctgttgttttcatatttgtatttaggagtttcagagcaaatgacttggaaaacaggcaaatccactgacataggcatttttagccaccttggaatccgaggagggattctgcactatgccctgtaacctcgttcacatgccgtttgaatgtataccatgaagaccccttagctcagggagctttgctctatttaagtaatgtttatattcttaatgaaccaaagaggaagtggtcatgggaaaagagccaggactagatttcattctaatgcttataaggagagttctaggaaaccctcagacttggtaaaccaaggcatttggagatactatgaattggtttaaaaggccatttaccacttcttttgtaattggccttttaaaccaactctcacttagctgattaaatgtggtcatttaaactgctagttaacaatcggaagtgcagtggcgcaatctcagctcactgcaacctctgccttccgggttcaagcgattctcctgcctcagcctcctgagtagctgggattacatgcgcacgccaccacacccggctaatttttgtatttttagtagagatggggtttcaccatgttggttaggctggtctcaaactcctgacgtcatgatccacctgcctcggcctcccaaagtgctgggattacaggcatgagccaccgcgcccggcctaagatttcttattgtggtattctgcagtggagaatgggagttggaaagaaatgttttctcccacacctgtcccgctcctgtctactgaaagctgattaatcagtcagatagtgagttcctattggtagtacgcctccaaaatttggaagaggggaggtggcgtgatgtgaaaaagcaaggctttagggagagattcccgctgggggcattcaccctctggtccagcgtgcctgttacagtgatcactccatagtggttttgcatgaacaagactgcccagtttgcttaggaagaaaacaaaggacataaggtagttctcatgtcttcccagcaccctaaatactcgggctaaacttccacagtcagaccgtcagcttcaggaagggctgctgttgggaactttttttttagtttgcagttagttcagctccagccaaaaacctacaaaaagccactgcaagccctctgcctgctcgtataagacaccttggttgggcccctgtgactgtccatccataggatggttggccattgactgcacagagaggtagggcaagataaaacgactcatttgtggatctgactccttgtacttctgtttggattcaaacagaggaagatagagtagtggccttgggaaaccgtggagagagaaaaggcatagtcagaatgttttcagaggagcgcagacttttcaaaacccctctcatcacgttcccactgaccttcagttccagtgctgtggccacagggtgtctgcaccccaacttctttgccaagaaattaatgatctgtgaagacacacagacatgaggcggacttactatttaaaggaatcctgaaacgaatatttttctgatacatatttatcctaatatatttgctgagcatggtttttttttttttttttttcctattttggagtttttgggttttttaagcctagggaatgcctaatatgtactgtggagtgcatttgttcatttatatcccagtgcattgtaaaatcgagcaattcagtgccttagaatcctttctgtgaacttgatgctacgtgaactacttgagaacaactactttcaagccctccgaagcactcagttacaactgtcggtctaattgcacattattctaattcattaaaaaagtccccaagggcttcttaggatactgctctatgttattagaagtccttccaaatagaaaaactttattaatttaaaaataaccgccaattcagacttcgattcaaacaaggcattttaccaagtccggctgaaagagcttcttaccacatctggcatgtagaatggcagaagactatttttgctagattccttgttgctgcagccgtttctgatgtccttttccccttcacacctttcgtgttacacatgtctgagatgacatgatgctaagtaaccaaagtactgctgcgatggaattgctctgatgtttttttccagagtgaaagctgctattactttaaaaaaaaaaaaacttgaggtttggtttctttccccctctatccgggtgttatacaaatatgtaattaagatgtttgggggttcagat

SEQ ID NO: 81531 - DNA, 1521 bp, Homo sapiens
gggtttatttaaagggaatgggaatagggagaaggtataacctttccaaaacaatctttaaggcaattataagctgttaggaaatgtcatgtaataataacacagatacccaagcttatatcacataaatcattcattttgcatgtttttgacagggagatttattttccaggttaaaaacaaaaaagaaaaatcttaaaagcttaagcttttattgtttgctttttttattaaaaagtaatttggagccagtaacttaacctgtttttcataaacatgctatctagaggcagccaaaaaaatattcatgcttgcatagtcagggtcctcaaatgaacttatgtgttggatcatgataactctggtaattactcgaattacccttgttgagtaatagtatggaccctgaatacaagggtttgatttatgtggccagctctgtgctgctgggtttatgaggacttgccagatgtcatctcctaattaaaatccttctttacccttaatatcctctcctctgtccccaagaaattaatccattctattgctggagcatgtaacagctgatgttgaagttacaagtttacagcttgaactttgcctagactgtaccttttttgggaaagagtttgcaaagcttttaagcctgactcttgtctttagatcaccagcatcaccatggtgcctggcatcagtggagcctcagcaagtgtttatggtggaaacctcagaagctgtcactttctctggctgtaacagttgtcatctttgtttacagggaaaatgctcttgagaaaatggaggtcattaaacactccagcttcagcaatatcatcagagctttccgtcacgtgagttatctcaccaaagggtcagattctggtaaaaactcttgccttcacacttacttctgttttattttgccttatttgacatttcaccagaattgatccataggttcaataaggctccattctgttgggacaaatcaagctagaaagacactgaactctgggggttaccagaaatatctgaaagcaaagcagtgactgtgaggtgggaatctctctgagaatcctttgcagaaccatgtaacagctctgcatcactagacgagccaagcgaagtggtcctggatggttcagtaggctcaagcattgagggtccagagcatcctttgcccctggacatggaagggttttcattgggagatggcatttagggcatccttataaacgagcaggagtaaacctagcaataaaaaccaaacctctgccttcagaggtatatgctattacttctgcttaaaccgttgtcagagctaacagttttggttagggatttttgtgggtccagggcacgcccagacacccagatgcttctctatgtttgtaagatggcgagtgttgagatgtcttataggcttatattgagtgaaaaggaataggatcctttgtcagtagtaacttaggctttttaggtggccagggcaagagaacaccccccctacacacacacaca

SEQ ID NO: 81532 - DNA, 1049 bp, Homo sapiens
gtaattgtttctctcgacagagtggataggcttccatagttgtcttaataccttttgtccaccccaaggattgacccaggcaaggaggatgaaccctcctcaatttgggaaagttaaattttaggcacagcaggtcaaagagtagggaagagctgcagttgttggaaccaagtgacattgatttagtctggaaaggagtcacagaggaatcaaaagccagaccctcctggcagctttagatgtggttggggtctgggaataatgctggtcccaaaatcacctctggaactaactcctgtaaaatgaagcctctgcatccttcagtaacttacttaaaattttgttagggctgcattttcttcaaagccaagttctgaataagaagtatttgttttgggctctagccagattactgaagtattgttgagggagatttgctgtggaaggtgttgggggtacagggattgtgaagataatgtaaaatatttaacattttaaaaattttcagtaagttctctttccccaatgtcagcatgacttcttcattcatgttcttccatcactctccattcagttagaatctcaattgtgtaatatcagtggtagcgacaattatgaaattcgtccagtgaggaaaatccgcagagctagagcccaaaccagcaactttgtagtgaggatgaccccactggccggggagaaactgaactgatttttttttttctctctctctcagctttttattttgaaataattttagacttacaaaaaagttgaaaaagcatccaggcatggtggcttatacctataatcccagtgctctgggaaaccaagacaaatctcttaaagccaggagtttgagaccaagctgtgagactatctctacaaaaaaaaagaaattaagtagccagcagtggtggcacgtggctgtagtctcagctacttgggaggctgaggtgggaggatcgcatgagccaggagttccaggctgcagtgaactatgatcatgccactgcacaacagtcttggagacagattaagaccctgtc

SEQ ID NO: 81533 - DNA, 2061 bp, Homo sapiens
ctgtttatccttgcctgccccagggaggagtttgagttggtacatcctgactgggtactctgcctgtggttagcaaatactctgcatgttgagtgctttcaaaatacagaaacaaacaacttgtggaggcattggaaaagtgtgtttgagaaacaagcagcctcaccatgaatgggagtttgtttccctttctcgtctttctggtcatctgctgcacgggcaggaggagctgtgggttgcttttcttccttggaacatggagcaccactctcccctgtgctgatacacttacaaagaagttcacctactccttggaaagttctggaaaaggggcttctacactgttggcctctcgaggagaacggtttttgtttctgtcttcctggaaaagaggtgactgctggcatcatctttctagataaactccttgctatgatgccattagaagcagtgttcttttgtgttttgcttttgtttttccctgtagacaggaataacattttgactagaaacttccctgatgtaataacgaagatggcctccttagaaagttccagaacagaccccttcacctctgtccccagaagcagaagtaggtgatgcactttcttggcaagccacataactaccatttctctacaatcgaagctcaaaaatctgtgcttgtatacgttcattttttgtttttacttctttacttcctttgataagacagaaacttctgtattaaaactgatttaactctgaggggctaagtgaacaacaatctgttgtcctatagaggtcaaggcagtgctcacaacaggatcattgtgctgctgtagttcagtttaggggacggggaatgtttataaaaacaaagttttgaaatgaggacagggaaaggctttgtttacctggggctctagacttaaggtactcattttgcctgcagaataatgaaatgcagagttgtaattagaaaaggttgatgtaattgatgtgttaacaatttttgaggtttttctctttccactttaggacagtcatgcaattatttttctgaaccaaaatcagaaccatcagtcgaaggctaaaacaggcctggggaaacactgtcttttggcaaagaaagacaaagatccttgttctctaggccagtgtgcatatgtgtgtaatgctttaaagaacaattttgacaagaactcttaggatgcaacttgtagagtgatttttaaggagatgcagtaggatttgtgcaagtattctgctatgagcctaagattttcaacatggaaatctagccatgcagtgactcgttcactttggcagtgtctatcttagtctgggggtgagcgtttgtagaaaatatttagagactcaagtacactcatttgaatttttgctgttagcaaataaatggcaatatgtgtaacgtggtgaatgggatgtaaagctgtctttatattaccacggttagaatttaattttgaaagttgcaagtcaaactgcttcctcttgcgtcattaagttgtgcctcttgtttgctcaccggcatgtgtgtccttgtgtcattttggttgctgtgaaattgctcttaccattctttcatccttcaacctgctgtgctacaatcctaacatgctgtttttgttgaaaatgcattcactctttttggcatcttttttccccagaaagttagaatattgggaattcattggtattagtgaaattcccacctaatgcagcagtttttttctcttacctgcataatagacgcagaacaaattaactctaaacggattagagctgtcaactgacagatactgtgcgagatactgaggaagcctcagagatgataccaataaacaggacagggccttctggtcgtgtttctacttctcttattggtttgtcttagcaattttgaattgcactgaaaacgaaatttcataggtacacgatacagtagttagttttaaaagtttttaaaatattaaaaaattgaaagtatttaaaatatttttaaaatattttaaaatctgctgtgtgagatagataggagacctagcttttcttcct

SEQ ID NO: 81534 - DNA, 1008 bp, Homo sapiens
agtgattagtgttccaattcttgtttgcccataagtgtttcaaagtagtatttttaaaaactcttctaagacattctctcttctcatagtagatgcagtgaatcttaaaggtgccctaactaaaatttttgtgctataaaattggcagctttacaaaataaaaggttcgagatatgagcctgatcaaggctctgcatttgcaacaatatccttggtttgcctggccctgttatattttgctgttgtgatatgactcctgccagtgctatttccatttaacctttgtttttctaaaagacagtaataatttttcatttctagggagtctctgacatcagctaaaggaaagacacttttctttgactgtatatacatttctccccatttcattaatatcaaagttgctctttcaaatggcttataaaattttaaaattacaccagttgcataagcctgcataaaaagcagactcctacataagctgacaatgcatttgtaccgtggtgttgagcagttttaacatcctccgtgcctctgtgcttctgctagctactgctctgataaagttatcaaggtatcattggatgcattgaccaggatgaagacacaacagtatggccttattaaatttggaaataatgaacagacgagtagagaatttaggagcaatataggcaagcttaataggtctttactttggggcctgtaactccaactacatatggaagaatttaagtacaggaaaagttaagctcttttcccagtagttctgctgacaagttgggtgacttcgggatggttacctcttcatgataccacacggtgatggtaacagaggcactgtccagtctctggttcatgcacactggtcttctcaggggtccctgtataggtgacacagtggagaacagggcagtactgccagactcagggacccagttcatcgagaggggcagtgtttctcttatgctgccttaaaggcattggatgccttttggaaagccagtg

SEQ ID NO: 81535 - DNA, 1021 bp, Homo sapiens
gatttgggatgaagtattgaacagatagctcacagaagaagaaacacaaatagctaagcatagaaaaaaagtttgatttcactcatacgagaaatgcaaattaaaactacaccaagataccattttttcacttctcatattggaaaaaatccaaaatatttgataacacactctttggaaaacaaccccacatggctgggaggacggcagaatagcacatctatagaggagaatttggcaatatctctcaggttataaacacgtattctttgacccaccaatcttagagggggcatttaccccatagacttgcacacatgtgaaatgacagttgtgcagttgttcattgtagtgtttcaaatggcaaaagatgaaaatgtcccccaaattccatcactgagggaataagtaagttagggtgatagctcccaagcttattttctcttcagaatcacctcatgaagaaaatgaaggtctgtgtgatagtagctggcaggtgggcatggtggtgagggtggtgtttgagcggagacctgaatgaaggttgagaaggagccagccactcacagacacagaggaggccttcaggctgagagagcagagaaggaccctgtggcagagacaagctggaaacagcactgcttccatggtctggagactggaatatgtgggttctgcagacacctggggggggcaccacctggtaaatctgcctttcagctcttggttcttccagcaaaccatgccagctgtggctctgtagccatgtcctcggaagatggcagaggttgcaacgaggcctctctgaggtgctctgggagcacagaggagtcaggtggaacttgtggcatgttgccaagggaagaagtgatttttagacagaataggaatttgccaagaagagaagtcagaaaagcataactggcagaggaagcagcatacgttacaagtaactgcatgtgtacagggaatcactgagtgatggacaagggcttggcacttggtgggggggggtaccatg

SEQ ID NO: 81536 - DNA, 1043 bp, Homo sapiens
gctttcttctcttccatctcctggtgagcacagcatactgttctcaggcttgttttccttttattgctctccatgtgggacaggtcatgctttatcaacatgtaccattttctacaaatgccgcccttcctctttaaattgcttggatgggcagatcgattttgattagcaacactgcagcagaaacaaggtgcatctctggaaggactgggtggttttctcgttattgttgctggtttgggtcacatcggatgctattttaaattctgtgttttattccacgatgggtcttgaatcctttccctattcctaggtttgaaatatgtttcctccctttaaaaaaaagaaggggggcagtattgtgttgaaccaaatgtttttctaccttctcctgtgatctgaatcaggtttcccatttccagcagtacaatgtggttgtattcagtgtgataggggcgtagtggacatgaattatttgcgacagggctgcctggaagatgcggagcggagtttgcgtggcccggagcagctccagtgtctgaggcttctctgtgtcacaggctccaagcaggaagcgcaggcaaaatggcaaaatacagcatgtggcattcagttcaaaaatgcccttttttagaagtcggtattctaaatgacatccagtcttgcttagttttttaagagaaaggaaaaataatctatgaagatggtttggaatattttgtgaaaagccttttcagcataaaaaagatgatcttgagggtctggtttgcggagtggaggataagcctccctcctgcgattctgaattgctttttggtttgtaggaatttcaggaacatgttgcaaagccgtggccgcttgaaagggtcggtgccctgcgccccgtctcagcccctgcggcccctgaactttttcagtgatggggcacttggggagaagtgcggggagtggaggaggaggggaaggtgcattgcaaatagaaatgtaaggcgtggcctgggtggccaggatgtgccagagcagcctccagacctacttaaatc

SEQ ID NO: 81537 - DNA, 1040 bp, Homo sapiens
aatctcccatcactactttaatccctgccccagtgttctggttccccctttcctgcatgaggcagtacgagtaccctggcctggctttgggttctacacggtctgactttagcctgccttggtctttgttcccctctcactccctccacccctgccccccccaacacatgtggagtaccttaccctgccttcctagttctggaatggctgcccctgtgccaggccaccccattttctagaaccaccttcatacagcccctgcgcatcccactgtactatttccttgtttgtttttcctgtcaatcttgccttccgcgctaatgggacactgatgctgtatggtgatgtgttctcccacagtcatcttttcctcctgtggttggggtggggagctttctctgtgtccccccatgagagtgaggacagtctcatttaatggcaccatggtctgtggagccaggcaggcctgtgtgtctgactccacttcagcgctctcagccagcgtgggcacctcggacccagacagacgccccgagcctgtctttctggagaaggaagtagtaataccttttccttgagggagttatgaggattaactgtgcctggccctgaattcgtgccttgcaggtacttaggaagtgagttattacaagcagtgctttttatcatccatagatggagatgttatctatgctataggactgcagaaagaattacagagaattatgtagaatcactagggacttgattaatatttgtttacctttcccccacatggattgatgtcctttattatacttttgtacccccgcttggcaagcccttgacaaatattgatccaacaaaaaattagctctttaatgtatacgtttagaacctgttgctttgtcagtagtggtttttatgaaaatgaatgcttataggtcagacttctggaaaccctaatctgagggaattgggccaaataggaaagtgagccccttaaaggcagttgtctgaccagtacttggagcacaacaggttcttgctaaagcactgtg

SEQ ID NO: 81538 - DNA, 1523 bp, Homo sapiens
gaagctgctgtatagtggcaaggtcacagtgatttccccacagcctcggtttagagggagacggggtgtgctgagctgtgcctgcttctgtagaaggggccttctccaagtctgagtagccttaagccattaggactgctgagtctttctccacaaaaatatgtgggaggcctgcagggcaggtgctcaactaagctctggggctgcaaagatccagagccatgcccctccttggaggcaggtccttgtagacgaggacaatcgtagccttcctgattaaagcaggaattgtccaatcaggctatatgacgggcatcgtccatagtcttcaccaggggagcttttctgactatacatctctagccctgtggcttgagccagtcacttaatttcccctgagctttggtttcctcctcctggtagcagagagactatcagagtgaggggcagatgcaatagcatatgtaaaacacttagcgttgggcctggtgtttaactgcaataaatgttagctcatattttactgtgacatagatgctgtatgccttttgctgagtattaaagatactgagctgtagcatgcatacttgcatgaatcagtctgctaagttattttaagtttgcatttgaaaataaagggtggattgctatccaaatataaagaattggaaccaggctctaaaaggatgtttgctgttctttagcaaaataccattcttcttaagtttcattcaatcattccacaaaaatttaagcatctgttttgtcccaggcaggcactgtgcttgtaatggatgtgcaatagcaaacagaacacttgctttcagctcacacagagctgactcctgggcagagaatttcgacagtaaagaaatacaagtgtgatgaaggagaaaccctttggtactacctgctacatgttttaatatttaaatgttgacttagggaggtctttccatctaaaaataatgatttgccctttctcctgtaaatgacccctttctcttaagttttgggtgagagattttttttttttaaggaagaaagatattctacaatcgaatgtacaactgagataatgcttaggagagaatgtatactgggtttgtgccttggaagttgcttaggggaaacagttgtgtgcagttggaaagctgatgctttaaagaagcttctataaagtgaccccacaattaaactgttttgtgtacatctttatttatttatttatttattttttaattgagacagagtctcaccctttcgcccaagctggagtgcagtggtgcgatctcggctcattgcaacctccacctcccaggttcgagcaattcttctgcctcagcttcctgagtatctgagattacaggcatgtgccaccacacccggctaatttttgtattttcagtagagacggggttttgccatgttggccgggctggtcttgaactcctgacctcaagtgatccacccacctcggctttccaaagtgctgggattacaggcgtgagccaccacgccca

SEQ ID NO: 81539 - DNA, 1053 bp, Homo sapiens
caagtcgtcttctgtaactgagtatcagcggattcaagcgttaaggaaaatgattaagagaaaacaaccaaaaaagtcttaatggttctgtcaatcaagtggctatcaattcatggctattcaaaagcttttgtggctatgaaaataaactagattgaaaaaattctaaaacaaaattgaaacactcatttgagtttaaaattttagttgagttgatttttatttcttgttttggttcatttgtagtttccccccgcttcgttgtttcctcagatatggagaataaagcctggctggtcagtttcagtttttatttaaattcattttgtcttcattccttttaatctagcacagtcctgtgatgtattgggatcacagtgctctggggaaacattgaaatataaaaacattttcctgaaaacatttccagttatatttaattttcctccttgaatagaaaaatatttccaacttaatcctccctctcccctcttgaaatgaattgcatgctttggaaataacatcaatccacccaagtacacaaggacaatctcagccatttaatcgagatataaaggcttagagaactctgggcttcggaggcacagactccacctttcaggatgctaataaacgtggacgaggtctcgcctgggcttcctcctccattgttcagcgcagcaaaccagcacagcactccgtggccagggtttgcggggagaaatctctcactctgttttagtagcatcatcatccttatcagcaccctgcttttatttttgaacagccaaacttcctctttccaaacttcgtgtgacatctgggaccagctatgtttgaaggagtctgaacatgccacatagtggctcacgcttttaagggaggaaggccagtaagcctcctcaatggcagaattctactttcagtctaccctttggttctgttgtggttgttccttagaactttattctgctcattaggaagcccagcctccggggagggtttagcttctcatctaagcaagaagtaaaatgtcataatggaggaaaaaaa

SEQ ID NO: 81540 - DNA, 1051 bp, Homo sapiens
ttgtaattttattatggccctcacacaagagcgtgcaagctatactaagcttcctgtggccctcgtttttcctcactgatatttgtaactcattccaaattaaattttaggagtctgaaatgtagctgttatatttgggagatgtgaagaaaagaatcgtaggcatctcagtaggctaggtatcagatcacacatgcttgctggaccaaagaggactccttacagtaggatacatgattctgagttagtttgtgtactaagtatatactatatagcttttgaaggggagacgggcacagaattcacaatatcatgcactaagggttattttgtgtttgcagtttccagatgaatgttttaaagttggctgcagaatacagcgagataggtaaaatctatttgagtattacttacagaccccaaaggatatcccaaaggatatgttggactaattcctaaaatatcctgtaagtcattgcaggtacaggcgtggatctgggtttggaaacgccgcctggatcgctggctgggctcctgcagccgccaaggaggggctggctggaggtggggctcggcgtgcatagcggccacgtgactgcgccccggccacgcccaccgtccctcacgtggtcccaggccacgctgggcttcggcatgtgctaaagtggatagaaaagggagtggggcccgggcgtggctttgtggtttgggaagatatgaactccttggggtttttttctcttttaattctttaattttgatatttggaaatgcgtaaaaggtttttcatttgtccttgaccacgtggtccaaacctcaatttccctagcagaacgcggtttcgatcactggtggatccgtctcacagcaccagtcatgctgcctcgctgggaagtggagggctcaggattcccgtggttcacgatccattttatgttggaaggaaatcattttgaactatctcagtacacaccctagtgtatctttaaacctaattgagtgttgatggaaaatctgcggtccgagaaccgtaagaaaagggggctcccac

SEQ ID NO: 81541 - DNA, 1092 bp, Homo sapiens
tatggacaagaaaccccacataaaggaagcaagatcgctggctgctttctctaggtagcttgagttgtatactaatttgtagattatttctcttcatcgaaaaaacaaaacattctgcagagggcagtcatgtgtccgctgtgcctctgctcctgtgtgcaccataaaacttgaaagtgagccagaatttgaaaatatcggattgggatgtgatttctttaagcctctggctaatttaatataaagtgtttacacttcatttttctggcagtggattttctatgtaggtggtggaagatttcctgtaagttttgcaagttccagggcaaagagagttgcaatatgcaatatctttctgtggtcacaccaacagaaagggcgatttcttaacctgctgcagttaccatgtgtgtaggtggatgctggctattacagatggtatcctttcaaccctcaaaattgttgcaagttcacaggtatgttaatgaaaatgaataagtggcatttttaggaattccaaatactgagtcttggaagtagataatcttttccctaaatgtatgctccggtcagaactgctgcctaccacacctcgtgggtgaaacagatatttcgagcatgactgagcttattaagagccctgcggcgcttcctctgccgggggtttagaaatttcaaaggatgggggttgagggagggaggagttatgggcatgtgatgtggacagggcgggcaggaggatggaagtaacaggtccaaaatgtatctttggtggcccggcagagctcttgcatggggtgagaatggtaatttaggaagagcaagtcttcccatctgtgaagcagaagaaaaaagtggacttaaggagaagttcgggtgctgtttatttagataggagtaaggagagtgcagttggggaaaagcacttcagaggctttacttagactagcagaagtctgtttggcagggtgggaagcaagtgcagttgggagaaaaacgttttcaataggcagtttcagaattggaaattggaggagggcagtccatttcaacatttccaacagtattaaagaaaatttgcgggttgtttgt

SEQ ID NO: 81542 - DNA, 1033 bp, Homo sapiens
ctcaacccctttcaaagactgcaagatctccttgtacacactggacttgggagaaaatgagagctttcaggcctgctatcttaacaggttcagaaaggtgtggtccagccccctgactaaccagccctgctgtgcacactgagaattctgctcaggtgtacctttctgtgtgctcctgggtgcacccccaaagtgctggttctcttgaaaacctttttatttaggttcagacagacaaactgtggtatcttccattctgaccataaagtgtttcttctgggtctaactactatagtgggatattttctctagaacaagaggttgtttctttttggcattgagaaatgttgccgatgtgattttcttttgtgaacgtttaagacacagcgcttgccacttgaactttcttttgccgtgcgtagctgattccacataatggctgcagctccaggcagaaacctgtttggaagttgttttaaactcttcctggaatctctaggcagtggctcagtggggtttttttccaaccattccttaggatgaccagaagcttgacagaatcctcttgtcttcattttgagaaaatatgtctttactgtgtgtatgtgcagcatttggttttacctcgtgggtctaagcattttcaactaagcttccttttccaacctagcagacttgtttaaagaacttcaaactaatagccaagctgtaatacggtggctctctcagcctgagaagcctgtgctcaccgtcactctcttcttccctggggtgatagggatggggagtagtgtgtgtgagaggacagaagcgaggattgattgaagattattttacgaggcgagagcatggtggcacacctgtcagctgagtggactcagcgcctgccccggctaggctgtcctcctcctgtgccagccgtgggttccctgagtccctctgcagtcattcatgggtgctgaaaataaagataccctttctgtcgaaagtgttcgccgggctgcctctgcctccctggaaaagcagcagggca

SEQ ID NO: 81543 - DNA, 1059 bp, Homo sapiens
aaccccttgcttttattgtgtatgcagcaaaagcaacatttggatcaatttacaagtttctgcaaaacaccgtcaagaaataatttcggttgtgctttagcaagaaaataatggatctgtgctataccacatgccttttggtatccctcactgggctttgccaaaacactgactgcaggagctagactactgttaggcagagacactgcactccctttgctgtccctgccttctctcctagcgactcctccaggtacacaggccagggtcacagtatcagaaagcagctctgttttcctccagaaccccccaagcttcctttctgcagcactgtctctcccacatggaaccagctggctcaccagtcaacagcctatgacacacaaatgccttgaggatgcagcatgtattttgtctggaagcaagcaacacgctcttcctttgtaggctgtttctccttttgcttgcaatgtgagtggcttatcttgggtgggcttgggggtgagataccatgtgaccacatgaacacttcaaaacagttgctttttctaatgcatgctgtaataacaatgaaaagcatatccttatggtttttttaatgcaagaagacagactcaattatgtgtgtttttgattttttttttcttcttcaacagcatgtactgcatcccttgtgaaggtccttgcccgaaggtctgtgaggaagaaaagaaaacaaagaccattgattctgttacttctgctcagatgctccaaggatgcaccatcttcaagggcaatttgctcattaacatccgacgggggagtaagtattccatccccctggaaaaacggctagatctcatggttttcttttgttgatgcttttcatgctcccgtccctgagtcaccactaaaatatgggcttagataaacaacatggtgtgtaagcctcacgcatgacgtctcttctttgagtttccctgaaagataaagaacagattgaaaggcaatctgtcttttagccattggcacgtcatttattcctgtaaagagggtcatcgctcatctttttgttag

SEQ ID NO: 81544 - DNA, 1049 bp, Homo sapiens
tgtctcatgctgtctcctatcccatcatgctgctgattgggcaggatttacttccatggataatgggagactttagagcaaagtgtacgctgttccgattgggtagcagagcatgtctgttctctcatggactgctttcaagcacgttgtacatacttggctgagaaaaataaccaaaggcatttcttgggaatgattctagtaacatcctctggtacaagaagcattatttgatggtaatagtggtcatagaattaattagcatcttaccgattttgatatgttatccttgaatcatgttgctgccattgttaacagcaactgtctgttctcctatagtgttaataactaaatctcttattggcaaaggaaatgtattgtggagcaggtggcaaagaggacctgtgttacgtggccagcaggctagaggggactgtggccaagggcaggtgcgctaacatcgatttctgtgcttctaggaattactccttctacgtcctcgacaaccagaacttgcagcaactgtgggactgggaccaccgcaacctgaccatcaaagcagggaaaatgtactttgctttcaatcccaaattatgtgtttccgaaatttaccgcatggaggaagtgacggggactaaagggcgccaaagcaaaggggacataaacaccaggaacaacggggagagagcctcctgtgagtgacagcatccaaaacaccgtgggcccaaccatcatgataacagcagaccctcctcccatgtgtgatggcagctttcctctgcggcccctcctggtttcacatgggggaccactagaccatcttaactagcactttgctcctacttatatgtcatcacaatcagtagtgggcagatacgtgatgtattcgtatttataaattctgtacatctctgtgagtgtgtgaaacacttataagtaggttctcaaactttaaagtgctgcttacagaatgcacagttaaatgtccttttatacacaggtgcacagttagatatttctctttcttttttcttttcttttttttcttt

SEQ ID NO: 81545 - DNA, 1020 bp, Homo sapiens
tgactatgcttgtttttttcttgatgaaaaaatgctgcaatcagaagagagaaaaatagtttttgcatatgttcttaaggaatagtaactattgaatcccagtaactgttgaagtggctcttcctgaggcagaccattcaattctgtaatgcccgactggggaagcccagagtccagtcacttcatttcttcttctataaaagtctaattgattatttgtttatttagacctcccattatagaaagtgtgacatgctgggcctctggggaagatttttgagggttttgatgtcagagccccgaactttctctgaacttaattgtctttcagaccctttaagaatgtcacagagtatgatgggcaggatgcctgcggctccaacagctggaacatggtggacgtggacctcccgcccaacaaggacgtggagcccggcatcttactacatgggctgaagccctggactcagtacgccgtttacgtcaaggctgtgaccctcaccatggtggagaacgaccatatccgtggggccaagagtgagatcttgtacattcgcaccaatgcttcaggtatccatgcctagacaagcccccagcatccacacttcttcgcaagctcactggccttgcttgtaccaggtgtcattgtagggttagcagtgagctatgcctgttgtctttcttgtcaataggtaatactgtgtcatattcatttccccactgctaacacattaggctcttctgtgccattttctggcctcggtactatcttccatcatctcctgctttgtgcctgtgagcccaggtcctccagggtgctgggctggtttcattggaaggcccagcctggaaacagccgtcttcagctgcccttgtttcttgtttgttttgatgttcaatcctccaggaactgaaaccatgctgatctgtgttccacttaattcatgtagctcactggttttccatcttcattctggagcttatagagttccaaagaggtcaacaaaagttgaaagcctg

SEQ ID NO: 81546 - DNA, 2452 bp, Homo sapiens
gtacgatttggaaatgtagttgtttaccaaaaaaaatgatgtatgggccattgtgcttcccctgttcctgccttccagataatgttctgtgtcacctccctccccttgtcactgccttgatgtcatcagcattgagagctgtgcagtccctaaaagtgtgatgttgataaacaagtaaactactgagtatacttcatgaagtaatcccagttaaatgggggtgggctgagccgggagaggggttttgacagaattattttgcggtacatcaaacctaagcaacttctgacagacacaagtgtatgttgtgttggttttgaaggtaggcaggaaatttgttgatgatgtgttgacaaagatttccctgacagtaaatgtggtttcttgtgtttttcccttccgggaagcttggttagctagttggttggtttgcagagtgtgaggattgtggatgatcagcctcatgtccttacccttcctcccccagtattgtgaaagcaaatgtacacgccctgaccttgtggttttctgcttgttggaacgagcatatctgtgttgggcagttcatgccttcggtaggacccccgtgtgccactacacaaagaaggaccgtgttttcctcaggggaatccatgggctgagaagactggggagcctcagaggccctttcccaaagccctctgctctccccttccaggttctgacctaaggaccagccagaagcctgccgagcgtcagccgaacctgcaagtggcttctgggctgttccgttccctgcgtgagctttccctctctgctgctgctgccgcgctctcccctccatggcactgatgagcttcccacattctggactttctcatttccctgggcagatagaattcatcccatttgccccctgccttttgcctattcctaagaccggtgaccccagccgaaggcctcagccctgttttctcaccattcgtccatggctgacctgagggttgccctttctccatctgggtgctcctctcgtattctgtttgtttttgttggttcctgtaaacattagaattctgttttaaggtttctagggggagccacaaagcccatttcttcatatttgaccaaagcagcaattagagggtcgcaccctcatgcctcatctgccctttttggtgagaatgtcctttttgtgatgactttatgcactcccttttgcttttcggttgttccaagccccattcaaatccatgacgaggactctgctctctgatgggcaggaccttgatgaggccacaggtgctcactgctgagtgggaggaagcctgggtgggctccagggacctgcagagtgtagcaagcacagacgcttggggttgggggtgggctcgcagcaggagcccccaagaagagagagccctggggtccgtggaactgcttgctgctagactccaggcatctttatttccacagtcagagcaaatccaaggagccaccaccacaggctttcatatccctctgccccaggtctctggggcctctgccacacacctcacctctcccctcctgccctaataaatcttaaccacagctgataggtttgccacctttaaggcttaaccataaggtctgtgaccagatggcctgagtgttctgatgacacagccaggactgcctggccaagagtggcagagacactatttgcctctaggtaaaatcgaagaaccactctgagagccggggggtgggggtgagagtttgtgtgcccattctgacacttgcagagtagagaaagcaagataatgaggaaggacatccctgtgttattcatgagttcttacctaagggggctcaatagctccttctattccacggttaagattcttctgttactcttactcaagtcatagaaaagacaaaagaggtaaaagtacttaaaagccacatttctctcctccttgcagacctgaaaggaagcggagagatgtcatgcaagtggccaacaccaccatgtccagccgaagcaggaacaccacggccgcagacacctacaacatcaccgacccggaagagctggagacagagtaccctttctttgagagcagagtggataacaaggagagaactgtcatttctaaccttcggcctttcacattgtaccgcatcgatatccacagctgcaaccacgaggctgagaagctgggctgcagcgcctccaacttcgtctttgcaaggactatgcccgcaggtatggtatgatccagctggccccattgccaccttcctcacaacctagtggagaagatgtgttttatggacacagggtctgacacccagggccatgacccttagacccaggcctgcctgctaaataacgtgcagtcattggcaggtggcgtgtagaccagctgcccagggaacagagcccacgctctcctagtgacaccactcccagcttggtctctccata

SEQ ID NO: 81547 - DNA, 1015 bp, Homo sapiens
ctgcatgtacttccatccattgacagcatatgctacctgactgcacaggttacctcctggttagcataggacttaaaacaataaaatccatgccaagttggtgaggatttgggtctttctacccactctgtactctccaaggagtactgcatagtgtgcaaagagctaggctgctttttgccctcaagaaacgatttcattgtgtaagataaccttgtggcataggccaggtcagttctaataacttttaatccttctggagttcttggttacaaaaatgtttggttaaagcttttgggtgtgcttaaagctacttgaagacgaccttttaagatttgatttctttgtctttactgacactcaggatcattgttaggtgggaggtcagatcaggcagctggagtccccagtgtggtgagtttagttggcaggccccagatttctcctgcattcatgggaaattgacatgtatgttttatttccccaggatcagcgagaatgtgtgtccagacaggaatacaggaagtatggaggggccaagctaaaccggctaaacccggggaactacacagcccggattcaggccacatctctctctgggaatgggtcgtggacagatcctgtgttcttctatgtccaggccaaaagtaaggcttgtggagggagaagaaacgtggtaaaactgaaagcagggtggtccaggatcaggacagcccgagtgttcatggctgtcttattttctgttaaaatggagttggccagcttccagaagggtcatgctaaggtgccggcacataccggcactgtgtgtgaaaggttgggcagggcagatgccgagctttgggctcctacctcatgtggcaggaagggagaggatccgagcctctcctttgaggttgtgtaaccactggagagccagaggagacagttgctttcaacctggcttacattcaaagacttttttttttttttaaacaaaagacattttataaagcattgaattgaccattccacc

SEQ ID NO: 81548 - DNA, 2002 bp, Homo sapiens
ctgtcctcagcacagccatttccctggaacgcgaatctgatcagttcactgctgggcctgaaagctttcgctgactccttttaatctgcagaatgagggtgaaactgcttagcttgggctgggtcccttgtgagctggccctgacttctctccagtatcatcattttctaggaaagccatttccccacaacccccaaggaaagcatatcataaacaagttttcccttggggaggttccctcgactcccttctctcctctcccttcctctctgaattgttgccatatgtgaagtccacttttctagttgtcatgctacctgttgacactaatttcccatgtcccacagaatgttccagggtatgggtccatgtgcctggtgcccagcctagcatctgccatacaagtgctggttctgatgatcagtggcttctgtggtcttagacttgtagcaggactcaaatgtctgcagcggcattggaaaggggtgccgtccagtgtgtgcatgtgtgtgtgtgtttattttaaattgtctgtggaactatctcaaagattgaggccagcaggacttgacctatacatagatgtagactgtacatagatgtaagaatttctattcattttatgaaaatgaatagaaattttcattctatttattagaaatagaatgcttgctgctgcaagcatttgagtccttttacaggtgtgagatcacaaagaccgcttaccaacagaaccaacacttgtatggcagatgctaggctgggtaccggggacatggaccaaaccctggaacattctgtggaatgtgggaaattagtgtcaaatgtatgcattttcactaacagtcattaaactgcgtacaaagattatttttcttcagtctatcattgaaactattgcaccagaatatactgtactttaaaaaatgagtatatgcctcagtctgcacatatttactcttttttcaaataattgtttgtttgccgtgttctatttctgacaccatttaccttcaggaattcttactgtatgatggggagtaaacgaatatacaggtatttttttcatacttccaactgaatgtgaagaaatgaaatgagcaaattgttcacctggtgatattttatcatttcctcctctttgctgcagcaggatatgaaaacttcatccatctgatcatcgctctgcccgtcgctgtcctgttgatcgtgggagggttggtgattatgctgtacgtcttccatagaaagaggtcagtgatgtgcaaagttatgacactttctgtggctgagtggtttgatgatttgaatgtgagtgaaggtgatatttttgaagatttcaaggaaatattttatggactggaaaacctgattttcccatcaaatgttcttccaggaaaagagaaccttttctaatgattttaacaacagccaaaataatttttcgatggtacagaccttcccctggctggcttttctggtatacagatactgctgctggtgcatacttttccaaacgcgatgcgctagccttcccaatcaaataagcctttttatttccaatgaagtaaagaaacagatgtttcttaaaaagcgctaatctcaggctactgaggaagccagaagatgtgttagcaaatgtctgctggctcacccaggcctgaattgggagtgtagacaagagctgctgtagacagtaagctctccccattctgttctgataccgtgtgagagaggataaatgaaactgttgtagcgaagatgaaagtatatacaggaatgtatggaggtggggttttgttaacgtgaatttaatctttttgacagaaataacagcaggctggggaatggagtgctgtatgcctctgtgaacccggagtacttcagcgctgctgatggtaagagtccgggccaccagcactgccagcgtgcagggcaggtagatcgggagctttcaggagggttgctaatttgggaaaggaaggaggtttgcattattttg

SEQ ID NO: 81549 - DNA, 1118 bp, Homo sapiens
ctccctactactctcctcctttttacatttgcgttttaatctgttggtgaagatgggtaaaatcctgcttgaccatttcattcagtttctcaatcccctgtggttaatttgtttttttcaaaaatgtgtttttatgtgatgaaaagaaatttttaaaaaccaactgctttctttcctatactagacttccttgctttgttctggtccttctatctgttagtatcctcaaattatcttgaaatcctcagagatctgaaatactagtactgactgtacagttttcttactcaaatctatagcatgtggaaagttgacatcaagccatgccatcgcctcctggtattctctgtgggtttaaggaagcagcatcttatattctttggcttagagttcccccaaagcacgttctgtctaagggcttgtttctgtacctgctttaattacggtttcttctccagtgtacgttcctgatgagtgggaggtggctcgggagaagatcaccatgagccgggaacttgggcaggggtcgtttgggatggtctatgaaggagttgccaagggtgtggtgaaagatgaacctgaaaccagagtggccattaaaacagtgaacgaggccgcaagcatgcgtgagaggattgagtttctcaacgaagcttctgtgatgaaggagttcaattgtcaccatgtggtaagagaaagttcctgaaaagccaaaatgcagcacagggagagggtatcacacaagcctcccagtatgttcttggctgcatgtacccgtgggtttggtgtcttgcctttgccttctggatagttaccccattacctcactgctaccttcagacccctgtgctcagaccaggccgcagcaccacagagacagttccagacaacacaggcatcagcaagggccacctgaccctctgagtctttctctttttgattcctcccaggtgcgattgctgggtgtggtgtcccaaggccagccaacactggtcatcatggaactgatgacacggggcgatctcaaaagttatctccggtctctgaggccagaaatggaggtcagttttcatttccaccggtattgcatgttgcctggcctgctctcttttccttta

SEQ ID NO: 81550 - DNA, 1036 bp, Homo sapiens
tgtgcacttaccctgcagtttcattatattcaacctgctcccccgaccaagtttcacttacgtatctcactacgagtaggtgtatatgtatacttgtcttaaatagctctaaccaaattaaaggaaagaatggcagtgtaacaccatgaactgacaaaatttcagccctctgtctttctccatgcttaaagttgagtgcttttgttgattctgttgctcacggcaattataaatgaccacttcataacacatataggtcatactgtaatatttaagaattgtgagcataaactttacatttcatgtgcatatttcctcatgcatcacacgtatctaaagccctgaaaagtagtgatttggacttacccccagtgacttaatgttgcttccccagataaccacgtgataagtgttttaagtcaccaagagacagctttgacagcctgttcagaattcaaaggtttgtgtcaccaagtgtagagaaccaacccagaagtaccgaggagttgttataatgattccaaatactagctttcagtagaaactagcacctcacagggcagcagccagcatccactgggcattgactatgtgccacgcaccactgggcactttctgtgcgtggccccaggtcatcttctcgtcagtgaaaccactgtgataccccatgtggaaaagcctgggcatgctcagctggtggccggcctgcaagtgtgggacctgtcagagccctatggctttgcagtgctgtgtgagatgctttgtggtcaagaaaaccaaggtgtagagtctgttgcacttgtatatgcaaaagtaaaaggtaacattaaaattagggactagtgattgttttaggatggagagacttgggcatgtgttttatataaaacttttttctaaatggatgtattatttaagggtaattctttttaattccaaagccagcacgttgctgtcctctgcaaagaggaatgcttatccctgttacttattcctggtttcctccaagactagtttcagctggacttcagttgcc

SEQ ID NO: 81551 - DNA, 1011 bp, Homo sapiens
gattacaggcgtgagccaccacacccagctgagaatggtttctaaagtaggggtgagtgtctttctttttactctgtaggagctagaggtattgaaatggaaccatatcccagagcccacatccctccgtcatcagagttcctcattcaggatccaccagtgtgtccctaggtttggcacgttgagacgtcctcacgtttggtgctctgtgaagctgggcagccctcagagaggcaaagaagtcccaagaggccgtcctgcctcagggctctcaggaaagagccgcccgcgtccctggctgggcttccttggtgcacccagctcatttctccttccctctctgtagaactcacattgtccccgtggaaatgccagccagctcccctttcccagtgcaggggggagccaggtgggcctgaggtgggccagttctgccgctaatgggtgagagacttgggccaggtgccttacatccgggagcctcagtttcctcacctcggaaatagggtgataatgtaacagaccccatggggttatgagaaggacttggtgcaggaaagcagcagcacgtgcctggcacagggcagggcctctccagatggcagttcctgtctgtgtcttattcccaccctccgggcacatggggggaactcagtttctccccactgcgcgtcaccctgggagaggtgttttttgtgccaattgccattttaaatccaaatcagcagggatcatgtttgctgttcaaccatgtggcatatttatagtgattttttttgtaatcatggtttttctttctggaatttcaagtttttcatttgtgctgaggaaggtcgtttgtgttttttaataggattccttcttttccaccttgtgcaagtaaaggcaaatcccctatttgcatgtcactgtattaattcacagataacactttcacacttcatttttattcttctcaagggctcaagatgttttcccaatgcccagcgtctcatggatgacaaatatgac

SEQ ID NO: 81552 - DNA, 1080 bp, Homo sapiens
cttagcctcccaagtacctaggaacacaggcgcacaccaccactcacaactgactaatttttaaaattttttatacagacagggtcttgctgtgttgcccaggctgatcttgaattcctgggcacaggcgatcttcctgtcgtggcctcccaaagtgctgggattacaggcgttgagtcactgcgctcagcctgcctctcatttaaatgcaataagggcattaacttcctaagggaatcaaattgtaaatatattaaaagtggagattgcttggtatttgctcatcatgtgattaatcatcccttactgtctccaccttataaaattgcaaaccctaatatttggccaccttaaagtgggacgtgtctgtgtcttgccttgcgtctctccacacataatgagtgtagggtcctctgctgtgacagcagtggtgcctgctccagcgtgtgactctgcgccctctcttcccttacagattttggtatgacgcgagatatctatgagacagactattaccggaaaggagggaaagggctgctgcccgtgcgctggatgtctcctgagtccctcaaggatggagtcttcaccacttactcggacgtctggtatgagaacctttactgcattgccagcctggagcccccagcctctgcactttccaccagctcagtctctagggctttatctttctctgttcattgttacccgttgccagctttagctcagtgttgtgtgagccacacttcttcatcattgaggtgttcctgttgtcagtgggctagctaagggcagaagggcattcgtgggattttaaagaatttatgggaccaacattctttccgccttcagcagataccgattatgtttccaggaggtgggatgtgccagaagccgtcacctctttttgtttctcccctgcctgccttctttctcttttcctctttctcaataaacagatactgtctgtgtgtctgcctcacctaatctaaccctcagattgcagacagtgctttatttagacccaaagcttatgagtcctgattgtgttttcctgctggtcccatctgctgtctgtctttc

SEQ ID NO: 81553 - DNA, 1052 bp, Homo sapiens
tcactctgtccctgtccttccctgttctccctttctctctcctctctgcttcataacggaaaaataattgccacaagtccagctgggaagccctttttatcagtttgaggaagtggctgtccctgtggccccatccaaccactgtacacacccgcctgacaccgtgggtcattacaaaaaaacacgtggagatggaaatttttacctttatctttcacctttctagggacatgaaatttacaaagggccatcgttcatccaaggctgttaccattttaacgctgcctaattttgccaaaatcctgaactttctccctcatcggcccggcgctgattcctcgtgtccggaggcatgggtgagcatggcagctggttgctccatttgagagacacgctggcgacacactccgtccatccgactgcccctgctgtgctgctcaaggccacaggcacacaggtctcattgcttctgactagattattatttgggggaactggacacaataggtctttctctcagtgaaggtggggagaagctgaaccggcttccctgccctgcctccccagccccctgcccaacccccaagaatctggtggccatgggccccgaagcagcctggcggacaggcttggagtcaaggggccccatgcctgcttctctcccagccccagctcccccgcccgcccccaaggacacagatgggaaggggtttccagggactcagccccactgttgatgcaggtttgcaaggaaagaaattcaaacaccacaacagcagtaagaagaaaagcagtcaatggattcaagcattctaagctttgttgacattttctctgttcctaggacttcttcatgggtcttacagttctatgttagaccatgaaacatttgcatacacatcgtctttaatgtcacttttataacttttttacggttcagatattcatctatacgtctgtacagaaaaaaaaaagctgctattttttttgttcttgatctttgtggatttaatctatgaaaaccttcaggtccaccctctcccctttctgct

SEQ ID NO: 81554 - DNA, 1050 bp, Homo sapiens
cagcagtgttaaccgcagacactaggcatttggattactatttttcttaatggctatttaatccttccatcccacgaaaaacagctgctgagtccaagggagcagcagagcgtggtccggcagggcctgttgtggccctcgccacccccctcaccggaccgactgacctgtctttggaaccagaacatcccaagggaactccttcgcactggcgttgagtgggaccccgggatccaggctggcccagggcggcaccctcagggctgtgcccgctggagtgctaggtggaggcagcacagacgccacggtggcccaagagcccctttgcttcttgctgggggaccagggctgtggtgctggcccactttccctcggccaggaatccaggtccttggggcccaggggtcttgtcttgtttcatttttagcacttctcaccagagagatgacagcacaagagttgcttctgggatagaaatgtttaggagtaagaacaaagctgggatacggtgattgctagttgtgactgaagattcaacacagaaaagaaagtttatacggcttttttgctggtcagcagtttgtcccactgctttctctagtctctatcccatagcgtgttccctttaaaaaaaaaaaaaaggtattatatgtaggagttttcttttaatttattttgtgataaattaccagtttcaatcactgtagaaaagccccattatgaatttaaatttcaaggaaagggtgtgtgtgtgtgtatgtgtggggtgtgtgtgtgtgagagtgatgggacagttcttgattttttgggttttttttcccccaaacatttatctacctcactcttattttttatatgtgtatatagacaaaagaatacatctcacctttctcagcacctgacaataggccgttgatactggtaacctcatccacgccacaggcgccacacccaggtgatgcagggggaagccaggctgtattccggggtcaaagcaacactaactcacctctctgctcatttcagacagcttgcctttttctgagatgt

SEQ ID NO: 81555 - DNA, 1070 bp, Homo sapiens
agcgagccgtctgtcctgtgagcagcaggaccagggagacggaggtacagccctggcggggggggcgtgacgccacgagcctcggcgccggccactgggctttccagccggaaggtttggtacatctctgtctacccctagggaaggaggtgagggagaagttgagagggcagcctggagggggaggggactctgctcctgcgtgtgttctatcagggactggctgtgaggtcaggagcctctgcattctggcgcacaggctgggtgactcttgctctccagctgctgctgcagctgcacctttgtgctcaatgaatgcagcagccatggccgcacggtcctgcctcagcgcgagcctcctgcagggatggagcagcagcaaggggagcaaacccaatgccccacgcctttaccctggggattcgcacagagatggtgctgcctggacaccttcctctcctcagaacctgaggaaccactgctctcttaaggacgaaatgtgttggtcattccatctgcacagaagcagtttgttccaaagacaaccagccagggacagcctggtggctcccccaggtgtgctctggtgccctcgttggcctcacagggccacctggctaggaggaggagaaatctaacaccttggtggaaaccaagatagaaaacaaaacaaaaaaagcaacacaaaacaggacatctcagaaaaaggcaagctgtctgaaatgagcagagaggtgagttagtgttgctttgaccccggaatacagcctggcttccccctgcatcacctgggtgtggcgcctgtggcgtggatgaggttaccagtatcaacggcctattgtcaggtgctgagaaaggtgagatgtattcttttgtctatatacacatataaaaaataagagtgaggtagataaatgtttgggggaaaaaaaacccaaaaaatcaagaactgtcccatcactctcacacacacacaccccacacatacacacacacacaccctttccttgaaatttaaattcataatggggcttttctacagtgattgaaactggtaatttatcacaaaa

SEQ ID NO: 81556 - DNA, 2509 bp, Homo sapiens
cagctggagagcaagagtcacccagcctgtgcgccagaatgcagaggctcctgacctcacagccagtccctgatagaacacacgcaggagcagagtcccctccccctccaggctgccctctcaacttctccctcacctccttccctaggggtagacagagatgtaccaaaccttccggctggaaagcccagtggccggcgccgaggctcgtggcgtcacgccccccccgccagggctgtacctccgtctccctggtcctgctgctcacaggacagacggctcgctcccctcttccagcagctgctcttacaggcactgatgatttcgctgggaagtgtggcgggcagctttgcctaagcgtggatggctcctcggcaattccagcctaagtgaaggcgctcaggagcctcctgctggaacgcgacccatctctcccaggaccccggggatcttaaggtcattgagaaatactgttggatcagggttttgttcttccacactgtaggtgaccccttggaataacggcctctcctctcgtgcacatacctaccggtttccacaactggatttctacagatcattcagctggttataagggttttgtttaaactgtccgagttactgatgtcattttgtttttgttttatgtaggtagcttttaagtagaaaacactaacagtgtagtgcccatcatagcaaatgcttcagaaacacctcaataaaagagaaaacttggcttgtgtgatggtgcagtcactttactggaccaacccacccaccttgactataccaaggcatcatctatccacagttctagcctaacttcatgctgatttctctgcctcttgatttttctctgtgtgttccaaataatcttaagctgagttgtggcattttccatgcaacctccttctgccagcagctcacactgcttgaagtcatatgaaccactgaggcacatcatggaattgatgtgagcattaagacgttctcccacacagcccttccctgaggcagcaggagctggtgtgtactggagacactgttgaacttgatcaagacccagaccaccccaggtctccttcgtgggatgtcatgacgtttgacatacctttggaacgagcctcctccttggaagatggaagaccgtgttcgtggccgacctggcctctcctggcctgtttcttaagatgcggagtcacatttcaatggtacgaaaagtggcttcgtaaaatagaagagcagtcactgtggaactaccaaatggcgagatgctcggtgcacattggggtgctttgggataaaagatttatgagccaactattctctggcaccagattctaggccagtttgttccactgaagcttttcccacagcagtccacctctgcaggctggcagccgaatggcttgccagtggctctgtggcaagatcacactgagatcgatgggtgagaaggctaggatgcttgtctagtgttcttagctgtcacgttggctccttccagggtggccagacggtgttggccactcccttctaaaacacaggcgccctcctggtgacagtgacccgccgtggtatgccttggcccattccagcagtcccagttatgcatttcaagtttggggtttgttcttttcgttaatgttcctctgtgttgtcagctgtcttcatttcctgggctaagcagcattgggagatgtggaccagagatccactccttaagaaccagtggcgaaagacactttctttcttcactctgaagtagctggtggtacaaatgagaacttcaagagaggatgttatttagactgaacctctgttgccagagatgctgaagatacagaccttggacaggtcagagggtttcatttttggccttcatcttagatgactggttgcgtcatttggagaagtgagtgctccttgatggtggaatgaccgggtggtgggtacagaaccattgtcacagggatcctggcacagagaagagttacgagcagcagggtgcagggcttggaaggaatgtgggcaaggttttgaacttgattgttcttgaagctatcagaccacatcgaggctcagcagtcatccgtgggcatttggtttcaacaaagaaacctaacatcctactctggaaactgatctcggagttaaggcgaattgttcaagaacacaaactacatcgcactcgtcagttgtcagttctggggcatgactttagcgttttgtttctgcgagaacataacgatcactcatttttatgtcccacgtgtgtgtgtccgcatctttctggtcaacattgttttaactagtcactcattagcgttttcaatagggctcttaagtccagtagattacgggtagtcagttgacgaagatctggtttacaagaactaattaaatgtttcattgcatttttgtaagaacagaataattttataaaatgtttgtagtttataattgccgaaaataatttaaagacactttttttttctctgtgtgtgca

SEQ ID NO: 81557 - DNA, 1026 bp, Homo sapiens
tggatctctggtccacatctcccaatgctgcttagcccaggaaatgaagacagctgacaacacagaggaacattaacgaaaagaacaaaccccaaacttgaaatgcataactgggactgctggaatgggccaaggcataccacggcgggtcactgtcaccaggagggcgcctgtgttttagaagggagtggccaacaccgtctggccaccctggaaggagccaacgtgacagctaagaacactagacaagcatcctagccttctcacccatcgatctcagtgtgatcttgccacagagccactggcaagccattcggctgccagcctgcagaggtggactgctgtgggaaaagcttcagtggaacaaactggcctagaatctggtgccagagaatagttggctcataaatcttttatcccaaagcaccccaatgtgcaccgagcatctcgccatttggtagttccacagtgactgctcttctattttacgaagccacttttcgtaccattgaaatgtgactccgcatcttaagaaacaggccaggagaggccaggtcggccacgaacacggtcttccatcttccaaggaggaggctcgttccaaaggtatgtcaaacgtcatgacatcccacgaaggagacctggggtggtctgggtcttgatcaagttcaacagtgtctccagtacacaccagctcctgctgcctcagggaagggctgtgtgggagaacgtcttaatgctcacatcaattccatgatgtgcctcagtggttcatatgacttcaagcagtgtgagctgctggcagaaggaggttgcatggaaaatgccacaactcagcttaagattatttggaacacacagagaaaaatcaagaggcagagaaatcagcatgaagttaggctagaactgtggatagatgatgccttggtatagtcaaggtgggtgggttggtccagtaaagtgactgcaccatcacacaagccaagttttctcttttattgaggtgtttctgaagcatttgctatg

SEQ ID NO: 81558 - DNA, 1263 bp, Homo sapiens
taaacgatgacagctatggggcacacaggccatttgcttacatgcctcgtatcatgactgattactgctttgttagaacacagaagagaccctattttatttaaggcagaaccccgaagatacgtatttccaatacagaaaagaatttttaataaaaactataacatacacaaaaattggttttaaagttgactccacttcctctaactccagtggattgttggccatgtctccccaactccacaatatctctatcatgggaaacacctggggtttttgcgctacataggagaaagatctggaaactatttgggttttgttttcaacttttcatttggatgtttggcgttgcacacacacatccaccggtggaagagacgcccggtgaaaacacctgtctgctttctaagccagtgaggttgaggtgagaggtttgccagagtttgtctacctctgggtatccctttgtctgggataaaaaaaatcaaaccagaaggcgggatggaatggatgcaccgcaaataatgcattttctgagttttcttgttaaaaaaaaatttttttaagtaagaaaaaaaaaggtaataacatggccaatttgttacataaaatgactttctgtgtataaattattcctaaaaaatcctgtttatataaaaaatcagtagatgaaaaaaatttcaaaatgtttttgtatattctgttgtaagaatttattcctgttattgcgatatactctggattctttacataatggaaaaaagaaactgtctattttgaatggctgaagctaaggcaacgttagtttctcttactctgcttttttctagtaaagtactacatggtttaagttaaataaaataattctgtatgcatttctgtctctggtttggttttgtccctcctggaagcatcactacactttggtggcagggaagctgagctatgtggggcacgtgtgttcacgcatgttgcctggaagcgttctccagaaaagcattgcctcttctctgacagctgagctttctcagcatgcagattgccagtaaagacgacagggaagctatctgtttctccctccattaaatcatctggaaagaaatttgaatacataaattacgaaactctgtactgcagttccgactgatttgtagacttttttcctataccttccactaacaacagtcaggccaaggcaagtctgatctgcatgaccccaaggcagaggacttcagttcttcacatttcccatgtgctttttgg

SEQ ID NO: 81559 - DNA, 1147 bp, Homo sapiens
ttgctgtgtgcaggccagcacagttgctcacaccttgcctgaggtctcgtttgtgagacctgcctgtggaaacacggtctttggtgtgttgatctaggagaagagatgggaaggcagacttcaagagccactaacatttcgtgaatgttttctgattttgatttttggggtgaccgaagttgtgagttaactgtgttgatgtagccccagataaagattgatttacctttgtttctccaaactccgatccccagtaggtggtttttcccctttccccagtgaatgaatgagtaagtgactcaacgaagacatgaatgagagggattcactgggatgcaggtgctgtggaatatctgacccctttctgccttggccacttgccggtcatgaggccatgaggccaagagccagctctccccagctcatcctggcaccatgttctttctgaggtgaaacaacacaagtctcccttgggtggcagtgctccctcctcaggctttgtgggtgttgcattgccacttctgcgtatgtttcactgaggttagaggctggtccgagaattaatgtggcatttcctgtggttgcagatacgtctgtgattatacctattacctgtctctgcatcatggaaagggctgcgcggcactcatccatgtccctccactatcgcgcgggctcccggccagcctgctgggaagagccttgagagtcatcatccaggaaatgctggaagaggtgggaaagcccaagcacagagcccagttcgaagaaaactcaaccatggtccttccagccaaagggaactgaccgggggattgctcctctagagaaaattgaatgtttcaatcctgtatgtagcactcaactgtgcattgagaaactttttcaaaaattgcttgtaagacaaagagggtggaaaactctgaattagcccaacaaaatcacaaagggttattttattgtcaggagaaagaacactctgaaaggtggacatttcacaggggatgaactagcttcagttatggttttcatgacaataaaatgaaatccgagtcatctgttttcttccaaaaatctacacagtgggtctgtgtgatcctgcgcagactgtggggaccacagacctgttttggagatgcttacagaa

SEQ ID NO: 81560 - DNA, 1059 bp, Homo sapiens
tcagcctcccaagtagctgggattacagacaggtgctgctgtgtgcatttgcctctctggtaggaactgtggctctcttcttggccccttgccactttgtgagctccttgagggcaaagtccaggctgcggaagacccctggaagtagaccccaaggattgggttttcagggactcttggtgcccaccccccccccccccccatcaactgaggcaagtccacctgccgctttcctcaggagctctccaagctgggcctggggaatgaaacagtggtgcagctgcggactctggagctgcctgtagattacagggaggctaagcggagggtcaccggaatctgggaagatcatcagccgcaagtaagtgatggccagaggcagtggggcatgggactggcgatgtggagctggagcctctgaacccccgggtcctggttctagggttgatggttgaggggcaccccgtccccaggccccaccagtcatgcaaggtcccagctgattgtgtaaggttctgggtctgtttgtaaaagtttaagccaaaatatggattagatcttaatagaaaatctggagagaaaggaggaggaaaagaaatggaagtattattcccagccaggactcaaaaatagtttccacctaagggagaggcccttgggttgggccccacacatacccatgaggggcaggtaggtttgaaggtggacgtgaggcaaggacctctgtgcccagggagcgactgggagggtggccagcctaggggaggcccatcttcatagcacgagcccattttatctggacataattactgtataaaaaacagatacaaccccacccccccaaaaaaaaccccaaacaaggaccagatgtgatgaggttaataaaacatacactatcaagccattcagacaatgccccagatgttttgataacatacttgggcagctatttttcaaaaaggaaaaataatcagcttgaataaattctaagaagatttcactggatggccactaacttcctttattaaagtttcatttaaaaaaagatgcaggaggcgg

SEQ ID NO: 81561 - DNA, 1700 bp, Homo sapiens
cctttgtcttgtcagcctgtggtttgctggcaaactggaaattgtttgatgaaatacctgataatcagccatgatttgggaatgcccgctggattccagagcgtggccttcctgtgttagaaatgcttagagctgccaggggcagtctcttcatttaattggatttgcttcgtgtgtaaatctcctcaagacaattggcatgtagacagatggtgggagaacgagggctccgacaaattgcttcgagatcaaagtgttcagactggcaccaacgataaccacaagagtgagaaaacgtgcatccctcccacgggcctctcagaattctaagatttctccagctccgtttgcaagttgcactgggggctgaccaagtttaaagtgaggtttgaacttgaaacacaagagcttcaaaccttcacttgcagagttgatttttctaatttaaaacagataagagatgtcatatttgctgatacaaatatgattctaaagcagaatgtgatttttgtgtgtgttgctgcatttttattgtatttttattatcccaggaggtacctggcttctcagtgcttttttttttttttaatctcactattttctataactgcccttttttttttctggctgtttccaagggcagctaaagtcttatttattctgaaggatttggttgaatcagaggacaccatgggctttttgggacgttctgtccaaaactgtttcattccctcagaaagtttttacttcctcatgagccaaccctgtttgtgggtctagacccagatgttcaggaattgcaaaggtataattcaagtttctctccagaactggttcctagtctaaaggcctgaggtccagggagctgggttctcagagactgacatttagtcacagccctttcctcatcaaagaatatgaatgacttgagaaatatgtcacaggaatcagaggtggaaatgtcacaggaatcagaggtggaactgaaaacctcagctgtactccgggataaagctgagttagagaattccacttgtatctgcagcccacttaattgagcacctgactccatcacaggcatatctggcactggctagtctcccacacaggaggccacacactttttaaaactttttattttgaaataaatataggaatttgccaagaagtgtacagaggttccctgtaccctttacccagcctctcctgatattgacatattaacattttcaatataaaagccaggatattgacattggtataattcaaaatttgtgcttgcagtatgtgtgcgtgtgtgtgtgtaatttcagctagtgtagcttcctatcaccaccaccacaatcaagatacctagcagtaccatcaccacaaagctcactcgtgctagctctttacagccacacccacccgcttcctcccatctcaaacacctggcaaccattagtctgttctccatctgtataatcattttattttacaaatattttatgtaggctgggtacaatgactcacacctgtaatcccagcactttgggaggttgagatgggcagatcacctgagaccaggagttcgagggcagcctgggaaacctggcaaaaatacaaaaaattaatcagacatggtggcatgcacctgtggtcccagctactcgggaggctgacgtggaaggatcacttgagcccaggagatggaagct

SEQ ID NO: 81562 - DNA, 1052 bp, Homo sapiens
acagagtgagaccccatctcaaaaaataacaaaaaaactctcccaaaccaaatagtcttcagccattttggatcttctctagtccatggtgtgtaagtgtctgtaggggaacgtggacccagcacgtctgggatttcagttcttggggagcagggtctcgctggggaccatgggcagggactgggctggatatttggactcataacactgccacagactattcccattccttcatcagtgtgaaaggaaaggatgaggtggcctctgaaagtctacctggccatggaggttgtcagttacttctcacccaagcagatagtatagtctatctgctgtaggaaagtttgctaggagggatttttttgtgattgggtgtatcgacgagctggcttgccaccacctggccagggctctgggcagcccatcccctagaatgtctttccaggggtcctgttcttcctgggagggccgggtccacagtgagttcccctgatggccaaggcgtctgtatttccatcttctgttgtgattccttgccatgtagtggcatctacactagagatggctcttatcaccccctttctacacatcaggggctgtaggatatctgtatgaaatgggatctccacagcataagatggctggtgtcctgtccctctccacatgggtcctgccatggcctggcaggacagagtgaatgaccagacttggatagggtggtggcagggcagtggatgctgagtgttgtcgttttgaactttgaagccctagtctggcggccagctgaccggcctttgctgggctcctgacattggctggctgctggttcctctggtattcagatttacagctcagccctgggaaattcagaggactgtagaaaatggctgttttgtggtatagaaagaaactttagggaaaaatgtaaatgcttggtcagatgccccgggggtcacatgacttttaaagtcagggttgctggaaggctggggagcagttgcaggtcagtgacacctgctggacctgaaggtctgggactttggcacacaaca

SEQ ID NO: 81563 - DNA, 1051 bp, Homo sapiens
tttggaattttgagctcttttcttccctacttcgtcctgccccctgttctccatcctgaaaagccagtgtaaacatgggcatcctgcctcagagtccggggcctgcctttttggtagggtattcacaagccacggggcctgcctttttggtagggtattcacaagccacgggcccagcttttcagggcatcgatcgcgagccgtttctgctcactgtcagcagtctgtcagccaggacagagtttattttgtctgtctatggctggcgtttccctaacccgattatggattgatgtggccatctcctaggaatttaggagctactcgtgctttcaggggagcaagcgatggatttcactgtacctctttctgctgtccaagtttgcatggggaaaatgaggaccctgccaggagcttgcctgacaggccctgccccgctgcagactcccagccctgctgggtaggatcgctgcaggcctcccgcctctgtgctccggtatagtctcggagatgcccgttgacgaagaagacatacagatggttgaatagaacccattcttttgtataagccaaaaacttaccatttttgaaaatcaccagtgcatgtctggaagacaaaccctcgtcatcctcgatgtgagtcttgctcagtagtctgcactgctccgattcggaggacaggtgtgaagttcctgtttgtgttcgtggacttgcgctcttctgacccttattctttaactaaagtgctcatttgatctctgcaaaccttgacccacctgtggtggccgttgccccagaattgctgagttgactgtcatcatcctgtggcttattggttctcattcacatgcaagggaagggactgtggctctttaatgcttaaagcacgttttgctgggatttgtccattgtcccaaggactctcaaatgtactgaacacctcccaacccagatctttggcccttctaggtgactgtcacagggaaggagcaacattaaagtaatcataaaataatataattgtatacttgtaatttccagagagacttgc

SEQ ID NO: 81564 - DNA, 1054 bp, Homo sapiens
cttctgtctctggagactgagtgaactgcttcaggatactggtaacgatgttttctgctacggtttctgtcatggaatcgccttgcagagaaccagtggcatcactggtgcccaacctgaaccgtagctctcttgcttctgcctctctaccggtcccaccaccagcatccttcacaggcgtctgcaaacctttcggggacacctctgctcttctgtcctgggatacttctagactaatcggcacctctctctctcgcacgctcttctccttcggtgagtccttctccttagccttctccttcatctgctggctttctctctgtctcgcttccttatctaactttgtcaattcttcccatcttaggtttctctcctcggaagccttctctttagaatcgaacattttctcttctggctttgttcggatggtttctggtctgtttctttcttgctccctcgtggctttcacttctgttttctttcccagaatgacggtcctctcatttgaccgtgtgctttccgaagcacctgctgccaccttgtctcggcgatcccggtacgactcgcgggcaattgtggaatcttcacctatgtaaacggggacctcccttgtatctccggcttttggtctgtcagggaatgttttcacttgagcctcagtatttcttaaaaggccataggttggagagaaagttctgacgttggtttgactgctgacggcttttccgtatgagttttcctgctgggtagtggccgaggaagaatatcccgagcccaagaagcctcttctggcatcacctccaatagatgtgcccgtctgagatccacggtgccctgacaggttagaatacagtgccgagctgtgattgaaacttgccaaaggtgctttctgccttgaaaatagattcctttcattttccctctgtagtagtgagtcggtatagtgataggatttgtttctgaattctgtagaaattgaacaaagcattcattaaaatgacagtcatcattacccttttccatctacaagcattgttgcaggccaaatcccatt

SEQ ID NO: 81565 - DNA, 1034 bp, Homo sapiens
aggtccccgtttacataggtgaagattccacaattgcccgcgagtcgtaccgggatcgccgagacaaggtggcagcaggtgcttcggaaagcacacggtcaaatgagaggaccgtcattctgggaaagaaaacagaagtgaaagccacgagggagcaagaaagaaacagaccagaaaccatccgaacaaagccagaagagaaaatgttcgattctaaagagaaggcttccgaggagagaaacctaagatgggaagaattgacaaagttagataaggaagcgagacagagagaaagccagcagatgaaggagaaggctaaggagaaggactcaccgaaggagaagagcgtgcgagagagagaggtgccgattagtctagaagtatcccaggacagaagagcagaggtgtccccgaaaggtttgcagacgcctgtgaaggatgctggtggtgggaccggtagagaggcagaagcaagagagctacggttcaggttgggcaccagtgatgccactggttctctgcaaggcgattccatgacagaaaccgtagcagaaaacatcgttaccagtatcctgaagcagttcactcagtctccagagacagaagcatctgctgattcttttccagacacaaaagtcacttacgtggacaggaaagagcttcctggggaaaggaaaacaaagactgaaatagttgtggagtctaaactgactgaggatgttgatgtttccgatgaagctggcctggactaccttttaagcaaggatattaaggaagtggggctgaaaggcaagtcagccgagcagatgataggagacatcatcaacctcggcctgaaagggagggaggggagagcaaaggtcgtcaacgtggagatcgtggaggagcccgtgagttatgtcagcggggagaagccggaggagttttccgtcccattcaaagtggaggaggtcgaagatgtgtcgccaggcccctgggggttggttaaggaggaggaaggttatggagaaagcgatgtcacattctcagttaat

SEQ ID NO: 81566 - DNA, 1512 bp, Homo sapiens
gggggacctgggttccactcactggaaagaacaagctagaagcggtgaatttcatgccgaacccacagtcattgaaaaagaaattaaaataccccacgaattccacacctccatgaagggcatctcctccaaggagccccggcagcagctggtggaggtcatcgggcagctggaggaaacccttcccgagcgcatgagggaggagctgtccgccctcaccagagaggggcagggtgggccggggagcgtttccgtggatgtcaagaaggtccagggtgctggtggcagttccgtgaccctggttgctgaagtcaacgtctcacaaactgtggatgccgatcggttagacctggaggagctgagcaaagatgaggccagtgagatggagaaggctgtggagtcggtggttcgggagagcctgagcaggcaacgcagcccagcgcctggcagcccagatgaggaaggtggagcggaggccccggctgctggcattcgctttaggcgttgggccacccgggagctgtacatcccttcaggcgagagcgaggttgctggtggggcctctcacagctcgggacagcgcactccccagggcccagtgtcggccactgtggaggtcagcagccccacaggctttgcccagtcacaggtgctggaggatgtgagccaggctgcaaggcacataaaactcggcccctctgaagtctggaggactgagcgaatgtcatatgaaggacccactgcagaagtggtggaggtaagtgcgggaggtgacctaagtcaggcagcgagcccgaccggagccagccggtctgtgaggcatgtcacgctgggtcccggtcaaagtccactgtccagagaagtcatcttcctaggccctgcccctgcctgtccagaggcatggggctcgccagaacctggcccagcagagtcttctgcagatatggacggatcagggaggcacagcacatttggctgcagacaatttcatgctgaaaaggagattatttttcagggccccatttctgctgcagggaaggttggtgattattttgcaacagaagagtcagtgggtacccagacttctgtcaggcaactccagttaggccctaaagaagggttcagtgggcaaatccagttcacagctccactttcagacaaggtggagttgggtgtcataggagattctgtacacatggaagggttgccagggagcagcacatccatcaggcacatcagcattgggcctcagaggcatcagaccacccagcagatagtttaccatgggctggttccccaactgggggaatctggtgactcagagagcactgtgcacggagagggctcagcagatgtgcaccaggccactcacagtcatacctcgggtagacaaaccgttatgactgaaaagagcaccttccaaagtgtcgtttctgaatctccccaggaggatagtgcagaggacacatcaggggcagaaatgacatcgggtgttagcagatcctttaggca

SEQ ID NO: 81567 - DNA, 1037 bp, Homo sapiens
aggacaagttcctttgaaacccgagttgtaaaagatcttccttgcccaggtatttaaaaataattcatcctttaagtcagaaatatatgctggatgttgtcttcctgcagaccagcccctgcaggctaaggcacctgctgcagggggagggccccgggaatccctgtggcctcctgcagccctgcttccggcttccctctgccctcggatgcccgtcaggactggagccggaaggttcactgactgaccttaaaggctggcccctacgtcctttctcagcccgagcagaggcccagcgctctgccgtggagggcctacctcacagagcctggtccgcagagagcagccccagggctgcctgagtctgctcagggaaacagggccacagcccggagcagacacaacctggccagcagggcgccatcccctttgagggcagggaaggcgagccagggaggcctccagtgcaaccctgaccatcctcctcacccatgtcctgctcaccaagccagctaagggttgagggcctcagctcagtgaggatggtcacaggtgattttaaaagatgggaggggccaggcgaggtgactcatgcctataatcccagcaccttgggaggccgaggcggtggatcacttgaggccaggagtttgagaccagactggccaacatggcaaaacttcgtctctactaaaaatacaaaaattagctgggcgtggtggcatgtgcctgtaatcctggctactcgggagactgaggcatgagagttgcttgaacctgggaggcggaagttgcagggagccgagatggggccactgcactccagcctgggtgacagagtgagactctgtctgaaaaaaaaaaaattaaaaaaataaaagatgggaggaaaacatctcatgttttatgctctgtgctacaattctcctctcatttatagcccctaccaagtcttctcataaatgggtctgggcacctgctgggcagcaaaggctggatgggaacggtgtggggggctgaggggcaccacactcacc

SEQ ID NO: 81568 - DNA, 1084 bp, Homo sapiens
aaagtcaagggcttgttggacagagggacagggatccttgcctttgtagaatttgaattatgcattaaataaaagaacaagaagagtttactacttcttgatattgtatatttcttagtcaaatgactaagaaatagtgaatattttctgttatttaaaaaatcctgtcatattctcatctgatagttacttttttcaaaggacaaccacattctcaattcctcagactgaaacattcagtttttatagtttccacagcttataaagacaaaggcatttggctgcttgcattttaattttcttgaagacctaaaaatggttggcagatcagaatgaataaacaggcttcagtagtaagtccccaaaccctcacacttttttttactcaagctatttatgtagcacaattcatccgatttttaaaaaatatattatgaaacatttgttatgcagaaaagtatggataacataacaaagacctttgaactcaccattcagtataagaaataaaacatgacccatccagttgaagtcccctctatacctaccccatccccagataactacttttttaaatttgatatcattcccatgctcttcttattttactatggttttgttttgcatgttttaaaacttcatattaaattataatacatattatatgcattcatctgtcgttttctttttccccttgactttgtaatcatgagattcatctatgtggttatatatacacatacatatatcaaacatttatatatcacatacatatataatatatacatatcacagtttacatattcattactaaatattgctaaattgttttacaaaggggctataccagtttgaatacccactatcaatatataaaagaattcttgttgctttgtatctttaacaaaacttggtagtttttgcagtctggtgggtgaaatggtacctacctcattgaggttttagtttgtatttctggttgttaatgagattaagcatgtttatttcatcagatttcaactctttgaataatctgtttatatcttttgagtgttattctattgagaggttttggtttggtttg

SEQ ID NO: 81569 - DNA, 1026 bp, Homo sapiens
catagtttcttcttttgcagtaacttttctttatgtatcaccgggaaagctagatgtatgaaaattaaagaaagtaaattacggtatccttcaagacctaaatcctttctaatgaaacaggcagattaatgggcaaaggacagtcttaactgttttttcttgtcccaatacctctttccaaatagctcaacactgctaacagtatatttattctgtttccatttcaaatctgtgagcagttttcaaagttatgataaatgcttttcttcagatgtagctgagcagtattttcaagagagcatggctcatcttaaggattctgaagggatgggaagaaccaaatttctttcaattcaagatgaattttgccattttctacaaatgactggacaaaaagaggtaagtgagtttggatcacaattgtctagttattcacagttgatatccaaagggcaactcctttactctgcaagcatccattaagcatctactgtgtgcaaagcatgtgccagtctctagagggacacataaataaggctagggctcctttggggcagcttccagagatacttgctcttagaagctgggagactttatgagaatatagattgtcatgcccacctacaaaagatcctaaagaaatagtggacaggccctgcttattgaagtcctgcagatctggctggaatagtgtggcagttagtgtgtctaatccctctctcctcagtttgggtaatgaatggagtttgcatgtctaaggaaaactatacggtgcagaagttacagctcagttgtttagtattgattcgtacaagcgtgatttacgtggcttatgaaaatagagcaagacccagaccttatattcattgggaattaaacccttgggaatgcattccctgcaaagcctaacataccattgctttatgtttttatatatgtgtgtgtgtgtacatattaatacatatatatatatacaatcgcccacagataggaacaattatatatatgtgtgtgcatatatatgta

SEQ ID NO: 81570 - DNA, 3445 bp, Homo sapiens
aaatttttccatgaaagaaaaggttcctaatagtcttaacaaatatgctggagaagattatttttaaatatgtgctgtgtttgctgaaaaatatgtaaggatacattttttatatgagagattcttattctaagaaggtatagaaatattttcgcactgccacctttacttataatttctaaattagcatttttatgatataaaagtaacacattttcatagaagtttgggaaatttagaaaagcacaaacatgaaatgtaaaattacagtctaacagcttagagataagtattgctaacatagcaatggcttttgccatctttctgtgcatatgtgtacatgcaaattagatatacagttttcacatgcctgagatgatatacagaatattttgtagcctgccttttcactgaagtatatagaatgggtaaacttctgtgtcaataaatatggatcagcactaattttcatggctacgtggcattccacagtatagatgtacttactgtaacctgcttgcacagtctcctgttggtgcattttaagtgctttggacttttccaccattatagagaatgctaaggtaaatgttctatatatatatcttcttgccctgccagagtatcacttcaagataaattcctagaattggaattcgcaaaattgtatgtgtgtatgtgcgtgtgtgtgtacatatatgtgtatgatttgatatagaaaagtttatgcccaaactatattctcctcaacagttgatgagagtgcttcacatccttcccaatactgggaaatttctaaaatttctcaacagatcagttattagcatctcagcatcctttccttgatggttgctgtcattgttttgtaaagtatttaacagtttttaaaccaatacctacccatatagcacttactgtgtattagaggttattctaggtgttttatgaatatcaattaatttaatcttcttaataacccaatgaagtgtgggcactgttatccttaactcacaaatgaggaaactgagtgactggaagatcgtacatctagtcagtggtgaagccaggacttgaaccttcctggtgattccagaacccatcttcttaaccaccatgccctgctggctcttggaggaaatgcttagttagcaaggaaacgaacctgaacaccagggatcaaagagtcacatcccaactaccagctcacctatattttcagtattttctattttaattattaaataaaataattcctttgatttttttagggtgtatcaaggtcagaagaagtcaaaagaagctttgtcccactatcaagcagctttggaatatgttgagatcagtaaaggtgaaacaagtcgtgagtgtgtacccatattgagagaattagcaggtgtagagcaagccctgggactccacgatgtatccatcaaccacttcctccaggtaagctacaaggtcctggctaccaaagctgttctaggcccaatgcttttcatagacacaagtggcacagcagctctgaaaatgcctggctttgtcatttgctctagataaggacaacagttggcctagagtagatgctcaacaaaggtgttcttatcaggtggtcacgtgggcaagtgctggtacttgtcccctgttagtagttgcacaaaccacaaacagcctgagatgctctaaagggggttgctttatcctttaatatctatttagagcgtatgttacccaactgataaggactctttttttctacattctaaagtcttcacctgaagccacctagagttatgtctgttagctgctagtctactttataagattcctcagtgagtgtgttgtgtccatcagagttctccagagaaacagaaccaataggatacgtacacacacacacacacacacaaacacacacactttggtttttttgttttagatttttttttttttttttttttttggagagacagggtttcatcatgttgcccaggctggtttcaaactcctgggttcacgtgatcctcctgcctcagcctcccaaactgctgggattacaggcatgagccaccaggtccggcctctcttaaggaactgacccatgcaattaaggggctgttaagtctggaatccacaggggaaactcagacaggatttctatgttgcagtcttgaagcagagtttcttctagaagcctcagtttttcactctaggtcttcaactgatttgatgagggccaccgatattatccagggtcatctcctttaaaatcagttgattgtgaatattaatcacatctacaaaacaccgtgtattcactgcaacacctagactagcgtttgaccagacaacctggccccatagcctagccgagttcacatgtaaaattaaccataatagtgagttttatgtctttatattgtatcatgccaaaggcacttttaagaaagtttttctgataattttttcctgtaaaagttgtaagatacagaccaatccattcttgttatttgaagtgagatacagtgacaaggtcctgagagtacttcattaatatttcttattttaatttgtctgacaatttatactcctactcacagtttgttagagtgcccctttttctcactttatctggattgtctcttttaatcattattaccaccctgtgacacatgattatttcccatttgtagataaggaagccaagaattagagaggttgagtgatatgcccaggagtacatacccaataaatggcatgctcacattcaaaaccaatacttaagaaagattgttctggatgatttgtagagaatggattggggaggttgtgccaaccatagaactagaccacttaggaagctattgaggtagccaaagctgagaatgatggtagcttgaactaggatgaagatagtggagatgaagagaagtagatggatataggaaagatttaggaggcagaattgataggacatggagattgattggatgtgggggaaagaaggaagggaagagttatagatgactcccaggtttctggcctggactgctgagtagatatttgtgccatttctaccagggaactggtgtgtgactgggtgatggagagatggcaagctgtgttttaggtgatgagcctgagatgcctgtgaggcgtacaagtggaaatgacaataggcagttagataattggggctggtgctcaaaatataggtcagaaagttatccacttacacacagtgattgccctgggagaggacgagatcacctagggagagttgatggagagagaaaagaactgatgacagattcttgaggaatttcagtattcatggctgaagtaaagaaggattacctagcaaatgaaacagagaaagactgccaggaaaacaagaggaaaagggaaaatgaaagtagtgtcctctgtccctttcttttttcttttt

SEQ ID NO: 81571 - DNA, 1044 bp, Homo sapiens
ccttctttctcaatttaaagtaaaagtagtatctaccatttattaaagtctcatttggtgccaggcatgttgttttccatgcataaccttattcagtcctcaccacagtcctcaaaggtgggtatttttaatatccctgtttacagctgagaaagctgaggccaacgttttataataagtggtggagcaggggatccatcctgggcagtctgacttcagagccaatgttcttgaacttcaccctatgctgcctccagtaaattgagttcaggttccttcagggactcgacacagttgaaaatacagtccaacatgctttgtgtaacatcacaagcacaggtggcactaatacatgtctgtgctttttaaaaatatgtaataagacaatcttgtgtaagaattcccacatgaaacacatacccttgattttctccattagaaaatatattcttcctgttttatagacataggaacagaattaacttcatattttgacagatttttttagagatctaagatacaattttgtgtaactaagaacataagatgggggctgtgtgtatgtgagtggaagtggttgtcggtgtaggggaggaggatgggaatacagggacgtgcaaagccctgaagccgtgctagcgatctcagtcctcccttcccacagattaacaagcccgtggaggaacactggaacacactggggaattctttcttagtagtgatttttttttgctccactttgtttcatattagtctcttaccacataggaagatgaaattgtcacacattaatctgttacctcactggaattgtgtttgtaagtttttgtagatatcagatatgtattatgttaaaaaaataactctctgacattatgattataggtgggtgagctgaagattcagaatttttagtatttcattaagattgcagttacacagccaggattaaaattcatgaatattttatttcctgctcagaatgctatagttcttgtattcagtttgtttcttataattatatgtaacatattttgcttctgc

SEQ ID NO: 81572 - DNA, 1052 bp, Homo sapiens
gtagtcactcagtatttatcaaagggatataaaagcgcattgattttgtgttttgtgactcttaagttgtataactggtaagcctgttttctcttcctaacagtacaaacaggccgtccatgagcttgtgcgttgcgtagcactgacaagaatttgctatggagactcacattggaaactagcagaggcacatgttaatctggctcaaggctacctccagctgaaaggtaagctcgccttagactgagggggatcagttggtcgatttctgctgttctccccaaaatttgattcacacttaattagaaggatcaggttttttaatattctcctttctaaataccaagaagccatttctttttagaaagagttgataaggtatataacctgtaaacattcaaaggggaaaaatggaaaaaatattttaacttttctggtttttttgtttttgtttttgtttttatgatttcaaaagtaaggttcttaggagaaaattaatctgttgggccagaagactttgtaggaaaaaacccaaggtatggaataggggcccagaatgggatccattcacacttttattggagaatctcttgactgtaaataaccaaaaaatttaaaaagactaacccaaattggcataaacaaaagtttttggctcatacaacttaaaaattcaagggaaaaaatttttagacttagccatatccagtgttcaaacaatgtgaccaggattcaatttttctctctcccactgcttggctctgtttttcttggtatttgctccattctttgccaggttttgcccacatggtggcaacaagactgcctgcaactttagacttcccttataagcattcccaggaggaaaagaatgtccctccaccaaaatcccgggatttgggaagggttctaattggaacaacttgggttgtataccaaaggcaaggaatagtctgattggctaaacctttcttttggcttcattggatcctgaaggagaagcaggccttcgccacatctcatggattggatgtgcaggagccaggcatccc

SEQ ID NO: 81573 - DNA, 1054 bp, Homo sapiens
taacaaatactgcagggcctcttacttatttcatctttaaactttcttttctgcctcccactaaatggaagataagaaaatatagttaaatctattgaagatgttgcattcctgtttataaaaatgtatgatcactttttaaaatgcaggcttaggtttccaaagcaacagcatttgcttcccactgctgtagactgtggtcagtgaaaggcaggatgatgtcatgggaaacccccaaattatgagaagaccagggtgctaattctggctgtgtgatgtgcaactgatttaggttcatttcatcgtctttatttataaaatggggatgataatagctaccctctgtaccttacatggttgtaagggccacatgagataaaacatgtgaaagtataaagtgttatgtatatattagttggtattgcccaaatcacatgggtagttgggacagcacaggttcttgaatctcagattctccatctctggctactgctctttccctagactgcagcacctgttgaaatggtcatcttatcagccagtggggttgaacagatgaggaagcataaggcaagaagttattagaaaaaagttagccaacatcttaggatctcaaatagcactgtgtctctgtacaacagggtgtaggcaaagctttcctgttaaatctgaagtattgacctttaacgtttttatttatttatttttatttgtttattttttatttatttttattttttttgagacagagtctcactctatcacccaggctggagtgcaatggtgtggtctcggctcactgcaacctccacctccctggttcaagtgattctcctgcctcagcctccagagtagctgggactacaggcacatgccaccacactgggctaatttttgtatttttagtagagatgggttttcactgtgttggccagggtggtcttgaactcctgaccttgtgatctgcatgcctcgacctcccacagtgctgctgggattacgggcgtgagccaccatgcccagccgacctttaacatttttaggaggtacccag

SEQ ID NO: 81574 - DNA, 1051 bp, Homo sapiens
cttttttaagattgttttatttattcttagtctcgtatttccatcttaattcatccataataaggatcaacttgttaatttctgcaaaaaaacagctgagttttgatggatattacattaaatcgatacatcaatttgaggagtattctatcttaatattgaggcttttaatctatgaacatggaatgtccatgtatttagatctttaatttctttcgataatgtatgattttcattgtacaagtcttgtatttcttttgttaaatttattcctacatatttattctctttatcctattttgaatcagtgttttcttaattttattttcagattatttattgctgacatataaaaatacaattttatttatttattatgtatcctatggccttgccgaacttatttagtcgttctaattggggggggcgatttatttgtttatttattgtggaatccttaggattttctacatagagggttatgtcagctgataataatgttttatttctccctttctaatcttcatgccttaatttattgttcttgcctgttgctctgactgtaatatccacaactttgactacaggtggtgagagaaatcattcttgccttgtttccaatcttggaaaacattcaaacatgctccattaagtatgatattagctttaggtttttgtaaatcaggattttttggttttgttttttaatttttaatttttgtgagtacatagtagtaggtgtatatatttatgagatacatgtgatgctttgacacaggcatacaatgtatagtaatcacatcagagtaagtgggtatctgtgtcctcaagcacttatcatttctttgtgttagaattattccaattctactcttttagttattttaaaatatacaataacttattgttgactgtagtcaccctgttgtgatatcaagtactagatcttattcattctatctaactacgttttgtacccattaactatccccacttttccctccctgcccaatacccttcccagcttctggtaatcatcattctactctct

SEQ ID NO: 81575 - DNA, 1052 bp, Homo sapiens
tcaatctgtacaaagaatcaccaaactgataaagcaggaaccagagggcaaatcacgctgccaagacaactgtgtaattcgctcgaaaaagaaacggtgagcctctccagcagactgggtaaactggcaagggattttacgacatagttggagattggagagttacagaaacttttccggttttttacaagttttaaaggagtgattgagtgtcaaaggaaaagcagagaaaatacaggcacaatttaaagacagcaggaagaagagtgttcagagagcatttttctctttagggtgaagtttgaaagcatcatgcccagattatcagtggatttttgaaaggtaaaggaggcaagataataagattaactatagatcattttctactttaagaaactgtgcttcgttattgttgcttaagtgtggatttagaaggacatttagtaatattgtaatttttatatggatatttttgtttatatattgtcatacctggcataatagataatatatctattaaaagatataggagaaaatagagttgcttgaacccaaattttgtgtatatttgtggattagggattccagggacagatctgctaatggctgaacaaaacatactacagatacctgaagcagaatcagcatgtaagggtaaattctcaaaaaaatccagcaatcatatttcaaaaatgacatttttaattaaaacaaatacaaaagaatttatcaaggaaacgttgatgaacatgactatttcttaagttgcctgtgttaatccatataggggaatataaagtaataaaatccagcccctcaagagcagggacaaatgaggctcagaacatttaaactaaaacttctgaacagttcttaatgcccggatgactgttgtagagcacaggtgcttcaggagctcagctcaatgtgagatgaattattcagagaaggcttcacagtatgggtaagactcaatttgggcctgagcaatgggcagaatttcagagagaaaaataagggaagtggcatccctactagtgagtgagttgtta

SEQ ID NO: 81576 - DNA, 1052 bp, Homo sapiens
tttgacagttctctgagaaggaagctttgaaggcactctaacgtggtcctacccccttgctactgcttttctctttgattgtgaactgttggtttttcaggcttctgcagagcaggagagtggggttaggactagagcaagcgaaaataccatgaagcctacaacccacggttcttactgacgctcagtcatttttttcttggataaattctccctgtattatggtaagccttaggttcatttccagagttctcaacatgtagcatttggacatttctgacagtttctcattgtttttatggaagagaatttttggaggttcttactctaccactgttgctcaaaatttttagttttgtaaaaaactgccggtttaccagattagctgttccattttacatttcccctggcaatgtatgattgttccagcgtccgcacatcttaccagcatttggtgttgtctttgttattttagtcatttggatagatatgtggtttttatgacattggaatttccatttgtatttctagaatgactaatgatattgaacatccttttgtatactaatttgtcattggcatctttttttggtgaaatgcctgtccatgtctattgctcatcttctgattgtattttttttaatttctgagttttaagagttctttgtaaactagttttctgttctatatgttgtttacaaatattctctcccagtgtatagcttgtgttttcatcctgtttatgttcttttgcagagcaaaagttttacattttgatgaggtccagtttatcattttttgctttgatgtgtcatgcttttgatggcaagtctaaaaactctgtgtctagccctaggtcccaaagactctctcctttccccgcccccaccccaaagtcttacagttttttattgtacatttatcacctatatttttaaaatttttttctgggattagaattcttagtgaccattttttttgttgttgttgttatcagcacgttcatgatattcattattccctggcgtgcatagtttctgaagaaacatcta

SEQ ID NO: 81577 - DNA, 1142 bp, Homo sapiens
aattttttgtttgtttgtttgtttttgtttttgagacggagtctcactctgttgcccaggctggagtgcagtggcacaatcgcggctcactgcaacctccgcctcccaggttcaagcagttctcctgcctcagtctcccaagtagctgggactacagatgcacgccaccacgcctggctaatttttttgtattttagtagagatggggtttcaccttgttgctcaggctggtcgcgaactcctgaggtcaggcaatccgccctccttgcctcccaaagtgctgggattacaggcgtgagccaccgcgcccggccataaagatttatttttaaagtacaataaataaaaccataggtttttactaaaatcttgttctcttgtctctaaatcaatgatataaatttattttcttaaattattgttgtgtgatctccagcattcacttgttttgctctgaatagttggttactgattgcaggaagtctccaccagagtgtgctaaagacactgtagtgggaaaattgttacttaggcttgtctagacttctcagcctctgtgaaaaagattttttaagagaagcatttgatttcttgttacaaaatttcttttgccatgaaataaattctgtacctcgacagttgagtatttctacagacactgtaaatgatatttaatctgttgttggttctccgtatgcatgctagctagaaatatctttattttgtgaagttattttttagaaacgaaaagttcatcttcctttacacaataggtgttgatttttcttcacacagtaagtatattttttaaagcctgaataaaatgaactggaaaaactagtaatttgtgttatgaagttaaaaagaccttatagtttatccattatgtatgcttttattttaaaataacaactaaatcagtaaatagatttaatatttgcaattctggtacaaaatatttttctcaaagtattattagttagctgtgataaccattattgtatgttgatgcattagagtagggtgcaaaagttgtggcctatttatatttgataaatttctaagtgagcattttataaactgattatctggcaaaagtacttaatgataatggctgttttttttctttttccttcctagat

SEQ ID NO: 81578 - DNA, 1268 bp, Homo sapiens
ataagttgtaaatttaataaatctagttaagaattctggtcagataaaaaaagccctgtgtatcatttcttgatttattttagtcttaatgtttttatttgtgctgtattttaagttatattttatcttgagctggaagtatttatcactttcatgaacttagtttgatctgtgtttttactattttgtgagcaactgagacaaggaaattaagtagtaaaatattttaacttggaatacttgctttaaagatttgatgtaatacttgagtcaaattcattttgccttctccttttctctttgaagccattgggtctcttgtaaaactccaatgtctggatcttagtgacaatgccttagaaattgtttgcccagaaattggtcgtctgagagctttacgtcatcttcgattagctaataaccaactgcaattcctacctccaggtaatcatagtctctagcacactatagtttcttgtctattataaatctgtattcatatttctcactctatgtctaggcaatgagctgtagatgtatttataagtatttgtccatttgtttgaagatgaaactaaagaatgggtgaaatattactaagagtcttttttgtgatgcaaatgtaagaaggtagaatttatattttagatatagctacaattactacaattgtgcattgcatccaatatccctttgaatcactgctctggcaaaatatttgtacaaagagttacttcagttctgaatttcacataagagaatttaggtgaactttgcgtgatataatcattttactatccaaaagtcaaatgcatacaatgttttctctcttactctctagtgaggtaactaatgtacattaactttttttttttttttttttttttttttttgagatagagtcttgccctgtcgtcaggctggagtgcagtggcacaatctcagctcactgtaatctctgcctcccaggttcaagcgattctcctgcctcagcctcctgagtagctgagattacaggcgcgtgccaccacacccagctaatttttgtatttttggtagagatagggtttcaccatgttgcccagggtggtttcaatctcctgaccttgtgatccacctgccttggcctcccaaagttctgggattacaggcatgagccaccgtgcctggttgactttttttttctgtttttaacagagtctcactctgttgcccaggctctagtgcagtggcgtgatctcggctcactgcagcctccgcctcccggg

SEQ ID NO: 81579 - DNA, 1063 bp, Homo sapiens
acttttttttacatacatttaaagaatatacaaaaaatacaattctgccaggcatggtggttcacatctgtaatcccaccactttgggaagctgaggcgagaggatcaggatcgcttgaagccaggagttcgagaccagccagggcaacatagtgaggctttgtctctactaaaatccaacaataaaaaaaaaaaattagccgtgcatggtgacacacaccttagtcctagctgcttgggaggctggggcgggagaatctcttgagcccaggatatcaagggctgcagtgaactctgattgcagtattgcactccagcctggacagcggagtgagactctgtccccaaacccccacaaaaaacaattctgtgataaaccattgttctgggtgttgtattattctgtgttttcctgtaatataaaaacatgatgtggtagaatatagtcattgccttccattatatattcttagaggttaaggatgtacttctaatgtcattgactgcttcttaataaccagtgaagggtatatgttttgtgactactttcacataatttatttatatctcacctgttacacaagaaattcgaggcatatacttgtgattttattttcctaggtttgtttctatttgtgtttggttttgcttgttttgagtaaaattatataccttaatagttatacattttggataggaacttttgattgagccatgtatataggctttattatttcttgccaccatgagtagcacttgactgggtcttatgaattatttgattcactttatgcatctcatgaggtgatttcagatgttatgatttaagtctgtaaggggctaagcacacgtcccctaaatgcttgattatgtttggagacatactatgggagggtattctaaaggtgggaaagaaatgtgagggcctgtgatgttatccccatttgaccacagtaggcaccagttgatatctgcttaacaaaccccttctccatagtccatgctgagacttgtcacatgttatattctcttaaaagacttaacattttaccatgtttctttg

SEQ ID NO: 81580 - DNA, 1094 bp, Homo sapiens
cctgacctcatgatccacccgcctcggcctcccaaagtgctgggattacaggcgtgagccaccgcgcccagcctcgtacagtctttctatacctacgaatcctctgggttctacacgggtatgtccacatatagctttcaaagttagactgatttttctttaacccttgtctgtggcagatttcttttcccacctctatttcagtcagggatgatagcagccgaggatctcttgtctttgaaaatgtgcttctcactctggagttgatttacatttccctatgtcctcagtctctgatgggtttttattcagcttgttttagttgttagggtgagagtgatgatctctttggagtttctattttcaaattggaattaagtcctccttcttcccaactgactttcaccatttgtttctggttcctctttgcttcctttctgtttctggattacttgagtatgttttagtgttctgctttatttcctccattggcttttctctagggttcacaatatcctcccttaacttactacatttagaatattgtgccatttcatacaaattacatgcatttttatattattgtgcatattttacaacagtatacttccttttaccctcctccttttgtactactgtgtcatatattttatttcaatgtatgctgtaaactccattagataatattatttttgcaagtcagttgtctgtaaaatactaaggttgggtgcggtggctcatgcctggaatcccaacactttgggaggccaaggtgggtggatcacctgaggttgggagttcaagactagcctgactaacatggagaaaccccatctctactaaaaatacaaaattagccaggcgtggtggcgcatgcctgtaatcccagctactcaggaggctgaggcaggagaatcgcttgaacacaggaggcagaggttgtggtgagccgagatcatgccgttgcattccggcctgggcaacaagaacgaaactctgtcacaaaaaaaaaaaaaaaaaaaaaaaaaaaaaaaaaaaaaaaacctaaacaatatttacctgaatattcaccatttcctgtgctttctattctt

SEQ ID NO: 81581 - DNA, 1046 bp, Homo sapiens
ttaaacatttacgtattgcttttccctacacctggcatcaaaactataacattatttgtcatagaacatatttaaactaattttctcccaatgacattttgtaatttgattgtataaaattatgtaatctattatgaagagaattactgtgtacctagaaataaaggattgttggggaaaggcttccatcagtacagggcccctttctgattaaacctcgctaaacatcacaaagtccaatggatgtttgaggagacagaaagaacagccaatctttaatactcgagaaatctgatacctttgtgagttgctgtaaacactgaattaccatgagagaaggttatagtaacaaagaaacaacaaaaagtaaccagcagtcagaaaagatgttgcttacatctggcatataaatcagcctatttttaaaaaatacttttatccttgaaaagttgttttgcataccaaaaaaggaaggatttttagcccaagttaatagcatgaatctgttgtgttttaatggctgaaagtatgcacagacagaaatgtgtaccacatataaccagcatgtgttgttcctaaaacccaggcttcaagtgtagtcaaatttattaccatttttttcttaaaatttactttttctccagttgaacctctgtaggtttattggaatgaaatttagtatcctttcttaggtctgtcccattgccacctgaattgttgtgaaacctctgtgtttattgatctcatgtggaggtgaagaggagtggatcagcctttttcctacagaggacataaaaacagccagagcctggtcctctagggcttctgctgttgcttactaccctgttgttgagagtgtattggcataggctgctgttctgcagcacaggctgcagtgatttttcagaggtgctgatcccaccttgtagttacaagcctgggcacagatgctccatatttgaattccctgtgttacagtttctaggagtgacaggtggcccaggaacactgggtcagccctggtttcctcatcacttccattgtgc

SEQ ID NO: 81582 - DNA, 1365 bp, Homo sapiens
aagagtagaattgctggatgtatttttaactttgaaagaaactgccaaactgttttccaaagtggctgtaccattttacattcccactagcagtgtatgagggttccagttcctcaaccttgccagcatttggtatcttcagtcttttttatggtagctattctagttgctgtatagtggcatctcattgtgtgttaaatttgcatttcactaataactaaagattaagcaccttttcatgtgtctatttgccatctctttggcaaatattaactatgcctatcttttggccatttttaaattgagttgtttattttcttattattgtattgtaagagttctttatgtatactggtgttaatggataattttcataaaaaagctaagatcgtgatgcccatacagatataaaaaatttaaaatgtggcaaagcttttatttaacttattaatgagtaaattgataaggtgttataacaagttcaaggagaatccctagaacacacacattcatagatcaagaatataaaaacggcctgggcacggtggctcatgcctacaatcctagcactttgggaggccgaggtgggaggatcacttgaggtcaggagtttgagatcagcctggccaacatggtgaaactccgtctctactaaaaatacaaaaattagctgggcgtggtggtgcatgcctgtaatcccagctactcaggaggctgaggcaggagaatcgcatgaatccgggaggtggaggttgcagtgagatgagatctcgctattgcactccagcctgggggacaagagtaaaactccattgcaaaaaaaaaaagaatataaatgaatattcaaatggaggcaaagctagttttctcaacaaagacagagcattgtcccccccactggatgtaatttatgtatgtgtttataaacaagaattgtttacattgttatcagttatctgtagtttacagaattgtaaaattgctgtcagagactcagtatcagataacctgtacggatatactagggaccgaggttagaaaactctgacctgtgggccaagtctagcacttcatctgatttagtaaataaagtttttttggaatacagccatgtccattcgtttacatattgtctctggctgcttttatgctgcagtggcagagttgagtagttgtgacaatgaccatatggtttgcaaaaacgatttacataaatagccctttacagcaaggttgtcaacttttgtcaacccctgtgattatctggatacaagtcatttatcagatatatgatttgcaaatattttttctcagtctgcggtttgtgtatttttttaattggggtgtcttttgaagagcaaaact

SEQ ID NO: 81583 - DNA, 1060 bp, Homo sapiens
cccccttcacctaacctgggttttaagttcctctataagatgtttgaacatcaatctctagtggagaaagtagcctttaacttgtcattttagcgaattattcttagtgcaagcatacatacagaaatctttctggtattagcatttttttgaagtgtggctcatgcaggacaatggaatttacttcattcttgcagattcatatagctaaagacaaatgtaaatctttggttgtagctttctctgaaagcaataagatgtatatacaactttaaatcttggattttatttacatagggtgttatttgacatcaatttttattctctttactccaaaggaataaaatagtaaaagctagaaaatgtttttcatagattttcagctcttcagaggatgaaaaaaaatttttaccattaaacaaggaatcatgcagttcttataaaaattaccagaggacacagtataatttcagtgttgattatttatttaaaatattatacataatttagtttttgaggacagcagcgatcaacagacagtaatatctaggtaacaggaaagtaaattcattttattgttttaggtgctgtttagatagtgtcattgtttaggttctgtttctgtattgtttctgtgatagaaagtttcttggtgttttgaatcattaaccaaatgaactttcttattctcttattataggcttaaaatgaacttccagtggaaagtcactactactatcctaaaatttttatggtgggaaacagaattctaggatctcatgccagtagtgctattgacagtccatatgcttgtttgttgattaaactcaattttgaaacaattagagactcatatgctgtccatatattttgaaccaatcatttttttctttttaattttttccagctattacctggttttgtacaaattagctaatgctattttatgggtaatgaaggaggccatatagaaaggtttgaagttgactgctactctgtggccccaattttgttaagcaccaactatgataatagtcatgattaaggtaaggtatcagaa

SEQ ID NO: 81584 - DNA, 1055 bp, Homo sapiens
aaaaaaaaaactctttgaacatccttcaggagaactacaagaataaaacagtatctgtaaagtattgaaaggaccctggcggatacaagcttggacaccagggaaggttttttgtttgttagttttttaaagatgaagtcttgctctgttgcccaggctggaggagtacagtggcatgatcatagctcactgcagcctcaaaatcttgggctccagcaatccttctccttggcctccaaaagtgctgggataacaggtgtgagccacctactgggccttttttttttttttggagaggtggggaaggttttttttaaagcacagcctaaagtgataatagtcagagcctcataaatgttgcgtgtacgcaagtatgccagtgaccatgagtattagactaggatttagcatcccattttcatttcgtttcccttgagcagggtccaaaataattcctttttatttttcctgtataaaaggaaaaaatattagagctactattaaaaatgtctatgcctttctgatggaatacctagggaaaatgttccttaaaatgttgataaccaaccttttccaaactttctttacatgttctatgaaaaagtgtgcggtggccaaatgtatgggaacctgctggtgaatcacaattaagtgggtttcctgacttgataatgctctgtgatatgctaatgtgtattacagtaaactgtataatgtattgtttttcctaaacttaatagaccatgagaacattgctctgaactggtgttcctgtgaacacagttggactaaccgctacttgagatgtgtgttgttccataaggtcagtagtaaaaattattacagacatttggttttacttaaagttaatttaaaaattagatgtcagctttcttttgttttttttaagttgctttttggggtgttgttttgaaataattcctatattttgctaatctgccagttcaaatattataggagagtagaacataaacttaatttggaaaatgttaatattcttggaaattttatttgcaactaaagcatttctgaaa

SEQ ID NO: 81585 - DNA, 1406 bp, Homo sapiens
aagtggcaaaaaccaggttccttgaaatgactgtaattgttcttttctcaccctggcaacaaacttgactcatcaagatgcagaagccatagtgacagacttctggttcagactcaccactttgtgtctctttttttctccatgctacccagcccttttctccatttaagaaatgttggcagggtaatttaaaaacactcacctagcttggattatttgcattttcaccaaaaatcctgcacttcagcattcatgtttatgggaatagtcgcagctactgatttcatttggttaaactgttataatattgattcattttgtttatttcagttcataaggatgcaatttatcctaattttgattttggttgtagaggttggcgatttgaaggagctgcagacactagacatttctaccaatcgtttgctaactttacccgagaggcttcacatgtgcctttctctgcagtacctcactgtggaccgaaatcgtctatggtatgtgccgcgccatctctgccagctgcccagcctcaatgagctctccatggctggaaaccgtcttgcatttttgccacttggtaagtgattgtgtttaaagtaaagcagccaaagaataagatggaaagcctttgtttctttgactagaaccaattagttagtttccttccttctgtttatcttgacgattgcttctctaagtttgtttttgcagtgaacaaagcgtcattcctagctaacaaatggaatttatttcagtgagggattttatactttaaaaaagaaatctgtgctaaaactgtgtttagggataaaatatatgagatgatttcctcagagaaaggaattaaagagtgtgtgtgtgtgtgtgtgtgtgtgtgtgtgtgtgtgtaaggtattgaacaatatgaaaagatagctagctacgggtcttaagtattggcttagatgttgacttctccctagaaaaattggtattgggtatcctaataattaatattgccagataaccagattataaaactttaaagaccttaaaattggctgaacttcctgctgagctagaaatgtcagcctggctaaaaaataatatattatccactgtagagttctgtagctgacccattttgacatattatatgtcatagtacataggccttgaataaaacagtacatttattttatagatagctgaataattttgttaacttgtaagaaacaaaagtgccatttaaaaaaattaaaatatgaggccactttgaaccttaaactgtcacaataagcatcatatgattttactcataaaagcatttttataatttatctctgagggtagtaaagtgaataatttactagtccctaaaggaaatattttccaagataatacaatgcacatattattttcaa

SEQ ID NO: 81586 - DNA, 1014 bp, Homo sapiens
cagccaaggagcaaggtggtcattggatggaaaattgctcagaggcaacatcaggaataaggagacaatatgtagttctggcaagaaaagggatgactgaccaaatagaattcttgctgaagacaggccagggtgattagaccaaggagatgggggagaaaggaggaacccaatcagatatcccaagtgaggggttcttgctaaactgacttagcagagttctttgctaaaactggattttacagggtccacacgtggacctagaagaaggtttaggaacctgactaaagtttggccaagcaaagaatctgtatcaaggggcagaactaggcttgtttaggctgacccataacttactttatataacactttttatggttttcttccagagtagaaatcttcgaatatttctaatactatgtattaaattttatatttcacattataatggtgcctgtatataggaattacagcacttttctttctaatccagatttaggtcgatctcgagaactacagtatgtatacgtggataacaacattcacctgaaaggcttgccatcttatctgtacaataaagtcatcgggtgcagtgggtaaggccgatttcacattttgaactaaaaaatagattaactacttttggtacttctgttcaattttgtctttgcccttgatgatatgctaaaccaggtatccttagaaactaaggatattgggcaggcagtttggaatattgcacattgggttcagtcagtaagttattattttctagtctaaagaaaaatgaatccatgtatacctttttttattacagaaagaaacacctttatttccccccacacaccccagctttattgaggtagagttgacaaataaaattgtaattatttaaatggtacacgtgatggtttgatgtacctaccacacataccgttataaactcagtggtgctagtcacagaaagtagaggaatcagcattaatttagaaggttttctttcactgaagccca

SEQ ID NO: 81587 - DNA, 1011 bp, Homo sapiens
ctaaagataggctctcaaatgaaaaattccccacttgcacaaccttagtttatgggcttcctaaatttaggaaactaaatttaaactttttctaagtttgaattttttaagtaaaaaaaagtactatagtacctcatttatcaccatcaaatgtatttcatatgagtaaattttccacataactgaagccattacccctctttccatgccaaaaagcattttgcttgtagtcatgttaatagaaacctctccaagattttctttccctccttcgtttcttagtccatgcaagataggcaatatggggcagtgttcagagcatggactttgcacccgacaagtctggcccttctgttgtgagaacgtgggcaggctgtgggacttctcaaaatggggatacaacagcctgcgtggcagggccatgtgaggcttggcagatgagaaaggcacacacctggcatgtaagaggtattcaacaaatggtagttcccatttacatagctctactcacgccatcccaaaaccgtgtttatctttttcttcctctggataatcctgttttgctatatttcacttcctatttcaatcttctgtatttttaatgtttcctgcttacaggagccctcctccaaatctttctaatttgctacttctaaggtgatcagataaccagatttggtggaattgcatttaaattagaataaaaataattgaattgggttctgactgtattactacatgaataaaattaacaaataaaatagatacgtttatgagaatcttacagtggtgaagtgcacaggccctgattccaactccacaaggccacctcaggcaacttactgaccatccctgagcttagtcttttcatcaatagaatgggaataataataatatctatttaatagggtcattgtgagaattaaatgtgatcatccctgtgaagagcccaggatggtgtctggcaagtaataaaaagcaaatgttaactattattatctatttttgtag

SEQ ID NO: 81588 - DNA, 1730 bp, Homo sapiens
atagcttggttctttcaggaattcttggtcttctgggccggagtgattctatgagagtgccacatgtctgagtgattgttgtgccttgaggtaaagacctgtttgttagagggcctgcaaaactgacttggtcttacagtttccttttgtctttcaaaacaactaatactcccttctcccactcactagtagtttatttttaaaataagctcttttatataattcttatctggtttcctcacttatgaaatgtttcatatttccttacccttgctttttgtggctattgcttctttgaagccaagtaatatcagtcacaccaacattatttgcatactcattttggggattttgtttttccttttggcagaagcctattcgttggcaccctcttaaggtgacttatgaaatttcccacaagtgaaatagtcttcaaaaatttaagtaaattgttcttagctgtttcttcctccttacaacattcaaaaattatttgttgaccatctgtcatgggctgtgctctgcagtaggtactgaaaattctgctttgaccccaccacctaattcttttctcatacatatctcattcctaatgtctagggcaatgacacaatcaagaaagaagtctgcttgacatttctgtttctgtttctgcacacagaatcttcccatgagagacagtcactactaacataaatgcaacaagcagatacaatatgttattagatgattcttgagtaagttaatatgtacacaagctcaggattttaactttgtcttataaatactattttttcttttggcttgacttcctgtacgagtcaaatatatgctttgtgtttttaatcaggaaacatatttgcagaaaaaatcgcacatttcttatgatttttgtgggctccaatatgtgccaacagcattgtgattcgttcttttaaggaatagtggtatttctgtattttaaaaccaagctgaaatgctctttcttctgccttgcctgtaaatatgctcaaagattctaaagcaacaaatgtcatgtctgatgttctttgtagaatttatcagcatctttttcttaactgtagagcttattgcttagctcaaagtgtttccccagacctctgatgtctctggtgccacagttctggattttaaaggacttaaccaacatgaatccattcttaaggcagcagattggttggtgtacttgtaataactcagattattaatacaacaagcagatacaatatgttattagatgagtctcccaaaagcaaataagtacacagccttgggatttatttgttgcacaaatatgaaacctccaggttactccacccccgtgagcttcataagtagttaatgatgatccaaaggacattatcctttaatgagtgtaaatcccgtatcttcatggaattgaatgcttttgcttgggagctgttttagtccgttcttatgctgctgtgcagaaatacccaagactgggtaattcataaaggaaagaggtttaattgactcacagttccacatggctgaggaggcctcaggaaacttaacaatcatggctcgaggggaagcaaacatgtccttcacatggcagcaggagagagaactgctgagcaaagagggaaacgacccttataaaaccatcagatctcatgagaactcactcactatcacgcaaacaggagcatgggggtaaccacccccccatgatttaatcacct

SEQ ID NO: 81589 - DNA, 1031 bp, Homo sapiens
tccagtgctcagtttgaaaaggaaatttaaatttctattatgcagtttgttgaccatggctaatcctccattttaacaaagaaaaaagtttccagcagaaagaatcagagactttaatcttgaactcacagcgttcttctctccctttttccccttccaggaagacaactgttagttttgtggcttactgctgctccacccagtgtctgcagacttttgacctgctgagttgataaacactcaagaacctcaggagcgctgccagcttgacactggggaatccagccagtccagcacactcttccatcctgtcctgtccaatgcgggggcactgcagaactctctagaaatgtcatgattgagcttcagagctaaaatgccttcacccttcccccaagttggaatatatcctcccccaaattaaggacccatttgtcttctgtgtttttcctttttatgtgagtgtgtcttttacagaaaccatttagattgatgggcctccccaaatctaatttaaagcaagtttccggtccttggagaacagtgacttgatcatctagccagattcccttttgaacacacataccttcagtgatgcttcctctcctctcccctcccttgctttccccagagagttatttccctgagaccatgttctccacagtgtctccagtggaaacttgtcagtttttgaggagtttcagcaaaccccgtggcctcaatggtcttgagtagcagggtggggcgcctgagttggcagcaaagtgaggctcccatggaggctcagtgagggtcccagagcacacaccctctggaaagttccagccttgtttatacgttctacagtgtagcaacagacttttgtgagggattttaaaaacaaaaatgtagattgtaatgaaatacacttcctgttttttaaaagtgtttgcagaaaaatgatttttgaagtttttaaatttcctgataagattttttttatatgagaagaatttgaggaatatttgaagctttacaagatctgatttttt

SEQ ID NO: 81590 - DNA, 1019 bp, Homo sapiens
gctccatagaagtttttttttttttttttttcttcacacagcagcctgagaattattttaagagcctatattggatcatatcatttctctgcttaaaatcttctggtgacttcccattcctctcaaaatcaagtcctccattctgtggcctaaatggccctgaatgagctttctccttctcatcattcttcccctcattcatcacatgtcagccacgaaggcctctcagtgtttcttaaaccctctgcacccttttttcttctagggccttttgcactttctgtactccctccttgggatattcttcaaatgtctggcttggctaaacactttggagtttggcccaaatctcacttctcactcagaggcctaatctgaccatcctatttaatattgcagtctgtcattttactctcttacacagattatttccttcaagacaattgtaatttgtgtatacctggtttgtttagttattgcttatttatggtatttgtccattacctgaatgtaaactccataaaggcagaggccttgttcatcttactcttagctgtatccccaggcattagcatgccgcctggcatttggaagatagtaaatatttgatgcttctgtatctttgttcctgttttttgccaatgattggaatgctgtcttgcacacatagttatagttattgaactacttatcctttaagtcttagctcagatgtcatctgtgataccagttttaatctcctagacaaaagttttttgctcttgctcttgtgtgcttctaaagcccatgatacatgcactatttgtagagtaaatcccatgttaggtatttagaatattatttgattatttgaatataattgatgtcactgtcttctattaggctgaattgctatgtcaaggaccagctggctcttttgtgtgctcagtatctaccaaccaacctattatagtagatatagtgaattctcagtaaatgttgaattgagtagaagttgtcctaatcggccgggcgcggtg

SEQ ID NO: 81591 - DNA, 1055 bp, Homo sapiens
ttctcattaaggacttttccaccaacctaccacctatattatatattccttattcaccttgtactataggtctccccactagaatgtaagctctatgaagtcaggaatagggatagggattgattcctagcacctagaaaagtgcctggaatatgttggatgcttagtaaaaattttccaaatgaattatattgaatcctgggccagatattgagtagatattggggatataaaaagaacaaagtacaaagttccttcttttaaaaaagcatatggtataatagaggagactcatacttgtacaactaactacaataattttaccccctgggagtgatggtgatagttaaggtgtactgaagatggcgtcacagaacgcgtcattgaagtgtacgtttgatctatataagagacacaggggaaagttatttccaggtggaggtaaaaacaaagttaaagagcttaacagtctcagcaatggcttgttgtctaggttaacagtgtgtgtcaacgggtagtcgagggagatagggatagcaattagaggaccaggctgtctcccttttaggtgggtggaagcaacgggatttgaaggctcagtgtatgaaatttgatgataactgactcagcactaacattctagtttagtttttttttttaaagagcgtgtctcattacagattattgtaaaataactataaaaacttgattttttacagtattgtcttttagaaactacttgaaaactaggtacaacatacatcatcagtaacagtacatttatataattgaggaatgcattttgagatgagaatatgtactgtgatgtgtaactatcaaatttgtgtttaatcacttgtttgccatgggccaaatagctaaattttggctttactttgaatgattgtattttagaagttggtaatgcaactaaatttgaggaatttttttctgcattttagtaccattagattaaaagctgaaattggtgttttaaagtaagctccttttacctttgcaaaaaaaaaaaacttgtttatgtgtttttatgtctt

SEQ ID NO: 81592 - DNA, 1023 bp, Homo sapiens
tgagtatacttgctaaagacaagctttatgttttaaggcatgtgtgaaatttaaattgtgaaaggataggtatactggatctaggaagatctacattccaaagtatgagcaaataggaggtggcagcacttgaagcttgaaagattgtaacacctctggcatggctattgaggatggaagggggaaggagggaaagaaccaggctgtgagagcggtggtggatttctttatgtctctagggtttatagtcaacgctcctttggcagcagtgagatgaggatttctgtggtagggctgggcaagtagcagccagactccttaccttggggagagccctggatctacagtccctgggcaaggctgctgcattgcgcctcagactagctgctccgaaaaccaaggcagggctttagcttctcaccccctcatgaaggcagcagaatacagcggttggagtgctgttctggaataccacagacctgagttgtcttggctccagtatttagcatctgcgaccttggcggggtgatatttactgcctagtcttcagttatttttcagatttaaaatggggataataataatgcctgtcttataaagaggttgtaagaatttaaaaagttatgtgtgaagtgtattgctgttgttactatgcagcagggccctagaaaacctttctttctccattcagccaactgattactcattttgttttcagatcataaatattcacatcataaatgttaatgtgttctataccatgattgaaaatgtgtgtgttagtattgtagtaatactgtcttttggacccctttcttcaaaatatttgcaaatgtgtggtattttattctggcctcatgtggtacatataatgcatataattggattttcctgttataaaaagtcacttttacttagaaattgtcaggtgccaaaggttatacagctagtttagtgacaggtttggggctgggatgtaggttttctcacttggcttgcagtaaaccttctcagtcaggttgt

SEQ ID NO: 81593 - DNA, 1031 bp, Homo sapiens
tgaagaacagaagtgctggaaccagattccctgagtttataaccccaagctctgccccttactacgtgaccttgggcgtattgcttaatttttctgtgtctcagtgtctctatttataaaatggaggtaataattatagattgctattaggattgaatgagttaagacatgtccatgcttaggaaaatgtctagtacatagaagaatctcagtaaggcttggctcttgttgctattattgtatacattgagaaaacctcaaacattattgttgcattagtttaaccagaactagagacacaaagagattcaagaggtattttaggggtaaagttaacaagacttcaacttatttactaattttgtataaccagaaatttcaactaataatgctgtgtgcagtgtaaaagcaaatttgaaatttgtataacacttacatgatttgtaaacttacagattttaaatcttctaatttgtgttttcttttagatcttgtagaaaatttcagctgtagcccttggactagaagctgaaataacagaagctgtgtacgatgcattagggtattgaagaaaattaacttttgaattaaatatttggaatataaggaaataaggaaagttgactgaaaatggggcggaagaaaatacaaatcacacgcataatggatgaaaggaaccgacaggtaaatgaaaattttaatttatttaattgatatgaatattcttttaaaaaaagaacataggacagaatggttgggtttttcttaaacttaattttaagtctaaatatttttagttacagactaaatgaaaaattctaacaatcataaaattgtatcttttcatcatctgctttaaagagacttccttattatagatatatgtcaccaaaaatatagatactcaaaagtaaaatcaccacaatccccaccattaccaatccattgtatagatttctcataagatatttagtcttctatgtatttgattatatatttgactgttagtcttttttatattgattattttt

SEQ ID NO: 81594 - DNA, 1058 bp, Homo sapiens
catagaattttcagactacctcaatcttcatctctgttgtggacagcaaagtgtaagagagcagatcccaaacatttttttaagcagtctcctatattacagtctgtttcaatatgaaggaaaacttttgcggctcaattacatattgggattttgatgttttctttttaattgcatttcctcaaaataagttaaaatgaatcgtgttaatagttccttgtgaagttctaaattatataaatacagtagatagaagacacattagattattagggattaatttattgtggtaggataaattacaaggcttaattcacacttcttgtatattaatgtcttactgagtcaacttttattaagagagtggttgttaagcttgtgagataggccttttttcacatatgaagatgatgcagcctacatcttcactagtagtgcaattcacatacgagttctttttgccagtagtgtaatggcttacgctaatgcatctatacagtttgctatggttcaaattaaatttacaggataacagtaatgaagttacttacatagagcttcctatgggtcttagtttttacaaagtactttacagttgcctcattgaaggatatttttggaataccattttttccttttcacagtttcctttcaggcagttgtattgatgggaagcaggctttttgatgcccatttactcatttgacaaagatttgagggggttctatgtgctttgcaagttgatcttatttagagattcctaattcaggccagaagaatattcttcctacccatatttttataaaccattgaggtatacttttaccaactgaagattttatgtatatttataagaactttgaacaagttggtgataagcttctggactccttagccatctcatgtggttgaaaacatcaggataaaatagaggcatgaacagttataagtgatctactttagagtgatttctaaagtatatgaccaatatacttaagagtttgtgtcattatgtaagcaataatgacacaaactctgaaaacaacaacttccataag

SEQ ID NO: 81595 - DNA, 1045 bp, Homo sapiens
agaaccaggattaggacccaggtctgtgacattaacctttccccttgctccttagttcactgcatccaggggagctctggagcattttaccgtaagtagataagattttatacatacaccaatcatgtacgatctatagcagtcacgaataagttttcctcagtaatgaacagaaaactagtgaggataatagcagtaagaatgataggtattattaagcacttaacatggtctagtaaagacttcatttgaattatcttattgaatccttactgttgcccttatttcacattgaggcaatggagacacagtgataaattaagtcagatgttgataatttggattctgaagaaagagaaaatctgtttgagtcttaaaaatcccttcctattttcaaattacaaaagaatttggaagtaacatctgaaagaaaggaagatagggaatcagtataagatccatctatcaattagaaaataaaagcagatggtagtgaaagtgattatacttgagagtaccttatttaaaatcactggtcctcacaatgtgtagtgccctgaccagcagcagcagcagccccagaggcttcctagaaatgcaagttcttggtcccaccttagaccttctgaatctgcagcttttgagatgaagccaaagcagtcatgaattaatttgaattaacttgccttaagtgcagttatagactaaaagtttccagttaacagtttcttgggagtggttatccagctttttaaacatttttatccccaagaatatcccctgaaataatttcaaacaaagagcaagcacaaactgtaattttttaaaccctctaaaaagtaattcaaactatgcagtatttgtgtgaattgcacctaaggaatacatttctaatgggttacatttcagttcgattccacatggttataagagcttgtgtgagtgtggtttctttgaggggtgcttctttgagaggtgtggtggggatgagtcggaggtggaatctggctcttcagatgaacaaaaaagaaagttaaatgaccta

SEQ ID NO: 81596 - DNA, 1056 bp, Homo sapiens
gtgttacaatcaaaccatctactgctttggaagaaagggccaagaccaagtcaggctgccatggtaagcagtcttcatcgaatgaccagatgatctctacagtcttcatgtggacgatgatctatgtctaatttatcagtaaatatcagcatctagtagggtgctttcgataaattttgttgaatgaaagaaaaaaggcaaattaaggtatttattcagtaaacaaaaagggatagtgaagaaccaagctccaggacttttgaagatagactttcttgtctgtggtgcactgagaatcagctctatcttagtattcatttacgtgtggagatctagaacagagttacattctttctggtgacaagctgagactacctggctgctcaatatccagctcctgggagacaagggcctcaaaactgttgggattggggggtggggcaggtagggaatcttactaccatttgttaggatttttaccatcaaacctaggagtagcttggaactgggtaagatcttagaatttagagaagccatagcctgaacaccacacacttctcactgaggaagataggggtgataagatcatggaggaactggagaggaatatgaagacagtgcctacaaccaccacatacacagtaaacattctctcttctcagtggttgaagttgttcctgattacagctctcttatctgttctccctttgatttgctgactgatggatgcagtccatttaagaaatgagcatagcatattggaaagagcactagacttagattctagtcccagttctgtcacttaacagctatgtgttgaggtgaggtgagggaagagtacttggatctctggatctcttttaactttaatattctcctctataagggtagaagatgaactagaggatcacaacagtaccatttagttttccgttcagtggcaattttgacatacttttttgagcatacataatctcagaatcctatgcctcaaaactttgattcattggacagatttcaagaaaaatataatttaacaaatgtaataaagaaaaa

SEQ ID NO: 81597 - DNA, 1053 bp, Homo sapiens
tgcttcataaatacaaaaactggctcttccacagttgagagaggaagtcagttgaacttccaccaggcgggatttgtttgcacatctacaaacacaaattatttgcattactctcacttttctacacattatcttctgtttacagagttggaaaatagctcagaaaccaaggtacaaaccccctagaatcagataacttggcatgtgctctaaacaatacagagttttaagagatatttagttttttgggtttcatttaaaaatatttcagtatccttacataactagcgttgaaaggtaaatattagctaagtttattacttaaatcctgcgttttgtaccataaatgacaatgtgcagaaagtacctgaattggcccaagtcaaaaaaaaaactgttaaaataataatggaatttaactttgttgtgacataaatagaaaaatgattgtttctaacaagtgcttaactgaccctccaaaaataaaattactgtcttctatagacgtgtactgatgaaaaatataggtgtgttaattttaggattttatttaagtaatattgccaattgggacctttaaattagtttggaacatgtatagaacagggtgtatcatcggcttaaattgattaataattactcattaatattgatctttatagcagcctgtaatgtatgttgtagaagacatttctttaagaaaagcaactaggataagtcaacttaaatgggtacacaccattgaaatttgaaattattttggcacaattgagttttctccttaagtttgttggaatggcattgaaaaactcaatcacgttatttacaaggagtaaaatatctttgaagttttatttactttagaatggattataatgactagtaatagctatagagagtactcagtgctagcactcttgatgcatttttctactttttctttatgaggaataagcagatctctcatagtggtgacctttcacactgtgttttcctcattgagcaagtgtctttattgtggctaacttgtgtgtgagaaaactgaagctggcc

SEQ ID NO: 81598 - DNA, 1041 bp, Homo sapiens
gtacaagtatcattagtcttaagctttatatgtatttcagactttgcttgtcttcctttgcttatttttaagatatcccaaggtacttcattagttaccacaggttgagtatcccaaatacaaaatgctctaaaatctgaaacattttgagcactgacgtgattctcagaagtgtcaattggaggattttggattttcaggtttagggatgctcagccaataagtatacaagtattccaaaatcagaaacacttctggtcccaagcatttcggacaagggatactcaaacctgtagtgagttttgttataaaatttatttgcaactcagactggggaaaacttgatttgtttgtgccaaagtattttaataactcttctcactttattgaatgatatttttccccccagggaatggatttgtaaactcaagagcttctccaaatttgattggagctactggtgcaaatagcttaggcaaagtcatgcctacaaagtctccccctccaccaggtggtggtaatcttggaatgaacagtaggaaaccagatcttcgagttgtcatccccccttcaagcaagggcatgatgcctccactagtaagttgaacctttcttcaacttcattctttaaaacacatattttatacatagtcaatctgtagcttcctttggaattttctgtgccaccgtagaatctacacctattcctaataaatatttccattcaaaattagtatttgaagagacaagtctatttcaaatacacaaaaatcagattatggaaatttgcttaacagttacttaaaattaaagctaaatacgaacgtggttggaactggaggttattgtgttaagtgaaataagccaggcatagaaagatagatactgcaaggtctcactcatgtgggacctaaaaaaattggtcttgtggagatagagaatagaatgatagcagaggctgggaagggtgtgtgggtgggagacgggatgaagagcggttgattcgtgggtaaaaacatacacttagatacaataaatata

SEQ ID NO: 81599 - DNA, 1015 bp, Homo sapiens
gttttggaaaaagggcaatagttgcttttaagaaaagagcgccttctgatagaaaagtaaacttatatacacattcaattacagacattccttttagtaaacagggaacccccttgtggttcaggctgtatcatgcaggatgaaataattccaacgctgaaaaaggtgacctcaccaaaaatgatgtaatctttttgaaagagaaacaacacaacatcgtgtgttacaatctgaggaacttcgagggtgaagtcattttctaaaaatatttcaataatttggagagctatataaggtattttgtatctttccttaaaaaaaaaattaacaagtatcctatgctcatggacagctactgtttttaaaggctctattccaatgttccctccaacaaataaaatgggtcaacacatacaattataaatagaaaaactagagtctgtagtaccagtagattgctttattcaaagtgtttgaatagtgtttaaaaaaatttgtgtaacaaagggaacattggttagataacaacacgtaagagaattagtactttctacatctttttcaacttccttcaagcagaaacccacactcaccaactccaattcctcttcctccgactgtactcagcacataagagggataagagagttactaagactgttggtactcacaaacaaaatatttctttagaaaaaacatatttggacactagcagctgtctggaactctaaagagacgattatatacacaacagatagaaatataaattacttgtctctacttgttgagttttcaaaagactagaaaaattattttaaattctctagggccagtattcaaagacaccctcctaccccaacttggtctgctctcatgctggcctcttatacatagtcatgctactgcaacagtatttaaaaggggttcctcatcatgctatcgatctgtatttggaactgtgagaatatcaactctgtacttgtaactctgtatcttaatcaccctactattaccc

SEQ ID NO: 81600 - DNA, 1163 bp, Homo sapiens
aaagaaataagaatacaagctgcacccaataagccatgacttcaaaccgtgttaacacgtaaataataccgcaaagaaaagtagttttgattcctatactcatagacgtacaatccctatatatacagatgacctttgccatcatcaggtatttaaaacctacacatacttcatttaggggagtctgacagtatttgtagtggcatcaagtcctcattttgtgcaacaaatagaagtgctaatgcctgtaacagaagttcctattttaacgtggggtgtctgacactaatcaactattttaaaagaattaatgtaaaaataggacccttcaaattaaatatttagttattctcactagtatttttgaagttttcacatcatcagtgcttcagaaaatgacattcatatgaaactgtgaaaaatgtcacttaaattgaaagtgatttttaagtcaacataaataccacatcagaacacattttctcttttttgatctcacagaatacccagaggatcagtagttctcaagccactcaacctcttgctaccccagtcgtgtctgtgacaaccccaagcttgcctccgcaaggacttgtgtactcagcaatgccgactgcctacaacactggtgagcctgctctggtgccttccgtaggttttaccgctctctgttttgtgatcaacgtgtgcttctgtgattttttttaagtatatttattgaaataaactatttccagttttttagatttaaattaggatgtatttttcaatgtgctagccttgaaaaaattacaaacaaaatggatagtgtggatagtgcgatgagtaagttattccggcttctccagtgtgaactttcacttaacccctgacacaaagccacgtggatgatagcaaaatggtgacatgcatcaagccaagaggggagcagcctgttgcttgagtattgctgatgtagtttctcttcatacagtatcacgcttttccaggcttttaaaataagatgtttgtctttatgctgtgttaacctgctttgggaaagacatgaatccctttggacctgagacttcaggaggtggccgacgtttggctgtgtcgaacaggctgttttcctccctgtaaccactagcttggtccatgtcatgtgcacctgaggggcaaaa

SEQ ID NO: 81601 - DNA, 1337 bp, Homo sapiens
ctgtgtggcaggcactgtgccaggcactggaaatgcaggagtgcagtcagcagtgaagcctggggggaaggcacaagacacacagctctagggataagctgctgcagttgtgtcaagggctgtgtctcagctcggacaggaaggaacatgcgtgactcagccaggcagaggaggcagagtgctcttgggagagggtgtgcctgtacaaaggctaggagtttgcgggcgggacggggctgaaggaatggggacagagcgtgggtggttagaattgagactagagaggtaagtaatgatttgtagactatgtcaaggattttggaaactgtccggagagcattggggagccataaaaaacttttgaagtagaggagtgccatgaccatatttgttattttaaaaagatgtctttgctgtatatagggttaaaaggcaatgccaggaagccacatcagaggctactgtagtggtccaagcaatgggtgctgatagcatagactagagaggtggcagtagagatggtgagacctgggcaggcttgagagagagcagatagaattgctcagacctggaaattgatgttgggagtgagagggaagggaagtagcaaggataacacccatgggcttctgcacgagctgctgggtgcatgttggtgccatgtactaagagtacttaaggaggaacaggtttgcaggaaaggatgggccatgtcagatgtgtggcgtttggagtggcgtccaaatggacatggcactaggtcgtttaaaagatctagaggtcgaaggagactgtgggccggagggagcactggggaaggcgtcagtgtgacgggtccttgccccagcccatgggagtgtatagaatgacaagggcagagtcaggacagccctgagcaccagctgtgtcgcttcaactccgttccttttttaaaatgttaattcactaggaagaccaatttctttaaacacctctcttgagacatgagaaagaagataaaagtagaagagttttgccacctctctttggaaccaagtgagaaagacaagtgttaatgatgagctgaaataactccccgtgtgagtgataactaacgtcctaaatcttggtcccagtgattacgactgaagcattcatatgatatgagctgggtatactctaggacaccgagttttttcatgaagttgaaactcttgcatgctgtcagggagtttgcgacagtctaggtactttaaacaaatgcgcttactaattgtgtaatgatgtcactgagcttggcaccccatgtagggattctgtctttcctgtcccctattccctgtcccccaaccccttgc

SEQ ID NO: 81602 - DNA, 2428 bp, Homo sapiens
ccagcccctcatttcctcatctggaaaatggggatggtgcgacttgcaccttagaggtgttgcgaggatgagcgatgttgtgccctgtcacagggccagagcagatggggagcagatgctgaggaagaagaggcggtgagcagatgaggctgctgttcctctgtctttctggtccctgcacagcattaagacactgacattgttttgtatactttagctgcaaaagtaccaacgttgtgggtaacagaaccaagtaacgtaagggctcaacggtactgttttctttcctcctaggaagatgggatttccttttgtgccaagcactgaaggaaacgacccaaaccagtcttggggaactctgataagatttcagactctgggcccttttccatcaggcagtgtctctactgtatcatcccagttttgcagaggtacttgcaagccatctgacctctctcttttttttccttcagtgctggagggcagttatctcagggttccaatttatccattaataccaaccaaaacatcagcatcaagtccgaaccgatttcacctcctcgggatcgtatgaccccatcgggcttccagcagcagcagcagcagcagcagcagcagcagccgccgccaccaccgcagccccagccacaacccccgcagccccagccccgacaggaaatggggcgctcccctgtggacagtctgagcagctctagtagctcctatgatggcagtgatcgggaggatccacggggcgacttccattctccaattgtgcttggccgacccccaaacactgaggacagagaaagcccttctgtaaagcgaatgaggatggacgcgtgggtgacctaaggcttccaagctgatgtttgtacttttgtgttactgcagtgacctgccctacatatctaaatcggtaaataaggacatgagttaaatatatttatatgtacatacatatatatatccctttacatatatatgtatgtgggtgtgagtgtgtatgtgtgggtgtgtgttacatacacagaatcaggcacttacctgcaaactccttgtaggtctgcagatgtgtgtcccatggcagacaaagcaccctgtaggcacagacaagtctggcacttccttggactacttgtttcgtaaagataaccagtttttgcagagaaacgtgtacccatatataattctcccacactagcttgcagaaacctagagggccccctacttgttttatttaactgtgcagtgactgtagttacttaagagaaaatgctttgtagaacagagcagtagaaaagcaggaaccaagaaagcaatactgtacataaaatgtcatttatattttccaacctggcatgggtgtctgttgcaaaggggtgcatgggaaagggctgttgatattaaaaacaaacaaaacaaaaaagccccacacataactgttttgcacgtgcaaaaatgtattgggtcaagaagtgatctttagctaataaagaaagagaatagaaaacacgcatgagatattcagaaaatactagcctagaaatatagagcattaacaaagtaaaattaatatattaagttataattggaatatgtcagaagtttctttttacattcatatcttaaaaattaaagaaactgattttagctcatgtatattttatatgaaagaaaacacccttatgaattgatgactatatataaaattatattcactacttttgaacacattctgctatgaattatttatataagccaaagctatatgttgtaacttttttttagagaatagctttatcttggtttaactctttagttttattttaagaggggaaaacaaaaatatcttgcaagcagaaccttggaaaaaaaaagccatgaacacttattctaaatgtaaattaaaagttgagccaaactctttgtgtatatagcatcttaaatatattatcacctttgatgtaagtacctatgtattgtatggtcaccagattaaaaagtatatttttgtggattgccgccaatctggggggaaaaggcgaggtcctttattaagtattcactgtttaatatttactattttgttaaatatactgtactttggattttaattattagcccagttttttcagaggattgtataaaggggtttctcccctcactggtggtgaatgtgtgatgttacattgtaatctttgtgctgtatgggttgagcatcattatatattttgtatgtgtacataaatagcaaagtggcaaaaaaaattggtgttaagttcatcctgcataagtataaaatgtgttgtaacagattttgtaaggcattatttaaaacttgccttttgtgaggaaaaaatgtagtagaaaaagctgacctaatttaattaatattagagaaaatggcaaaatagtagatgagcac

SEQ ID NO: 81603 - DNA, 1878 bp, Homo sapiens
ctatgtacattttgttcccccccccccaccccccccccaaattacgttccttttgacattttcctcatctgctgtttgtgacaagtcatcagccagatttcctgactgacacataggtatgatcagtgcaggagagacctgcgcaccacaggctgcaaactggaggttctgttctcatggcagtttgggcagtaacttttgagagaggccaaaaaaaggaggatgacatgctgtctcctctcttcagtatagacattaggctcttattcagaaaggatttttctttaaaaatgtacttactttactgaactacttacaggcacatttcttcataaggccacacctaatccaaacaagacagtctcccaacactgaagttccaaaataatccttaccactttgtaaaccatttatagctttgaaagtgttaagtgattccttcgttattatttatgcatgttcatgaacttctgctgtacattggaataggagttaacacattcacatttactgtctattttcttgtgtgccttatgagatggcttttctgactgtatctcaatagtctttctttctatgcaggtttataatcagtacaactactgttttctaaaatactactactcaaggctcggagtttgtatttaaattacactgaccaagtaacaatgtattccatttcaggaactgaatatttgactgttaacctttttcccatacgtccagtgtggcatggagcatatggacttgacagacatctctcacccagacgcccacgtgtgaacacacccacatccacatctctgggtggaaaccagcctagagaggggacgacgctaatggtgttgctttagaaccgtcttttcttacccttttagactcgtgttttgtatgagacaccattgcaagaaaattttatccctccagaagtattttattactaaagaacaaaagcaaaaaaagcttaaattgcactggttaaagtacagtttccaacagctgtccttcctcagtactctaatggccactccaccgcgagtggaagtcactgttgtgtgtacacaggtggtcccaatcaaaactccatcttttgagcccaattatgtccattttgttatagactaaatcaggggtttgttctacaagaacaatacatgttttaccctttcctttaactagaaggataactagtaatgcatcaacataatttctgtattaaccatcatgcgcacaagaaatacatagtaaataaggaagctgaaaactcctggcattggatcttaagctagatgattagaatgtgaaaaagattttacaaatgtaaaacttctatttctctgtagaaactttcttcactttgctgtgcaagaagacactgctttgctatatttaaaatggcttttttaaaagagatttatgtatttggtaaatgtttgtagtcaacagttcacacaagaagctgtacacggtttgatcatgtaaaaccgtttggcggcacaagctggactttgttgccatccttgagatgaaccttttaagaaaaataagttaatctcaatttttccctgaatgtgttgtttttcttcattatacaataaatataatagtgaactttttatcaaatggtgaagacaatgctaaaggttgttgtaaactgtttgtctcccgcactcactccagtaaagacggactggctcttcctgtgcgtcgagactctgtcatgtttgcctggggacacaaggcgctggctttgccaccaggcagccccttcccctaaagccctctcctttttcattcctttcacgaagacctttttcacctgcaggcttctttctctgggttgagacagggtcaaggaaaccgtcccaacgcccccac

SEQ ID NO: 81604 - DNA, 1007 bp, Homo sapiens
aagcggaaatctgggaagattccattctgactccataatcacaactgacccaacaagacataagatgggagacatactcaggactaggggttcaccctggtggctcagggtgaaccagatggaaagacccaagtgcactgaggcatgcagcaatgggagggaggaaacagtttggagccttagcaggcagctcgggccagacagcgagatgtccgcaaacagccttgctaagaaaggtttgacaaagataactttttgtggttgttttaagttagcccttgaaataaggaaaactgagaaggagatgcctgttaaggctaaaagtgacaaaaggcaaagtgcaggttcactgctgcttttcaaaaaggagaaggagggtaaaggtagaaggcaaaggtagaagaaagcaggcaaagagcatggcagctcaagaaaactaaggagggaaccctgagaagcagaagcagtagagtgaggactccagcagccaggttcccatctcagccccgctgctgccagcaggggacctgcagcaggccactcaacctgtctgtacgacaggggactgagagagttcctacctcagagggctgtcatgagaatgatgcgagctaagagaaataaatggctcaggacagttcctggcacacagtaagagctaaatttgtcatttttatgatcactgttatgattttctagaagtgtccaaaaccccattccaggacaaaatccaatccaagatgctacagaactttacagctgtcatctctgaggctctgctgactggttctgagaaatcacagcagacaagagcagagccagtggtctgagggctgggtctcaatttcccaaacagataaatggccgggtccgaagaatgccgtttcagagtgctgtcaacccctggcacaactagaggatgagggatgatttaggcagatggtttgcatgcatttttgaaaagaaggctgcatgagtgccccaaatgtgcgagggtttaatgagaa

SEQ ID NO: 81605 - DNA, 1038 bp, Homo sapiens
attggttgattggtatttggattgtttccacttttttggctgttaggaataatgctgatataaacttttgtgtacgagttaccatgtggacatgttttcatttcccttgtgtatatacctgggaatggaattggtgagtgagaattctgtgtttaacttttggagtagctgccaaactcttttccaaagtggcggcaccactttacgtttctggtagcagtgaatgaaggctactgtttctccatgttctctccaacttactgttttttgttagagtcatcctagtgggtacaatgtggtatgtccttgtggttttggtttgcacttccctaatgactaatatatcattagcatctttttatttgcttatggattgttcatatatcttttttgcggaagtgcctgttaaaatcctttgcccatttttaaattggattgtcattttcttgtcgagctgcaagctttctttatatattctggatgcagttcctttatcagacaaatgctttgcacagattttctcccagtgtatgagttggcttttcactctcttgatggtatcttttgaaacacaggttttcagttttgatgcaatccagttaaactattttttcttttgttgcgtgtgcttttgctgctgtgtctaagaaactattgcctaattcaaggtcatgaagatttacccctatgttttcttccaagaggtttctagttttagctctgatatttacatctgtgatccattttttagttaatttttttgtatggtctgaaataggtgtacaacttcatcctttcgcatatggatatccagttgtcccaacactgttggttgaagactgttctttccccgatgaatattcttggcacctttgtttaaaaaaaaattgttttctggactctatattccattgttagaaacgactgtccttatgccattaccttgctgtcttgattgctacagatagctagaaagttttggaatcaggaaatctgagttcttcaacttcttttgaagtattactttggctattctgg

SEQ ID NO: 81606 - DNA, 1072 bp, Homo sapiens
gcgagcagcagagggacaggtggagccctgcaaggccagagggcaggtggggctgccaccaggtgcaggtgaagctcagtcttctctaattttcattacattggatgcttccagccagatgtgatgctgtgccaaggtgagtttgggacagtggacgtcgggaaggatgccacattgactaggcacgtgcttgcctggcctgcagctcagaacgtgaaggaatctgatccctgcaaagtgtggcccatgggcagtgggtggacacatgtctgggggagtgatggggaggagggaaggttgggggagagccatgtgggggaaatgttcccataactggagttgacatggttcaaatgaaaagaaattgtctcagtcccagaacaggaaggaaagcaagccattatccagatgtgtgaagcatggaaatgcttgtctgtgatttgtattaagaacgagccagccggcacagtgctgtggggacacggaatggacccaggacagatctaggcaagcaggcaacccaccagcagacagtcatgggtggtggctgctcttgcctcaaatgtttggcctgagtgctccacctagtaggcacagcacagacatcagatgggccggcattgaaaggaaggtatgcagagagagaatttctgagaatgtcataactgtttagaaatcctggagggagagggagcattcttttgttctagctgggattagggcagttgtgttcacataggggttggccttcctggaggaacagaaaagggggtgcctccccccaggaagggatggagccttggacaggctccagacaggtttcccagcaggttcctgcctgggcctcatccccagttcctgcttagcaatcatggcctcaggcagtcttcccttctctactgaagggtaattggttggtggtgcttgaagcattgaagggttctcacgtttccctcagcggagcttggagtgattcctgaatacgtttcctctgcacttggcccctgcatcaaagtccgtgtgtgagcgtccactgggcacggcagtcttacccaaattccagagttgttca

SEQ ID NO: 81607 - DNA, 1484 bp, Homo sapiens
ccctcatctgcgtcccgaaggaagtcatccgcccgtccctcatctgcgtccggaaggaagtcatccgcccgtccctcatctgcgtccggaaggaagtcatccacccgtccctcatctgcgtccggaaggaagtcatccacccgtccctcatctgcgtccggaaggaagtcatccgcccgtccctcatctgcgtccggaaggaatcatccacccgtccctcatctgcgtcctgaaggaatcatccacccgtttctcatcaggctgtgctggacggggcatgactagcgcttcctctgcaggctcatggagtatgttccgggctgtgagctcttcagctacctgcgcaaccgggggctcttctactctgcagagatcatctgtgccatcctgcactctaaggagatcatctacagggacttgaagccggagaacatcctgctggatagggacggacacatcaagctcacggactttgggttcgccaagaagctggtagacaggacttggaccctctgcggaatacccgagtacctggcccccgaagtcattcagagcgagggtcacggaagggctgtggactggtgggccctcagcatcctgatattcgagatgctctcgggatttcctccatttgtgtgtgtgtgtgtgtgtgtgtgtgtgtgtgtgtgtgtgtgtgacaacatgtttggcatttatcagaaaattcttgcagacaagatagatttccccagacatttggatttccatgtgaaagatctcattaagaaactgctcgtggttgacagaacaaggtggttaggaaatatgaagaacggggcgaatgatgtgaaacgccatcggtggttccgctctgtggactgggaagctgttcctcagagaaaactgaagcctcccatcgtgcccaagatagcccgcgaaggcgacacctccaacttcggaacttaccccgagaatgactgggacacagccgcgaccgtgccgcagaagggtttagaaatcttcaagaatttctgaggacaggagctcacatctggaagaagcaggaaggctggaatctgcctgcaacaaagagctgctcctgagcagaccagtagcaatgtcttcttcacgtgataaggacatttccacttttctgtctttgtgcctgtatgtatagaaacagatcagagcacagttgaaattaatgtaactggcattatttaagcaactggaattccacactgtaggaaggttttgaaaattgtttgcttgtagattttatcttatcctttagtgttgtgttcctactgtgatgtcttggtttttctcatagacttaagtttataagtttgaactggacttgttcaattataaccacaaattgtgtgtgtgtgtgtgtgtgtgtgcatgcgcgcgcctgtgtgtatatatagaagtcattatggcagatccacagaaattgtgcaatgatgtaaatgttcatacttcacagagcctataatttt

SEQ ID NO: 81608 - DNA, 1048 bp, Homo sapiens
gcctcccgaagtgctgggattacagttgtgagccaccacacccagccataaaatgaattttaaccgtggttcttacccattaatctgtgtaacctcatttgttaatgttagaggtaaacattccaaatctgttttttcatcttaaaaagtgatatttataaaaagtgaattgtaaaattgtttgaagaagactgtttttcctgtttataattcctatttttataattgcagaaattctaaagcagttcctgactcatttcgacaccatttttgaagtgttttacaattccttattctctcagcattttgaaaactgccgggatacttctaaaatagtaaacatcctgatgtgtttcctggatttgcttgagcttctcatcgcctccagaatccacctgaagttacatttcacttgccagaggattttatttttgaaaccatcttgcatgctagaagttattacctggcctattcaggcttttgttaaaaggaaggtcatcatattcctcaaaaagtgccttctctgtaaagtgggtgaagacctctgtcgtggatctgtgcctgccttaatgccgccagaccatcatgtagcggtggacatgctggctttagctaatgctgttttgcaagctgtgaattcggggttgttgaagacactgtctgtttatgaaaaacattccttttttggaggtgatgaagttcaacctgaatgtgaacttatcactagtccagatcatgtgatccttagagcagcaagcttagttataatgaaatccttagaaatcaagtttcaaaattattcttcagcaagtgaagtgaaaggtaattctccaaactccttttgtatgcagtgtgtaattatttacttaagtacagtaattcataattatcaaatctcaggactagtttaaattccagtaatttaagctgtatgttatcctatttgtaacttattacattttcaaaaaaaaaaaaaagaactggatttacctttaagaaacatgtcagctttttgtgcctacaatgaatttgtaaagcataaggaatg

SEQ ID NO: 81609 - DNA, 1050 bp, Homo sapiens
caaatattaatagtgccaaagttaagaaaccctgatagccattgaaaactgttagaggaaagctcaagtttctgctgcgttaaaattaaacctaattttatgctctcaaatctgtgtggaaagcatacatttcattgttacggtcttgaaataatgttcctgttacaattttccattttagaaattaagcagtcagcatcccctttaacttgagagacttagtgattaagtggaaacagttgctttctcttgtaataagcatatagcagttagaatttttaaattatttttcctattttaggtttcactgaagaaacttcttagagattcattgcacttctgagatttaatgtttacaacttggagttgtcgaccttcttataagatacattttggaagtcaaaatgaaagttttctgtgaagttttagaagagttatacaagaaggtacttcttggagccacacttgaaaatgacagccatgattacatcttttatctcaacccagcagtttcagatcaagattgttctacagccacctccttagaatgggcaaacacctgtggtatccagggcaggcatcagcccatctctgttggtgtggctcccattgctgtagcacctgtgtgtttgaagaccaactctcagatgagcggttccagagaagtaatgctccttcagttaacagtgatcaaagtgatgacaacccggatattgtctgtcaaaaccgagttccatgcaaaggagcagtacagagatgtaattaaaattctcttagaatcagccaaagtcgattctaaattagtaagccatttgtttttctaaagatgtagatatttaaaataattttaagaacattcagcaatagtggttaattatatttgttttcctgtagatctgcatgttccaaaattcagataaattgttatctcacatggctgcacagtgccttgcattgcttctatatttccaattgagagaaaaggtaagataagtaatcaaagtatgttattatttctctttcttaattttttttaaatttaaatgtttt

SEQ ID NO: 81610 - DNA, 1633 bp, Homo sapiens
tgatgcactagtacatgcagggagtacttttttggtttaaacctgtggttattgtttatagcacttggtattttcagaaaagagaaaaataatcttaaaatgtctgggattttaaaaaattcattttaagtatgcagaactctattggaataccacctggaggtgctacctgtggccaaaccctatcactgtgccacgttaagtgtcaagcattctgtagacatttgtttgtttgactgaaggagctcatatggaattagcacaagttgctaccacctgtgaatctttcttgttgggagaaatagtttggccacttcatcttttaccaccaggccttttcttgatattgttaataaattaacaccatttcctattctgctcagctctcatgccgtcttccctgacacttccagctgcctccatggaagtggcggtggatagttggaagccagcaacaaccacaaggattcttcaggcttgaagctatgttgggtcatgtttacttcttatgggaagtaaggggtgctgaggacacacttggaagtgagatgtccagtgatgttcactcttgaaatgtagatgtagctcgtgaaaagtggtggcatattcatttgtggcaatgtgtgaggctcatcactggggacactgatttgcattttaaaataaactttattgtaggaaagctttggatttacagaacaattactgaggctgtgcagagttcctacatgctcgatactcagtttctcctactaacatcttatattaacatgtttgtcaccaccttgaggagagactacctatacaaattatttggaattctgaacaacagatgtgtttctccccctttatttatcgaatcagttatttgtatcaatgtgaactcttgatatccactttgtactttgtcatctggtactgttttaagtattgctgcagttattccctctttggctattgagggatctttcagttggctcctgtgtccctttgacctcccccaccgtggtgtctttctttgagcacctccttgctttctggcaccgtgtgatgttccagtcttagaatcggccatttgtataaggatcgctttgcatgtttcacagcttgctttgtaggagttgttctgatctcgtcggcctcatttatttagaaataataatagaattttaaaacaaattttatttccaagggcaagttggcaaactctttaccttccttgaagaggtttgtcaaggaaaagtagatgagaatagaggaaaagagagaagtggactataccaatttggattggttgaaaattctggtgtgcagccagcaggacatacaactgctgcgggccaggttgctaagtggcccgaccttttcttgtctgaaggtttaagtgatgctcacccaccgtcaggggatgaggtagtagttctcccaatatgtaattcctagagttttatgtggaagtcactttgtgtccttaactttgttggaattaacagagctggaatttaattgacacgaagaaagatcccttttcttttagttgtggagagagtttattcagaattcacatggggaacctggcaaggctgttgttaatgttttatctagttcggtgtatgcataaaggaataacaat

SEQ ID NO: 81611 - DNA, 1154 bp, Homo sapiens
ttgagcacctaatagatgccaggcccagggttgggccccaagatgcagaaatgagcaaatatgggactctccttctggtacttcgtcatttgctgggggatggagttatagccaacatttattgagggtttagtctatgccaaattcctcacaactcttttaggataataagtattatcagtttttacattaaaaattctaagctacggaagagtaagtaattcacccaaggtcattacttcataagcagtggagctgggattcaaaccgtttcttacctgtaattctgtattgcccctaagaaaacaaggcagttccaaaagagtgaatttaagggccatgtgtaataaggtcctcactgtctgctggggtgggtggacgagtgcaaggaagacttcctagataaagcgtggttggagtggaaatctggaaaggtgaggcaaggatggaggctggaaggatgggggtgtggaattactccaactcagggggcactgcgtgtgacgggttgaaggaaagaaggagcacttttggttttaggagatgaagaatgttcagtaagattggaatatatccaataatttattgtagggacattggtgaggtgtcaaaacctttgacagaggaatgggagaacagattcgtgctttagtaaattagctagttatagtatgtgaacatatcagaagggcgtaagccctaaggcaagaagagtagctgggatatgaggtgagagtgaagtaaatcaagaataactgagcttttggcctgaggatcaggaagaaaagaattgccgttaattgaaatgaagattagtaaaggagcaggagggaagctagccagatgcagtttaataaatgggacataggtgtctaataccagtcactcacccacctagaaattactcaaatatattgatgggtcagattttactaatgttaaattcatatacccgcctggtaaaaccaccgatcagtgatcacacagagctagccaaaatcagagtaagaggttgcttgtgaccatagtttggggagagcgatgtgaccacaggcagcctggtggggagcggccacgtgaagccacacttgctgctgcttctggagaaatccgttgagaaaatgagcgagtctgagtcgagtaaatgatactac

SEQ ID NO: 81612 - DNA, 1002 bp, Homo sapiens
atgcaggtcattgttgtgtgtgttaatctctgtttttccttagctcagtgtagcttcaaaatgtacatagaacctgaaagagacctgaaatggaaaccaaagatgcaagtgcagtgttttgtaacataattttaattttactgtcaaatagaacgagtataggatacaaataaggatggtggctgaagggtgggagaagtgaaaagaaggtattcttaaatttcacttgcagattaagagggaatgtctgccagcagttgactggccaggtatagattagaaatgacctctggcaagatgttttgtttcatttgaatgggagggcatcttgtagatttcacgcctgactttgaacttctggtaagcgatgcacctggaaccggcttgagtgacttaagggctcagcagtatctgcccggtggaaacattagtgtcatgctcatgccttaccagcagatggcagcaaaatgctgtgttaaaatgttcttaccctacttaaatttaagtcctgtggtaaacagatactgtatatttttctttcagttaagaccaaggtagatataatgcccttatttcccctaaatagatacaactaatactaccattgtgtactgacactttacagtaaatgtttttagaaatctacatgatatggcttacctaaaaacatcttattttgtataggttttgttagcaactccttcactgaaatactttccacagtattgttattttacatatagttttctgcctcagatttttctaagagaaccatttgtcataatatgttctagacctaaataacgtttattaaacaatacgtgagttttcactcacctgtggaggctgtgtgtgtgtatgtatgtgtaggtgtgtgtgtaaaacattaatgatttttttcttttattaacaagccaaaaattaaggtgacttttacaagagagcattttcatcctgggtagttaggtctgatcaattgatcttttacatggaattgctgac

SEQ ID NO: 81613 - DNA, 1048 bp, Homo sapiens
atcccggactctgttttctctccatgggtctcctcctgattttcataataacactgagacatgatttgcctttctctcattccttttatcatgagtgtcagttttttccagagacgaggtggtgtgattgatgtgacttatctcaacagattgaattcagaagcatatatgaaaattcagctatcatctattaaaccatacattaaaagctttgcaaaaatgtgaaagaatgacgttcttgttaaatttttttttggttttggaaaatatagttacttttcataatgatgtgttatttatgttaacatgtaatggtttattagaatgaatttaaaagtatttctaaaatgtctgttttaacttataatatggcatttactatagagatagcccacataaaagtttctgggggttcgcaataattttttaaagtgtaaaggagttttgaaaacaaaaagtttgagaatgactgaaaaatggcattcaacttgactttaagcatgttacttaatctctctgagactctataaaatggggatgatgatcaaagtacttccctcgtaaaaggatgaaaggagttaatacatgtcatgagctcttaacaatacatggcgcagagtaagtattcaatatatattagctttattatcatgtttaatatgaaagcaaaacttccttgactccaaacactactgaagcacagttgaagaattcttccttgtttttggagccatctgtattgtttttgtaaaacaaaatattccaaagggaaagaaataggattttgtgatttttcttttgaattgagatataacgggtttttattggcaagtgatcagggtgtggaagcttgaagcgatgtagattcagaataccttgaggcgctttttcacacccccttctgctgcactcctcaactgtcagccttacaaccaaggttctgctgtgttcagaatcacggaaaacaggtgagcagatctggaaagcttgtttggaaagctccacagagaccgtggtgggtgtccgggctccagtgtcctagacccag

SEQ ID NO: 81614 - DNA, 1004 bp, Homo sapiens
tgaaaaggatcaaataaggcatcgcatgaaggtcctaggacactttgagttggtatctttccggtcctttgcatgtcaagtccatagagagaacttccagggaaatgaacagttcttttcaaaagtgccttaaatattgtgctttgtggctttgtaacattttcttttttctgtctttttaggacagcccagaaacttgcaggacctgtgccgaattaaaattcgacaatgtataggccttcaaaacctaaagctacttgatgaactaccaattgccaaggtcatgaaagactacttaaaacacaaatttgatgatatctgatatgccagaactgtgagcaagattaggagttctattctagatacttaaaaggctttttgccttgcacaaagtatatcctatgcaatttctgatttgctgtgaaatcagaaagcaggtatacacttttgggttttctgtttgtttggttggttttcattgtaggggagggattttttatatatatataaaaacacacaccacatgcttgaaggtcttaatttggtttcttggtccaagtttaagaggtccaagctttgtatacaatactgcatttagaaaaattgtcttttcttaaatgacacaagcaggtttagagtggagaatttaccctttccaaatttatggttccttggtaagcacggtattctaaaccagcagagcacttgttaacgtttggaggcacagtttcacccagggcgaccctgggttcttttggaaaatgccctaagaaatgtttgaagtaacgctgtcacctcattcatttttaatgagtacaaactggccgtttcaaactgttctttttcctaattaatgtagctttcggatgacataaatccagtatctctgcttatgacataaatccagtacctctgcttttcttttgctgtgctcttgtttttaacttattttttttttaacaactgtagtacactaccctgagacactgcatctcgatttctat

SEQ ID NO: 81615 - DNA, 1050 bp, Homo sapiens
tatgtttgcttatgtagagcacagtcctaaaagtgggctgctttggaaacactgccccccaacactctggtgattcacattttcaccagcaataggtgggattctctgtctccacccctcagccagcaagcagtaggcatcctggagcctattaattttcatcagtgtgaggcaaaaataatttctgcttattttaatttccatgttatattagtaataatactggatatcttttcatatgttcatgaactatttgcattccctttatgtgaactgcctgttaatgtttgttgattattttttctaaaggattgtttgtctttttttctcactttggagggtttttttttttttgaacattagagatttttaagactttatcataaatgttgccaatatttttcccaatccattatttttctttttttgttatcttttgtgatagcaaaggtaaaataatacataattcaatatgttcatcttctcctttctggtatgtggttatacaagaaggccactttccctctaattttatttcagtattctcctggagttccttgtaatgttttcattcatttagtttttacattttaagctttaacctttctggtatttatttgtgtgtattgtatgagggaagtggcagagggtggaggtggctagcttttatctcttccagatagccagctactctagcacagtttttaaaatgaagttttctttctcatctgaattgagatgtcaccattggcattttccccagtacctatatctgtatacattttgggattctcagtactggttcactggcctattaatctgtttctggcaaatgtcatattgtttcgattataggcactgcatttaagttttacaatctgttaatgcaagttttctgttcattagtttttttcaaagatatcttgactggactattatcggacatttgttcttctattttgctcatttcccacagtgactctatttgtgtagcttttatgttctttaatgagatttttttcttttcttcctaaaactcctggacctgtc

SEQ ID NO: 81616 - DNA, 1136 bp, Homo sapiens
acatgaccagaggcaccgggcctccgtttgggcagccaggagtgatttcctagtgggaaaagtatacatttgcaaacagatgggaatacatttggatatgcatagatggaattactaaccacctttacctatgttctaggcaagttttgaagattgatattatattttatataatgtcatatagaaaatatatattggttatgatttatcattatatggtttctgtgctacttggaaggcacggcatgttattagatctgaagataatgtttggctgtggggtggcctggagtccaggggcctggggacgctgtgaatgagcacttttgtaggagcatcaggtgatgaagggaagacgcggcacatctcgtggcagaaagggcagcagcagtgagctgggggtttctgagagagggtcgtgggctggaggagagcagttgttaacaatacatgccttcctggcttccccagggctagagcagcccaaaggtctgaggcagctccccacacagcccctgggtaatgagcagttaggataatgattcatgggccttctttaaaattagatttggggatgggcctttctaccaagaggatgtgccttccagcaggaactcagcagcccggcttctcgaaggcgggtgtcagcgcactcaccatctgggccgcatcctcaggaggaggtgacatacgtgttccatcagctcagcgggagaggatggccctgtgcagccccagctggtttcccagggtccaccagcagctgctgggcagccttgactgctctgcctgcccagaagtcgggtctctgctgccaggccttccctgaagcatgcttggtttccacgtcacacctgatctggggccctggcttaatgccctgtggtgtcatctcaccgccttccccctgagctgagggctggtgcagtggcctttccctctgagtcgctgctgttgcagccaaccaccctgagtggctttgggaggtgagtttgtcacagaatggctccgttttgccccggtgccctgtcccttttcacccacacaagggccctgtccgcacgcggctccgctcgcccgcctttcctggcctcatggatctgcctttcttctgcctccacagcagtcagtttcaa

SEQ ID NO: 81617 - DNA, 1111 bp, Homo sapiens
aatgattgtcatatttgcctccttgccatgcacttgaaggatcacctagaggtctgggtgttcctgcagccacctccattcactactcagtgtgttcaccgagtcaaatgtacacactagtgagttgccagcaccacactccatctcgtaaggacaacacttaggttatgggaaccagcggctttcagaggcattctccctgctgttagggtctcgtttctcaagacccatcctccaggaaggtgacacacctgcctactgcactgaggggcgcctgctctgccaggccccaggtggcaaggtttcctcttgtgccctcatcacggaggaagccaagggccagccctccctgtgcctgcacagacgcccgccctggggaattaggctgcattactgccgtataacttgctgtaatctctgctgcaaaggagcttatgtgcttcagctggaggcggggtggtctgtcagctcaagcggctgcacagggctgctacctgccgcggtgggccccgctgtgcttgctaaacccttgaaagatggccccttctgtcctgcttgaaatgaaaatgcttgcaccaaatcttcttagtctaacttgttataaatgcaacgataatgtaaaggttacaatgcaatggatcaaattacagtaactcatttcgaatggcttccagtagaaagcagatgcttcagagttcggtttggttttctgcaggggtgtaggggtgagggagggggtgtagattttcaccggaaacgatcgcgtcaaacagattaggggctggcttgtcatcagtgcagttaaaccacttaatgtcttttgtcagatatttcttcatatgtttaatttaccattcatgatgtttcagtgatgagggtcttcatttcttactaatacaggcaaaaatgaaatgtcctttaaagaacattctagctacatttcctttaaaactgtaagagtagtcggttatgcctgaccgctttttaatgagaaaatataataagaaattgatcaaatcacttaatagcaaagtggttgggcaagctctggaaaatgcttaaatgaagctggcttatctgtaatgaatttctctccatcacaattaagtcg

SEQ ID NO: 81618 - DNA, 3661 bp, Homo sapiens
aagcagggtactccttcgctcaggttgtttgcctggagttcttctggctctcaggaggaagtttattcccacagatagaagccgcaggatctgctattcaggtcttcagccagggacgcatgactctgtgggtccctttcacaggcgtagtgggacgggggtggctttatctttcaggcatgctcctgtggtgcactgtgatctcaattttatatgttttcattatgggacaactttttcataattctgtttgcctgtgaaagtatattggccaactttggttattaacccttacttccttaagcagtttctatctgtgaattcttctaaccacattggactgctgttgatcgggccttatctagggccttttgtgtgctgtggtccattcagaaacatttctaatatttgcattttctttagcatgtgctggcactcaatcatacaatactaaatttgtgatctcttttttttcctgtaacagatgcagcagcttttttatgagaattacgagcagaacaaaaaggggtacattagagatctccataacagtaaaattcaccaagctatcacattacaccccaacaaaaacccaccctaccagtacaggctccacagctacatgctgagccgcaagatatccgagctccgccatcgcacaatacagctgcaccgcgaaattgtcctgatgagcaaatacagcaacacagaaattcataaagaggacctccagctgggaatccctccctccttcatgaggtttcagccccgccagcgagaggagattctggaatgggagtttctgactggaaaatacttgtattcggcagttgacggccagccccctcgaagaggaatggactccgcccagagggaagccttggacgacattgtcatgcaggtcatggagatgatcaatgccaacgccaagaccagagggcgcatcattgacttcaaagagatccagtacggctaccgccgggtgaaccccatgtatggggctgagtacatcctggacctgctgcttctgtacaaaaagcacaaagggaagaaaatgacggtccctgtgaggaggcacgcgtatttacagcagactttcagcaaaatccagtttgtggagcatgaggagctggatgcacaagagttggccaagagaatcaatcaggaatctggatccttgtcctttctctcaaactccctgaagaagctcgtcccctttcagctccctgggtcgaagagtgagcacaaagaacccaaagataaaaagataaacatactgattcctttgtctgggcgtttcgacatgtttgtgagatttatgggaaactttgagaagacgtgtcttatccccaatcagaacgtcaagctcgtggttctgcttttcaattctgactccaaccctgacaaggccaaacaagttgaactgatgagagattaccgcattaagtaccctaaagccgacatgcagattttgcctgtgtctggagagttttcaagagccctggccctggaagtaggatcctcccagtttaacaatgaatctttgctcttcttctgcgacgtcgacctcgtgtttactacagaattccttcagcgatgtcgagcaaatacagttctgggccaacaaatatattttccaatcatcttcagccagtatgacccaaagattgtttatagtgggaaagttcccagtgacaaccattttgcctttactcagaaaactggcttctggagaaactatgggtttggcatcacgtgtatttataagggagatcttgtccgagtgggtggctttgatgtttccatccaaggctgggggctggaggatgtggaccttttcaacaaggttgtccaggcaggtttgaagacgtttaggagccaggaagtaggagtagtccacgtccaccatcctgtcttttgtgatcccaatcttgaccccaaacagtacaaaatgtgcttggggtccaaagcatcgacctatgggtccacccagcagctggctgagatgtggctggaaaaaaatgatccaagttacagtaaaagcagcaataataatggctcagtgaggacagcctaatgtccagctttgctggaaaagacgtttttaattatctaatttatttttcaaaaattttttgtatgatcagtttttgaagtccgtatacaaggatatattttacaagtggttttcttacataggactcctttaagattgagctttctgaacaagaaggtgatcagtgtttgcctttgaacacatcttcttgctgaacattatgtagcagacctgcttaactttgacttgaaatgtacctgatgaacaaaacttttttaaaaaaatgttttcttttgagaccctttgctccagtcctatggcagaaaacgtgaacattcctgcaaagtattattgtaacaaaacactgtaactctggtaaatgttctgttgtgattgttaacattccacagattctaccttttgtgttttgttttttttttttacaattgttttaaagccatttcatgttccagttgtaagataaggaaatgtgataatagctgtttcatcattgtcttcaggagagctttccagagttgatcatttcctctcatggtactctgctcagcatggccacgtaggttttttgtttgttttgttttgttctttttttgagacggagtctcactctgttacccaggctggaatgcagtggcgcaatcttggctcactttaacctccacttccctggttcaagcaattcccctgcctttgcctcccgagtagctgggattacaggcacacaccaccacgcccagctagtttttttgtatttttagtagagacggggtttcaccatgcaagcccagctggccacgtaggttttaaagcaaggggcgtgaagaaggcacagtgaggtatgtggctgttctcgtggtagttcattcggcctaaatagacctggcattaaatttcaagaaggatttggcattttctcttcttgacccttctctttaaagggtaaaatattaatgtttagaatgacaaagatgaattattacaataaatctgatgtacacagactgaaacatacacacatacaccctaatcaaaacgttggggaaaaatgtatttggttttgttcctttcatcctgtctgtgttatgtgggtggagatggttttcattctttcattactgttttgttttatcctttgtatctgaaatacctttaatttatttaatatctgttgttcagagctctgccatttcttgagtacctgttagttagtattatttatgtgtatcgggagtgtgtttagtctgttttatttgcagtaaaccgatctccaaagatttccttttggaaacgctttttcccctccttaatttttatattccttactgttttactaaatattaagtgttctttgacaattttggtgctcatgtgttttggggacaaaagtgaaatgaatctgtcattataccagaaagttaaattctcagatcaaatgtgccttaataaatttgttttcatttagatttcaaacagtgatagacttgccattttaatacacgtcattggagggctgcgtatttgtaaatagcctgatgctcatttggaaaaataaaccagtgaacaatatttttctattgtactttt

SEQ ID NO: 81619 - DNA, 1034 bp, Homo sapiens
gctcttcctccgaggactcaagtggtggagctgggctgcgggaacccttgctccccgcccacagcgccactgtgctgtccccactcaccaggcctccactgtcccagcgccgctggagtctttaggcggtggtgggggtggttgggttttttaagtaagacatttcttcattaaatgctatacgttaacacggcgttgaatgtctttatgtcgaataagattctacaaaaagtcaggtgtagatgaaaaatatcctagaaggaggtgaatctgtaggtcatatttgacccacagatatactttggcttgtatttcttttttctctcttttccttttctctgtccctttccctttctctctcacttgaactggttgccagcacttcagttagacttgacacagaacagctggatttctagcttccctttaaacccggctgcactgggcctgtgtggcacgtcctggtccccccgagctccatcccttctggcttacatccaccttgtccctgtaagtttgtttttaattttatttttgatttagtttgtgctttggcagtcccctagactagagcttatatcacgttctcgtagagacatgttgggtcacgtgtgacgctggtgtgtggtccgtgttgactggagtggagagggtgctgagagagcacgggcgtggaggccagagggccatacctggtgctgggtgggccgggtttagaaacaccttgggagagaagcctggtggccgcttcgtggcaggcccgggctgggactctttcgcccgccacgctcgccggctcgatcttgtgttcgcgcttgtttcttctctgtacgtgacatttgggctttcactgcctggtacggcgcctttcacgggagcgttcagtaaatattgagtgccgtgtgtgcacaggacctcatctgtttaaagatggttctgcatgtattcatcctgcatcatgctgccacgtctgccacttcattttttttttgttaaggcgatgcctggtgcattcaactgattgccccagatca

SEQ ID NO: 81620 - DNA, 1487 bp, Homo sapiens
gccttcacatcagcatgggacaccagaaagtgcctgaataagagccagcaaagaaaaatgttttcatttcttctagtgtaatttatacttatggatctcatgagaattacattgtttagttagggtatgcttattttacatatatgtttttttttttttttttgagactgcttctcgctctgtcacccacgctggagtacagtgctgtgatcttggctcactctgtctcccaggttcaagtcattcttccgcctcagctggaattacaggcgccctccactacacctggctaatttttgtatttttagtagagacagggtttcaccacgttagccaagctgatctcgaactcctgacctcaagtgattcacctgcctcagcctcccaaagtgttgggattacaggcatgagccactgctcctggtcttgtatgtccatttttaatatttatatataatttatattaactaactggggtgtcgacactatgtatctggaatttgaatctatttgatagtctctcctgcaattacctcctccctggagacagggttttttttttttttttttgagacggagtcttgctgtcacccaagctggagtgcagtggcactatctcggctcactgcaagctccgcctcccaggttcacaccattctctcgcctcagcctcctgagtagctaggactacaggcacccgccaccacgcccggttaattttgtttttgtatttttagtagaaacagggtttcaccgtgttagctagtatggtttcgatctcctgacctcatgatctgcccgtctcagcctcccaaggtgctgggattagaggcatgggccaccacacccggccagcttttaaataaaaaatgtaataaaaagtttgtagctttcggttgacacatgacttatacctttaccattagcctttaaactttctcacatctgtgaaatttttgttgttcttatagcttataattttcatgtctctttttctttggttgaaatcctgacacaaatagtaggatagcttggttttatttagcagttaatgttgttaactatttcaggaaaataagatgatccaaaatatgattattgctcaggtgtgatatatgagtatgtaagtactgtatagtttgcaaagtataattagttttgtaatcttatatgtgaatatgttgcattagaaggaatatttttcaaatgtcagagtaggattatgagtgattcctcccgtttccagaattttataataagtatatattgttttataataataaagaaggtttaaaaatagttcatcgtaagtgatgtaaatgtttctacttgacggcattttaagagtcgcgtgggttatgggcgagcttatgaaatgcggtttgtaagactacttttcattcatgaatccctctatttcattgtagtcagtctgttataagacatatgttgtggaatctgttcaaaacctggggaggaagtgcatg

SEQ ID NO: 81621 - DNA, 1459 bp, Homo sapiens
agagggaggaggggtggctggaatgtgaggagacctaaggggtatgcagagcagttggggtgggtcgaattattcccagcaagcaacatgaccagggttccatattgaaagaccaccccgacaggttcagagcaaggtgaggctggggcagaggagacctaagagatttctgcaacagccaggtaagaaatgaagagaatcatagctgagaggcttgcttgcgggctgcagaagagtgggtacatcggagagactcgggagctgcatctggaagagtctggtccctgacccatctgggggtgcaggggctggcaggtgttcttagtcagtgcatctttcatggtacttaagaacagttcttgaacaattctcctaaccttgtttgtactgttagtttgccctgaattgtaaccccagaaaagacttttgtgacttttctggtccaaaccaggcaggagacaaactgggaccaaattagtcaggagacttgctcgaggacacagcctgtgagaagcaggccaggctccagcccgtgtcttcttcgcgttgtgtttacccgtcatgtgaaatgcagtaggactgcaaacctgaataattttgtcgatagatggcatttttgcgtaaaggcgtctcttattttttacgtggatactctttaaaatgaaaatcaaaaaagttattctggaagtaaactggctcatgaaatgacaacatatggtgacagcatttcgtcttattcaacctagaatgtcatcttagttcccggatgataagggatatttggaatgaggtatttattttatgttgtagaatattggataactgccacagtaccgggcatatagtgagtattcacaaaacattggttgcgtgaaacgaattgtgtgagtcactttttcttgtatcttattcagaacgatgcttcagagggcttttgtgactcacttgtctccagttgctgatgcagctgtaatgctgttagacacagggatcaaatgaacatacgctgctgttcgtggttttgggggttctattttggggagtgctatgtctgtttttagtttcttgaaactgccttttatgcacaaaaccgaagtagactgaatctataactgcagagccacacagaatctggtgcgtcgtgtttcctgtccagcattgccacttccaggtttttcatctaacttgaataaaacatgtttattttttacagaatttccacaaaattttatttttgaagttgcttttcagaaaatctgtttttaactggtaaaatacatgtcacatctaaatacacagttcagtcatttaagtatgtaagttgcgcaaccagtctccagaactgtttcatctgaaatgatgtgttttttgtttgttcgtttgtttgtttttgagacggagtctcaccctgccgcccaggctggagtgcagtagcacaatctcggctcactgcaacttc

SEQ ID NO: 81622 - DNA, 1049 bp, Homo sapiens
tctgagatcccactgcccctcctgcagaaatgccctccatcctcccctgcagcctctgctgtgtctgagatcccactgccccccctgcagaaatgccctccatcctcccctgcagcctctgctgtgtctgagatcccactgcccctcctgcagaaatgccctccatcctcccctgcagcctctgctgtgtctgagatcccactgccccccctgcagaaatgccctccatccttccctgcagcctctgctgtgtctgacatcccactgcccctcctgctgcttccaccctggcaagcttgataggaccagagcttgtcatcagcagcttctgaaattgctaaagctcatggaatgcagtctgtcccataatttagccccgattgaaagctgaagtgtgttgagggctgagggttgtcctccttagctgctgtagtgggcccttccctggctggcttgctgctggcctgagattccttctaaccccctcctggacacctactgggagaacatgaaggcagcctccagttctctttgaacacagttcaggaaaggtggaaggtaacagccttcctttccatctggttaggctgatctctctaagaaacactggctggaatgaaagaagggcagcccctaccagcccagggccaccagagctgccagggaacgcctgtctgtgtttcttccctgctgctggtacttgcaacctctgtcatcctgccatccagtgactcacagctgcagccctagctaagatttaactcctcttggagtcttcctgcctcctctcctcccaccccactgcccaaccgcctgctggaaaggcagccctgccgctccaccaatcagatgggtcagaccagccccagaaggatgggaaggagttaggctgggcgggctcattggcttcctccttgttcttaggcatctttctcatgtgagcctttctcttctgctcactcgtccccaccttgttctataggacgtttggtggttcctcctgccaggatgccttaacgttgatattcacggaaggctgagggtcgggg

SEQ ID NO: 81623 - DNA, 1023 bp, Homo sapiens
tcttactgcccagtctagagtgcaatggcacgatctcgactcactgcaccctccatctcccgggttcaagtgattctcctgcctcaccctcccgagtagctgggattacaggtgcacgccaccacgcccagctaatttttgtatttttagtagagatggggtttcgccatattggccaggctagtctcgaactcctgacctcagctgatccacccacctcggcctcctaaaatgctgggatttacaggtgtgagccactgtgcccggcctacattagttttttctgaaccatttggaagttgcagatataatgctctttttgcccttaaatcagtatgtatttcctaagaacaaggtcattcattgacataaacacaacgcagtaatcaaaatcagggaaattaacgttgatacagcacagttatgtaatctacagagtttagtcatattctgtcagttgtcccagtaatgtccttcatagcaaaataaagaacttgaggtgttccagagtgtagtctagggtcacatgcagcatttatatggtatgtctctttaagtgccctttaaccttgaccttgtctttgctgttcatgaccttgacgttgttgaaaagtacagatgagttattttgtagttatttgtccttcagtctgggtttatctgatgtttccccaggctacgtgatgtgtcctcagtgcctcacatcaggagcacatgatttcggtgtatgatccatacaggcagtgttaactttgatctcttgccacgattctcctctgtaaaaatcactacttttgcctttgttatttaataaataccttatagggaaatattttgaggccatgagatatcctattcctcctgtaagcatcatccactaatttttacttgagttaatgatgagttaatcatccacatgatttttacttgaattaatgatgtttgtcaaatgatgatattgttgagcagccgtatatgggggcttttggtaattcttagaagaattctgtttctccattctta

SEQ ID NO: 81624 - DNA, 1734 bp, Homo sapiens
tagtcactttcagtctgaaacaggtctccatccttttcttgatttttatgaccttgacacttctggagcttacagaccagtggaatgtttatcagtttgcatttattttctcatgattaggttcaagtgtgcagatactacagaagcgttgctgtgttctctttgtatcctaacagtttgtgattttggtttgctctgttattggtagtattaactttggtcatttaactaaggtagagtgattaggaaaacctggccaggtttctccactgtaaagttactctctgtctttttatatttagtgagtgtcattgtggagagactgtaaatatcctgttcctcatcaaactcccacccccaatagttttagcattaattgatgtttcttggcagaataaatgaatagtgtgatggttgctaaatggtgattttctaatccagttattctttctacttttattagttgaaagtaaggaaaagcttgttccttttcccatttacttatgtgtgtgcttgtatgagtatacactcttgtattcctattttatttaatgagttataatctcttaccattattatacatttccatgtttacatcaccttagacgtgtccagtggctgctgtttgttgcaggcttctgtatctcttttttttttttttttgagatggagccttgctctgtcacccaggctggagtgcagtggcacgatctcggttcactgcaacctccgcctcctgggttcaagcaattctcatgcctctacctcccgagtagttggtattacaggcgtccgccaccatacctggctaatttttgtatttttagtagagacggggtttcaccatgttggtcaggctggtctcgaactcctgacctcaaatgatccacccgccttgggttcccaaagtgctgggattccaggcatgaggcaccatgactggccttctgtatctttttgatatgcccctataactgtttgagcaatttctttctggcatactaagatgtttcaggctgttattttttccctgccctagccttgcagtctgccatctctcgaagagtctctggttctttttagtggaaaacatttagaagccaagatctagactgtgggtgtgctcgttgctgtgggtgttggctggcccactcctgagcagtgggctgaccaggggaaaatgtgcatgtgtgtgtgtgtccttgggttccccctgatactccaaatcccatttcaaccccaaagggttcttcctcttctctccctttctgtatttgtaattgctttatttgacagttgagaaatctagctgctcattggcctcagccacatttacttactgcatcagtttccgctgtaagtgagcaatcctctgttgcaatgcctccttcccggtgccttccctatgtgactcaactcaagggttggcggcctacctgacgccccaaggctgggccactgcaccagcccaccctcaccccatctggggaccctatcttgcttgaccccactagtggctttttacttcaggacaacgggtggggcaggggcaagaagcctaactccatcttgaaataagcttttcaattttagttactagattccaggtactacctgtgtcacatggcaacgcagccctcattctcagaggattttaaaaacctgttggtaaatttagcaagactgaatatttgcttggatagtatattctggaagatctattttctttgagtg

SEQ ID NO: 81625 - DNA, 1037 bp, Homo sapiens
cagctctgcatagtcttccccaaatccacaaccccagtttaatcggagaaaacttcagacaaaaccaaggggtgggattttccgcaagatacttgacccgtgttcttcaaaagtgtcaggtcaggaaaagcaaggaaagaccgggaaactgtcaggctagaggtgaccaaggaggtgggattactaaatgtactgtggggccctagattggaagagaaaaaggacattagtgggaaaactggtgaaatctgaataaagtctgcactctaggtaatagtgtatacatgtatcagtttcttagttttgctctgtgtagcatagtcaagtgggatgttaacatcagaagaagcggggtgaagctgtgggaactgtctctgccatctttacaattcttctttaaatccaaaattgtcttgaagtacaaagtggctagaaccaagagataattggacacaaaaatgatgtcgctgtctctgcctctgtatcctgatggcttctccatgccaaggggaaactaggcaaagcaatagaagactagatcctctgtgactctaagtggatattgtgcaggatgtgatttttagcttattgacttctaagaactctgagacagaaaggtctttgtgtgtgagggctgtagacttctaacccttacaaagagcttatcagttgagcaagcttataatgtgctgtgttattactgtaaaaaatttgtaatggtaccattacagcaaaatgtttccctggctaaaaagatctttcagcgttcactcagcaatttaacgctcgggcttgctgacatcatcttggttaaccctgtagtgcttggcttctgtgttttctctcattgaactctggcagggattttaaaaaaaaaaagtacaaagctattttcttggatgtctagcaattacttccacagccttttcttaagaaacaaacaaaaaaactccctgtgacagaaaaatactataggtgctagtttttctttcacatagttaacatgtctgtgccgtctcctggaacaggtacactgg

SEQ ID NO: 81626 - DNA, 1050 bp, Homo sapiens
cagggcagacaggatttttggaggtcttcactctgccattttcactgatgtcacctaaaagcatctgttatggggacttagctccacagcttaaattttgctttttataattagatgaattacgctgagtgtcgccttatactctgtttaagaagtcagggtattgtgctctaaaaattagaaagacttccaaccaattagttacaatattcacatacattcatttcaaaaataaattttggacatctgtagcaagacactgtgctagctggggacacaacagtgcagaaagccaagaccatggtctcatatgctggtggagcgaggtggggtgcagtgagagacagtgcagaggagtatgtgtggtaagtttaggacatagcacagtggccagcatgagtggagtgacgaggcagagtggggcgaagggtaaggccagatggcatcagagttgaggggaggcagggaatgctgaggacattggtttgggcacaaataggcctgacttgaatcatggtgcttcattcagctttgttcttcactagctgtgtggtcttgggcagcgagttacctgactcccctgaaccttaatttccttaaagatggggtgagggtaaaaattgtctacgttatagggtggttccaaggataaattgagttgatgcatgttacctattaccatagctcatgtttgggacaggtgagtgcttgcttgtgaaatgtgagggctaccggaaactatcctcaagtatctgaaaagcaaagcccttcagaactcattccctgagaccaccacatagattttgatctatgtaaacaaatacttgaatatgctttgtagtaacattgtagtcttggaatctcatgtttttgtttttacaatttagggaagactattttgacagaaccaatcatagtttacctaaaatggatgtgttagttgctttggatctgtgattattttgttggcaaaacaaaccttctccaggtacatgaacatctctgaaatggttccaccattgggtatatcagagtcctgtgattgtgaga

SEQ ID NO: 81627 - DNA, 1043 bp, Homo sapiens
accatcatctccgagaagccaaccttcttgccggaatcatagaggacagaccttctttcgggagagaatttttaaaagtatgtcttagttaggtcgtgctgttatatactgctggacagacaccaacagagccagtctcttgagtttgatcaagaacttgggtttagcgttagtgccaagaggtagttagaaagtgtcatcctggggctgcagggtgggaggccattttggagatgattttcctctgacgggaggtaatcacaaaaggtttctgatggcctgcgaaggggtgcatggaatgatcctgtctggacacttggagccccctctgaggcttggtgcatcctgtcagtggcctcatcagctgaagggacctggttggtgaggaggcctcctccccgtgtggtcccgtctccctgccttgggaggtgggtcagggacagcagcagcaaggctctccttgggagtgtggttattgggcctgctgctgctctgcgtttctttaaatgccctgtggtgtcagagctttgactgactgctgcaggcttctcctgggcttgtgccacagggccctcccacctgcagtgcccagagctctctttttctcttctgtgagctgccttgcctgttcgtagtcttggcccgtatttctgctgaaatgttgtcttacagttttgttgaagtgctttattctggatagagtatcttttctcagactgtgacttaacttttcaccttaattgtgggatttttattgtacgcaaattgtgaatctaagtgcaatctaatgcatcattcttttccattacggtttgtgcttttgtgtttaagaaattcttcccttccttaggtcacgaatatgttttctcctgtatgttttcttacatgtttgaagtgttccctttcacgtgtagttcttcattataatgttaagaattcatctattggaacacttgccatcttattagacctttgatttctatttttttatttttctttttataaagctttaagtgcttctaacctaagttgttattaggttt

SEQ ID NO: 81628 - DNA, 1035 bp, Homo sapiens
aggctaatttctgtattcttagtagagacgaggtttcaccatgctggccaggctggtctcgaactcttgaccttgtgatctgcctgcctcagcctcccaaaatgctgggattacaggcgtgagccacggcgcccggctcttccatacttttgtcctaatacttagttaataaataatggcatttggggcctaaagaaaagataatgggttgctgatggtcatggtgatattttcttgattatccagaaaatcatcttgtctgacttctgctgattccacagatgtaattgcaagaatgtaggatatctccctatttgtttttgcaaaggcctggctcttctcttctggtcataatgacctacacagattagaaacttaacgtgttttgaatttataaaaggaatcatggtataaaaaagccaatagcatttgacttcgcatttgttgtgtaccttgactgttcagatagttactttaatctgtgagtttataatatagttgttgctttcagaatagttgtcgtgcaacttctgagttaccgtgacacataaatgaaatttgccgaaggaagtccgcttgtagatgttttctctgtagcagttgtagagaagatggactggctttggactttcctgtgttgttgctgcaccctttgcctgcagattgcacaatctgataccagttaatggtgaaaaaaattattgaggttgtattgtctttaggttgataaactcctggcagttgtgaggagcagaggtaattgctagatcttttgcccaagaaaaagaatacactttctaatatgaactgttagcttttttctgaactaatgttctaaagcacgtacttgagtgaaagagcagtattcttgcctgtacttgtccacccctagacttgcttttaaatgtctgctaatcactcttactttttttgttgtttgaactttagggaagtggacattttcaagcatacagggagtggccatgtaatttttaattacaaagtcacaaagatacattttaaatcctaaatgtg

SEQ ID NO: 81629 - DNA, 1049 bp, Homo sapiens
tctgacataaatgggttaagtcctaaccagcaaaggcattccttagctaagctaatactggtccagctgaattacttaactgtgatttgactcagtgtaggaatagcgtttagaaacctagagtgatggaggattcacttggcactctcaagtttcagctgtcttatctgggcttgagcaagggttggacatcagttcattgaaaatgagctttttctggcaaggcctctgcaaacgttttgtcatttcaattaagtgagagttctttgctcccggtaacaaatgtgttgatggcaaagctgacgtttgcttatgaaaatgaaggaactggacttgttgatattgcagaagaggggacagcttgcttctttgggagcattcccttcaattatttgaaattattaatgcatcccctcctcctcctcaggatggtggtgaatcacgatttatgttcctgaactcgttcactttgtggagctcttcaagttaaaggaccctaattgaaaagattataatttcttaagattggagggtttacaaagacttgacattgagagatttccctcaaaccaaccaccagtcatttagaacagaaaaggacaacatgaggtttttccctgagttacctaaaaaggaacagataataattgggtggagttaccataaaactgtagggttgaggttagactgtttttaaaattaattggtttctcttcttgggcaaattacaccatttcagtcatagttgagacattaattgcgtctgtgctggttgtactgctggggcctctttcactgtgttcttcctggtggggtacacgggaagcagggccaaactataatgaagcttcatcctcagtctagtagggaagtttctcgtgctctaccgcgaaatgctcgtgaaatttgcagttaggcctctttcctgtaacattgtctgaagttgatagtaaaagaggatttcagtacatagcttgaggctcaggttttaagaagcattttccacattacctttgctccgtgtgctcctgagactgactagtccacgt

SEQ ID NO: 81630 - DNA, 1076 bp, Homo sapiens
cttgagctaagtaaaccatgtttatcttgaaacagttcagagcagtcctcactttcttagatagaattcaacttggcaaacatttatacagaaggcttttccatgtaaaatccaaataatcaacctgtaagtgaacttttggagcaccaagtcatttcagatcgtgaatttcctgtaggagactagggaaccatgtggctctgaaaatgagtgtagttttttatgtcaggttcaagatcttgaagcgctcaaacaatattccagggatttccagggatggctgtggctgtcaatagcggattgattccagggatagatgtggctgtcaatagcggattgtgcgtgactgtttccattgcaccggcagcttcacgttcccctgtctgttaactaagctgctctttattaacagtagattccaaatacagggccctagtctctgcagagttcattgtctcagaaggaaacgagcgatggtattggttgatgagggctgtcagggtgcgtgaactaatcactgtgggggagcagaagaaagaggcttacacccagtgggtgatggatcaagaaatgtctcacccacactcccaccctttttttacccactagctgagtcttggaagatgaagaggtgtttttgaggcagagacaactacaggtttcctacaacatgaaatggcaggagttagtgaaggagcgatgggaaaggccagctctttggggctaggtgtaggctgtgggtggtagagtggtgggcagggacatggagggaaggtctgcgtgccaggctttgtgtggttgctgtccagagctattggtgacatttcggcaggacagtagcctgatgggatgtgtgttttggaagatcagcccagcggtgttgctgctgcagagggtggctagagttggtcaagtaccggtacctagctagagctggacaggaccggtacctgttgagggacgcttgggtagcatttatcaagaagtctaaaatgcagctctcttgaggtctggcaattgctctagaattttttccaaaggaattttaaaggtgtgcttaaatgtgtacatatgaa

SEQ ID NO: 81631 - DNA, 1337 bp, Homo sapiens
cgtgaacagcccttatttgaatgtatgagttttagtaagcactgtgataggaggattcatatacttaaatcaggccctcttgagagagttttttggtgacccttttgcatgtgtttcggaggttgggacaaagaagctgaatgacttttttccccaccagacaatcagttcaaatggcaatcacaatataaaggtttttttttttttcacatagctaaaaggtttttttaaatgtcccttaggatctgtatctttgcagtgctttgcgtgtcactctcataattttattgtggatatacaatgttcccagattttcagatttttatcaatactgttgtgctgcttttctgtcctcccaggttataacccgttgtctggtgaaggaggcggagcttgctcctggagacctggacgcagaggcccgtcatctggcggatgaggctaagaatcttgttagtgtcacttttgacattagcaagatgaacccttaaccctcgattcaattgccttacgcacgcttttcacagtgactagccaaggggaggtggggttgatttctgttcctaactacacctgcatatgtcagggctccagtcagcaaaaggtatagatgttgcctctaggcatgaggtcattggtcacattctacttggagacagtgattgcattcattgatttcatggttaattgctagttggtaggtaaaggcctctagatgattagcaatcttgataaaagaggcctagtaatgttcttttgaggttagaaatccttgctgctaggacagtctctgtgacaggttgcgttgaatgatgtcttccttatcaatggtgagcccaccagtgaggattactgatgtggacagttgatggggtttgtttctgtatatttatttttatgtacagaactttgtaaaaacgaaactatttaaaaaacaagaataacatttttagcatctttattcaaggagatttatggacttcaatttgtctatcaaacattaaatagctttttattacaacctctaactattacttatttctctatttattattactcacccaaaataagtctggcaagtggcagacagctgccgtgattttgaaagttgacagactccttggggttcatccacaaaattgggtgcttggagtcgagttgccgaattactgggataaagaaacatcgtgcctcaaggttcctcataggctgaccaggtttctacgtgacctctcagttattcccttacgccatgactcatcttttacgctcttgtccagaggcactatcagcagttttggataaagagccaaacagtaaatattttagactttaca

SEQ ID NO: 81632 - DNA, 1804 bp, Homo sapiens
aggagcaggaggctgctcacatttcgtgtcttcacttggggtggacgttggctgcaaccctcaaatgctgggagtcgtcaaccaactgagccctgttgtccaatgtgccccgggcaaggatgtgggtgcaaatcctgcttccgggcgaccactgacttccttggcttcagtgtccaattagaaaaaaaaaagaaagtagaaattcggtaagaaatccgtgaacgaggtccgtcctccacccccgactcaagccaagagatagcacagaacgttcccacacgcgctgtcccggccccggcgagcgtagccgggatttctcccccgccacgcccctcggccacgcccccctgcgtttggcccagcgacggggcggggtcggcctgcgattggccgggaccacgaccgcgtccgggcgcgccacgtgtgcgtaggagcgcaccggaagcgcccggctggaggcgcggcggcagggctgggcggcggcggcggcggcggtcatggaacgccaagaggagtctctgtccgcgcggccggccctggagaccgaggggctgcgcttcctgcacaccacgggtgagtcgttgcggggcagccgggcgcgcgccgccacttttgcgacgcgcagccatgatgggtgggtcgtccgccgctgcaccgggcgccggagcctgggaggcctgggaacggtcgggcgttggcgcttacgcggaccttgggcagcaggcccggaccttgcgcggaggcttctcgggagccgcacttccctgggcggctcggctgtcccttgtttgcgcaagtcttttttgcgaaccaagcccttcctgtggtagttactggggtcactcggccgttggcgtttgcctctgggacccgtcccacacagccccatacacactcctgactccccgcgctgtcacccctttctatgtggctctgaaaggcctttgccttcctgattcagattagttgctcttcattcttcaaaacccagttgctgtgccctccacactctaactgcccccgactccccagatggttgggaagtctcacttctcagtgatccctgaattgtcgcacttcttgagttcgtgttttaacgatctacttaggaggctttttcctcagcctagaccatgaaggctttgagggcaggagttacactttgtgtttgttgagtcttatggaaaggtcaactagtagtgtcatttttagttttttgaaaactgtttttcttttcagtgggctccctgctggccacctatggctggtacatcgtcttcagctgcatccttctctacgtggtctttcagaagctttccgcccggctaagagccttgaggcagaggcagctggaccgagctgcggctgctgtgggttagtgcctgataaccgaaatgaaagcggtggttttgcacctcctttatattaagagttagtctcttagtaaaagtaagaggggccacacaggaagaccctgtctctatttaaaaaaaaaaaaaatagccgggagtggcggcacgcacctgtagtcccagctgctcaggaggctgaggcgggataatcacttgagtccagggagtcaaagctgcagtgggctatgctcgggccacactacactccagcctgggcaattgattgagaccttgtctttaaaaaaaaaaaaaaaaaaaaagtaggaagtatatggttctcggtggggcgcggtggctcacacctgtaatcccagcactttgggaagccgaggcaggaggatgacttgaggtcaggggttcgagaacagcctggccaacatggtgaaaccctg

SEQ ID NO: 81633 - DNA, 1288 bp, Homo sapiens
ctgccataaattgttgaacaaatgtaacattttttggtagttgttggcatatttccctaatttagagacaataaagtcattgaactgttgccagtatatggcatgtagtaggtgcccagatgtttttgagtatttccggtttctttgcctacggtagtgccatgaaaagcacatgagtataggctttaccttcaccaaaaatgaattattatcaactacaatgggaggcaacaattttgaaatctttgtgacccttttcctttgaaattgagcatcccttccagtacctgccaaagacagactagaccgtccctggacgataagctcctcaaaggcaggtgctgcttttgatctttttgtacctacttcagtgtgtaacaaacagtggccacagaacaaacacttgcatgctaagggaatggattctctaaaattgatactacttttgctttggtggttttctttagggcccactgatgatggtgaagaagagatggaagaagacacagtcacaaacgggtcctgagcagtgaggcagatgtataataataggccctcttggaacaagtcttgcttttcgaacatggtataatagccttgtttgtgttagcaaagtggaatctatcagcattgttgaaatgcttaagactgctgctgataattttgtaatataagttttgaaatctaaatgtcaattttctacaaattataaaaataaactccactcactatgctaccaagttgtgtgtcatcatggtgcatttgcagtgaggtctaaggacacgttgaaattggaaatgcaggagggcagcgttttctcggtaggcttcctgggctggattagcgtctggctcctgcagtgtcatgacacatgccaggaaggccgccttttccactcccacatagcccttctgttagtgcagacttacctgtcgctccggcttctgataggacaactgaaatgattccatttttgaaattgattggtgtgtcccaccaaacctggctatgttttttgtttttttctcccccgcccccaggctggtctccaactctggcttcaagtgatcctcccgccttggcctcccaagggagtacaggcctgagccaccatacccagcctttagttttatatatgtacatagttaacataaaggtcatatggagagtctacaagaacatttgttgaaaggggcgtaagttactcatatttgaagaacactactgtttcattgccatctctctgatcccccttagccacgacagtcttaatcccatcttgttgcat

SEQ ID NO: 81634 - DNA, 1057 bp, Homo sapiens
aagataagatactacactggttgaattactttcaaaagcttttgaaagtaaaagagaagcaacttctgttggtctaggtctaacagttatgttcttccccctcttaagttttaatccaggtgctggtttgccaactgacaaaaagaaaggtgggccatctccaggggatgtagaagcaatcaaggtaatcatgtgttaggattcttggactggaatgagctaagatgggttcagaacacaaagctggataataaacatgttccgaacattgcagatttcattttcccacagttattagcatacagcaatatttctgtttaaggaaaaactagcataaagttattatttgatcagacttgaaattacacaagctaattaatgtggaggcagctttgtctttctcattttccaaggtgcatttatcacttcgaacagttacttaccttggtatgctgtctcagtgtttgccttaatttttactttcgaagatttgctgtctggcaaatccttttgactgatcagtagggaccctcgttttataatattgcctccttaaattattcagtaacataattgcaaatagttacttcacttagctacgattttagaacatgtggagtgattatttataagaaggcctgcatctcttcaccaattttagaaatttgtggtttggcttctagttttatttttgtgggccaataacattcttccccctacaccaaagtatttaatgttcctgatggagaagttgctgtgaatttctgtaggtgattgacacttagttttctgggtagctgatacttggttgaagttaatcatccatctccattgccctctgtcctccagaatgccatagcaaatgcttcaactctggctgaagtggagaggctgaaggggttgctgcagtctggtcagatccctggcagagaacgcagatcaggtgaacaaatggtgttctttgtatgttcaaattaatgttacactcagagtgtaactcacaaccatttagatgccatgactctggaatgccagagtagtgcctccttacatcaaa

SEQ ID NO: 81635 - DNA, 1029 bp, Homo sapiens
atactattccttgtccctgcaaattttatttaaagagattttcaggggcagctaggataaatgtaccttctttcaaaagacagtatacctttgttgttcttagacgctgaagctggcgctagcaggaaagcccacttacaccaagattctggcttgcagttcccagtgtgaataggttgctccagagtcccatcagctttgccattgttttcttttccaaatcatggctcagcagccactttgagattcctgtaggaaagcaatttcttatctcctgctattgagacagaagctgttaatgccaagattttaagaagctcccatgtattcatcggtagaaattatttaaacatttgtgatgtgctagtattgggcttgttgctagagagtaaaaattcagtaaataatgaaaagacaacttgcttcaaaagcactctccatttcagaatctcaaaatagcgtgtggtattcgcgttcttacctgtggctattgcttgacagggtgatctggaccctctggcatctctcaaatcgctgacttacctaaggtatgggaattacatattgtgacaaaatgaagccctttaaaataacattacttttaccagccttgaccttaatgtaatcagataattaaaaaatgtggcacatatgcaccatggaatactatgcagccataaaaaaggatgagttcatgtcctctgtagggacatggatgaagctggaaaccatcattctcagcaaactatcgcaaggacaaaaaaccaaacaccccatgttctcactcgtaggtgagaattgaacaatgagaacacttggacacaggaaggggaacatcacacaccggggcctgttgtggggtggggaaaggggggagggaaagcattaggagatatacctaatgtaaatgacaagttaatgggtgcagcccaccaacatggcacatgtatacatatgtaacaaacctgcaagttgtgcacatgtaccctagaacttaaaagtataatttaaaaaaaaagtgccttttac

SEQ ID NO: 81636 - DNA, 1051 bp, Homo sapiens
ctttattggaaaaaaagcacttggtgtatagataatgtctttaaaggtactgggtggtgagtgggatttccttcagatagaaatatttctcataggttaaccattcccctatagtatagttgttgtgtcttgtacctgagctgggaatccagaattatttgtatttctgtgctgcctgcacaaaaaatcatgaagtgagttaagtagtttgtgccacccaggagttgcaccttttctcaggttccactagatggtatgacagtggaattagccccaggcagtgtctaaaatcccacttctgttgctgaccctgtggcctcagaaaagggttctttttgctttgtttcctctttatcagggtgttggaagaaggatctctaagtgtctctctgtgatcctctgagcaaggaggtagataaaattgttagcttatttaattttcacttttactaagactctatttttattttagccgtataggtgagggacttgatcaggctctgccctgtctgacagaactcattctcaccaataatagtctcgtggaactggtaagttgcacagaaggaaaatgtatttggtgggtggggttaaaggtactatgtgcttcctacagaaaatttacaaaatctagaaaatgatctcagtatcctctttcttgtctttttcttaattcaggatctgggccttttgggttctgcagccgtatgttgcaaatattttcctacttttacttgacttttgacttaggatgtcttgttagagaagttcctaatttaggtgcagtccaatgaatcaatcttcttctttattgtagcccttttgatgtttaaatttcccctattccagggttataaactcctatgttgttttctacaattgcagtgttcaatatagtaccagtaactacaggtggctacttataattgagatgtgctagaactataaaatacacactggatttcaaagacttaagtgcaaaaaaaaaaaaaagtaaactatctcagtaatttttttatatcgatgttgaaatgataacgttttggataat

SEQ ID NO: 81637 - DNA, 1028 bp, Homo sapiens
ggggaggggagggagaactgtcgtgatatgttgaggctgttctgatgggttctaagaatctggcctgtggagatgcaagagtggagaactgtcgtccacaatgtttgaacgccgtttgggcactgagactaagcagctccaagtgtaaactcctgttgtgccgattccgcttaactagcccaaacgacttaggacagtgtgaggcaccttgtaaatgttcttataaatgttagctgcctatatcagccattgttattgtccttgtccttgttgtcatcagattctaagcttcatggcactggggacttgagactcgttcagcgttttctctctagtatcttaaacagcggcaagtcatgcgtgacccgacataggtgctaggtaatacttcctgaataaatcaaagcctggagtcagatactatgaaatacagctaatgctttaaggggcaactgtttagttatattaatacctcttgtgtttttttcctccattttatagggtataaaattcccgtcattgaaaatctaggtgctacgttagaccagtttgatgctattgatttttctgacaatgagatcaggaaactggatggttttcctttgttgagaagactgaaaacattgttagtgaacaacaacagaatatggtacgtgtctgtaggggaaagtaattttttcccctagagtaaatgttgcagtgtttcctgaagaagttgtagcacgtgctactggttaaacctacatgtttctttttctttttctttttcttttttatttatattttgaaaaaatattttttccataatggaagccacattcaatacatgttttttcttaaaatgagaaatgaacttcacttttcctatagagatccagagattaacctggcattagtctagtcttacttgtatctgttcagaaatcatgtatttttattttcatggttaagtttctaaataaaaacatgttgctttgtatacattttggcttctaaaacaattatcaaaggggtcatagtaaaaggat

SEQ ID NO: 81638 - DNA, 1834 bp, Homo sapiens
tagcccggagccaaggcccaggcccggggcgggcacctgaactgctggacccttcactgaaccccacgggttcccgcgacggctggtggagggaggacagtcaccgcttcccctcccacctcgaggtgcgctaatgcatgagaaagttcccctcgggtgtttccacattcgccttaacttttaaacaccaacgtctggaatcaggggtcctccagactccgaaacacaccctaggaaacaacccagaacgagacacatcccctgtgcgcgcgccacgacttccggcaagaacgcccccggaggcgtggctcttcgattgcttcggcctggcggtcgagctgcgcgcgcactcggcggctgcgattggtgctgcctggcggcggggcgcggggcacgctgggacgtctcgctggcgggaggccacgggctttccacagcgcgggggaacgggaggctgcaggatggtcaagctgacggcggagctgatcgagcaggcggcgcagtacaccaacgcggtgcgcgaccgggagctggacctccggggtgagtccgggggcgtgggcggccagtccccaggcggcaccgagccgccttattttccgcgctttgccgcgtgcaccgaaggccggagcttggcccgcgggccggttgtctgggctccgaccgggctgcgcagggaacgccgggcctgattcttgccgttgttgccagatgagcatccggttaagctcctgggagccttctgttagcgccgtgcctcttgacaggcacgggtgacttcattacttcctggtgcgtcctcgtggggccctgttaggccttgcttggctgtttcgccgctggctgtttgagggcccggaagagcggctcattaatggttgtaacgcaagtgcagggcgcgggattggttcttaatacttgccgccagatgatattttgagcgtagataggatatgtgttcattattcctaatgtgagggaggaaactaagtccccgaacaaccgcgattgtttcctccagtattttctacttagtagctttaattgtctggcgtttcccctatatgaagacgttttaaaaattgaactgtgtcacccaggcttgcaccgccgggtgctgtgtgtaagttgtggaagcgctcgcaattattcagattcctgtactatttcaaccttagcaagacttggtaagatactgggagggcagctagctagttggcatttcaggagacggctttaaaagggacgtgatagagcaacttctctgaggataagaccatgctgtcgtagcctgagatttgttcccatggggacctatggcctcggagcagcatcgctgcgggatctgcttagatttcttgccgacctttgggaaatcccactgttttgtgttgtgttgtgttgagatggagtctcgctctttccgccccagctggagcgcagtggcgtgatctcggctcactgcaaccgccgcctccccggttcaggtgattcctgtgtctcaagcctcccgagtagctgggaatacaggcatgcgccaccacgcccggctaattttttgtatttttagtaaagacatggtttctccatgttggtcaggctggtctcgaactcccgacctcaggtgatccgcccgccttggtctcccgaagtgctgggattacaggcttgagccactgcgcccggcccaactcaccacttttgatgatctctgccatttctctttatggagcatgtgcagtgttgagaatacgtattttgatgcagtacgtgtagtacagctctgaattgtgtcctttaactttgggtaagttctttttttagtagaccttgc

SEQ ID NO: 81639 - DNA, 2229 bp, Homo sapiens
tcaggtggttctcctgctttagcctcccgagtagcttggattacaggtgcccaccaccatgcccagctaatttttatattattagtagagacggggtttcaccatgttggttagactggtctcaagctcctgacctcaggtgatccacccacctcggcctcccaaagtgctgggattacaggcatgaggcaccgcgcccggccttgaaacaatcttcacaggcaccgaagactgacctttccctcttttgcctttcctgatgcggggccccagctgacgagacattctgcgagatggtgaagtccaaccggctgtgcgaacggaagctcttcattcagttctgctgccgcacgtgcctcctggccgggtaagggtgcctagctgcccacagagggcaggcactcccatccatccatccgtccaccttcctccagactgtcggccagagtctgtttcaggagcggcgccctgcacctgacagctttatctccccaggagcagcatctctgagcacccaagccaggtgggtggtggctcttaaggaggtgttcctaaaatggtgatatcctctcaaatgctgcttgttggctccagtcttccgacaaactaacaggaacaaaatgaattctgggaatccacagctctggctttggagcagcttctgggaccataagtttactgaatcttcaagaccaaagcagaaaagaaaggcgcttggcatcacacatcactcttctccccgtgcttttctgcggctgtgtagtaaatctccccggcccagctggcgaaccctgggccatcctcacatgtgacaaagggccagcagtctacctgctcgttgcctgccactgagcagtctggggacggtttggtcagactataaataagataggtttgagggcataaaatgtatgaccactggggccggagtatctatttctacatagtcagctacttctgaaactgcagcagtggcttagaaagtccaattccaaagccagaccagaagattctatcccccgcagcgctctcctttgagcaagccgagctctccttgttaccgtgttctgtctgtgtcttcaggagtctcatggcctgaacgaccacctcgacctgatgcagagccttctgaggagaggcaacaggaggcattctgtggccagccaaaaggtaccccgatggccaagcaattcctctgaacaaaatgtaaagccagccatgcattgttaatcatccatcacttcccattttatggaattgcttttaaaatacatttggcctctgcccttcagaagactcgtttttaaggtggaaactcctgtgtctgtgtatattacaagcctacatgacacagttggatttattctgccaaacctgtgtaggcattttataagctacatgttctaatttttaccgatgttaattattttgacaaatatttcatatattttcattgaaatgcacagatctgcttgatcaattcccttgaatagggaagtaacatttgccttaaattttttcgacctcgtctttctccatattgtcctgctcccctgtttgacgacagtgcatttgccttgtcacctgtgagctggagagaacccagatgttgtttattgaatctacaactctgaaagagaaatcaatgaagcaagtacaatgttaaccctaaattaataaaagagttaacatcccatggcacaggagcctgtatttctttccacggcacacaaaatgaaacatgagtgctgaccaagtgttaagtggacgttactttaactgtggtttcagatctgtttgatgtcattacgtggaaggtcttcttttgagctttagcaaatgttgatgtaaggaagcaatggaggaaatcccagatcccaaccccagaatgtcactgggcaaagagaccccttcagaccacgttagcctcactgggaggaggttctagagcctctccagatgtaggggccccttccatctgtcacgggggagctccccagagcccagactgcctcttcaccggttgctgccaagtgtgattgaattaggttacagcttgtcttctatgcagtggctgaaatccctgaacccatggctgatgcactccttgggatgtttaccatggcctctctgtgaagtcagaagcttgtacttgctaggaatcctttggctgcaagtaaaggaaacgcaccaactagaaatgacttaggtgaaaacaagagtgggtga

SEQ ID NO: 81640 - DNA, 1007 bp, Homo sapiens
ctgtaatttctcctccaggaaagactatgccatcggcttctctgtaacacaggatgtgtgcgctgggcgtgggtcagggtacatgggattggtggtcagagctgggggagagccctcctcggcagagctgcggagatgaaattgggagtcagatgtgggcggaaggtttgcagacctccagacatgaaaaggagctgctgaccaacgtcagttgggctcggaagggatgggtttgtctttgccgggcatttcacaggtggcaaccgcacccctgaacactagacaggcagtgttttcctcgtcctacagatggggaatcaaagctgagcaggggcaaaggccacaactagtcatgatggaggtgggactcggactcagagccgcaaggccaggtgtcttgctgtcccaggagggtgggggctggacaggagttgtaggcccaagaccccatgccatgttttcgtaattcgcctcgccctgggagacacaaaagcagggcttgggttaaattgacaggggatagttctcaaacacattaaagaagctaccgtttggcactcgtggtcttccaggtagcaggcctccccacggccctcctctctgggcccttactgctcaggatgggtcattgatccggcctgtcatggcactgccgttacccctgtggacaagacccagcaaatcttaaaagacgtataaagccatcaaataacaagacaccccctttttttttttttttcgagatggagtctcactgtctcccaggctggagtgcagtggcatgatctcagctcactgcaccctctgccccttgggttcaaggaattctcctaccacagcctcccgagtagctgggcttacaggcatgcgccatcacgcccggctaatttttttgtatttttagtagagatggggtttcaccatgttggtcaggctggtctgaaactcctgacctcaaatgatccatctgccttggcctcccaaagtgctgggattacaggtgtgag

SEQ ID NO: 81641 - DNA, 1011 bp, Homo sapiens
atggaggggctaaggatacaactggaaagtcactgagtggtgagccacagggctgcgggacatgcattacctgctggtcttgacactccccaggctgaagtggacgcagttcaagcactggtctgcattggggccatcacagcctttgtcaccacactccggatggcacacaccttaaagaaacaagcattgcctttcatccagagagacgccttctccatctactgcagtcccgcggatccctgtgtcaggatatcgcagcttggcagggttgggagacgctcccaggccccgctggggctggacggccagacgacaaggcgggagcagccgtccctgcgggtaacaggcacagctgagcctcgctgggctccagtgtcagtctgagcactctagacagggatggcatgagaaggagtgaaacatccagggtgggtacgccacccggagcagggaggagatgggacttgtgagagcctggaggggtagcggggagggagaggctggaacagctgtttcattcactcacttgcaccagtcatcatgctgggaccagccagcacctttgacttccacgtggaggacagagcaacacaagagggggtgctgagtgtcaggggagctgctggcaagctgatgagccaggaggaattaggtagcccccccgcaactcgctgtggtgggaatggggatggatctccgcatgctcaggaccgcctggtggggctgttgctggccaggtctagggtggggcagggacacagctagacagtgctgtcctagggttggggggctgctgttttctgtgctgagggctgagcccctttcagaacatcccctttaggctttccttggagcccttggtgggacggcagctgtgtcttccctcaagttcccaggggtccccagcttctcactccggaggctggtgtgttgttggaaaaacaactgagaactgcaggcgagctgagtagacgccagcaaacctcaccctctaggtccttcccaggt

SEQ ID NO: 81642 - DNA, 1040 bp, Homo sapiens
cagcaaggtggatttaatttaagaacgcttcatgggcgagaggaacctggatatttggcttttaaacacaattcaagtggacagccatactggggaggtttgtttacagatattcatctaggcatctccacccttggatgggcatcgtcttaacctgaccggtgggtgacctcagtgcagtgtgggggccctgcagctctgttgaatagcccccaaccttgcactgggctccttgcaaaattatgaataagctttccactgcagagagacccaggaacaggggtggggggtgtgaagtccatacacccggaccagcagctgggagcactgcttcaggaccctccccaaggctgtcctcctccgaggacatcctagaacattctgtctggagatggtgaggacatctgcactttccctgttcctagccaccctcctctcatccgctcagcaaatagtgattgagcacctgctctgtgcctaatgccaggaatctagcagtgaacacaccgaaccaagccctgcccgcccgtctcccattccgtgtctagaaagagtgaaaagattggtctgccgcctccctgtcgcactcctgccctcatcttcttaagatgaaggaaattgttcactttatcaagcaagacagacctgctgcctcctcagggagaagacgctgcaggaaaaggcaggagagaagtcctcaagtcaccacgacagccccgcgttcgctgggccagctgcgagggtgggaaggcgagagcccagtggctgagctggagttttgggctcaatgggtaatttaaagcaatggtgcgagaaatgaggattttggaggctgtcctcatagatgacccaggatgaggtgggcaaagaatccaatcagatgggaattgatccaaaatattatagtaaaccctctggagctggggggaggagtttagtaatgagttttagaaatggtgagtggcatctggaacccaggataccagcaccgcccaggaacagcatctagagtgtcctcgtggatacacacagctctgaaa

SEQ ID NO: 81643 - DNA, 1051 bp, Homo sapiens
aggatcgcttgagctcaggagtttgagaccagcctgagaaacatagtgaaactctatctctaccaaaaatacaaaaagtagccgggcgtggtggtgcacacctgtagtcctagccacttgggatgctgaggtgggaggatggcttgagcctgggaagttggggctgcagtgagccatgatcgtaccactgtactccagcctaggcaacagagtgagaccctgtctaaatacacacatacacacatacacacacacacacataaagtcaaacagagagtgtaataataatgaagtctctcttccattccagtccagcctcctcccatgaggctgcctgtctgctgggtccctgggaattcttcctgctctctttttccacacagtgcacaccactgaccctgagtgtggagcagcccctcttgtttgtcccaccaaaactatatctgaaaataaaaatccagttttggtgaccaggccttttgtgggtgtttttggagacatcctctataattgaaataaacttcaactcaaatgatagcctctagagcccttggtccctgtcctaccatcatcacaaccccagccaatctcagtgcaccacttggtggttaaagtgctcggattcctttgtggtcggaatgtggctgtaactggaccctaaggagctgaggagagtcagaggttcctcaccaggcttgttttctgcacctgcagtggtgagaacaacttcctgtgtcactgctgcagcggtgagaacaacttcctgtgtcactgctgcagcggtgagaacaacttcctgtgtcactgctgcagcggtgagaacaacttcctgtgtcactgctgcagcggtgagaacaacttcctgtgtcactgctgcagcggtgagaacaacttcctgtgtcactgctgcagcggtgagaacaacttcctgtgtcactgctgcagcggtgagaacaacttcctgtgtcactgctgcagcggtgagaacaacttcctgtgtcactgctgcagcggtgagaacaacttcctgtgtcgctgtcaccacacacgt

SEQ ID NO: 81644 - DNA, 1042 bp, Homo sapiens
agtgaaaaaagcatttaagtactagaaaggggagataggccaggtgcagtggctcatgcctgtaatcccagcactttgggaggcacgcggatcacaaggtcaagagaccaagaccatcctggcaaacattctgaaaccccatctctactaaaaatacaaaaattagccgggcatggtggcgggcgcctgtagtcccagctactcaggaggctgaggcaggagaatggcgtgaacccaggaggcggagcttgcagtgagctgagatggtgccactgcactccagccgggcaacagagcgagacaccatctaaaaaaaaaaaaagagagagagagataaatgtctcccagattaccattgtctaaacctaaccttaggtcaagtgtcacaaatcgcacctattagaaaaggaaaggtctcttttggaggcacatgcaggaaggggttgctttggtcccactgcttcttccctgctggcgtttttggagctcccagctctcagctccgcaggttgttagctcagtcagtgcctggcccctcataggctgtcatgagtatcttgcagatcgagagaaagaacaaaaatacaaaccatgtgtgagcaaaacaccatttcattccactggcccttgttacaaatgcagctaagatctgcttctatgcatcttagacgtctcatcccttgttcctagcaaatatctttggtaaatttacaagtttataaattgcttttaattttatcaaatcagaaatttgtcttgctcttaattatatgaaaaggatgctccgtttctcatataatgagagaaatgcgacgttaacctttctgagttatcggattggcaatgtaagccatagctgcaggctgcaagggagcccgttccttttgacgtgtgacatgtgacgtgtgacgagttttacgtctagtaatgtagcctacaggtacacatgcacacagctgaaatgacgtgtgcagtaggtttcccttaatggacagctcctgcgtgccagtctctattctaagtgctttaccatcatgaagtc

SEQ ID NO: 81645 - DNA, 1038 bp, Homo sapiens
ctatactgtgttatagccttaaaatgtagagtgcttacagatcactaagaaatatttaaataatatcactaaataggccaaaatcctgaaaagcaattcgtaaagaaaacatacaaataaccagtaaacacaagatagtcaacatttgtagtatccaaataaaatataaactaaaggccaggtgcgttgtctcacgcctataatcccagcactttgagaggccaaggcaggtggatcacgaggtcaggagttggagaccagtctggccaacgtggtgaaaccctatctctataaaaatacaaaaattagccgggcatggtggcgtgcacctgtagtctcagctactcgggaggctgaggcaggagaattgcttgaaccagggaggtggaggttgcagtgagccgagattgtgccactgcactccagcctgggcaacagagactccgtctcagaaaaaataaaaataaaaaaaataaacgaaaacacaagaaggcaaaatcatgatagaaagccaacaagcagcagttgcagagatggtagaacaaatgtgtgaaacgaatctgtatggcactctgcactcggggccacagagtgatgtgatttaaagaacgggaatgcaggggcagaggagcctgggtcccacgctggctgcaccggtgacgggctgggagacctgggactgatgactccctcatcagcgtcttaccagcacctggtggacatgaaatttctcacgcagcctgtgtaggttgtcacagaagcccaggctcctctcccctctccctacctgccactgcaagtgtgtgttttaccacagcctttaggaattggtccatttgctctctgggaaaattccagcctggagaagctggtagagacctgcctccatgcctctgaggaaaatcaaattggctgcgacctctacagaacccaggaatttggaattcactgaatccagggttgctgcgctggaggcaaagctgggctgctattgggttggctggccctaagggaaaactcttctgacttttgaactca

SEQ ID NO: 81646 - DNA, 1051 bp, Homo sapiens
ccttggaaatccaagatctgccatcccaggtccgcaacccggagaagcaaggtcagtggctcttgggaatctcatgacagcttttgtatctcaagcctctttttacctctgggccttatttaactacggagtctctgataattctttgttttgtgttttagaggtagaattcccataacagaaaattcaccattttaattatttttaagtggacagttcagtggcttttagtacatccacgatgtcatgtaaacgtcagcactatctaattccagaatgttttcatccccacaaaaagaaaccccatacccatgaagcagccactccccattccctcctcccctcccagctcctggcaacctctaatccacttaccatttctttggatttgcctctcctggacatttcatatagatgaaataatacaacacctggccttttgtgtctggcttctttcacttagcatgatgttttcaaagtttttcaatattgtcgtatgcatcaaaacgtcattactcgtatggctaaacgatattccattgtacggattgatcacattttgtttattcattcacctgtgatggacatttgggttgtttctaccttttagctgttacaaatagtacagctatgaggattcatgtacaagtttttatgtggacctatgtttttgtttctcgtgggcgtatacctaagattggaattgtcaggtcatatggtaactctatgttgaacgttttgaggaacagccaaactgtcttccacattggctgcacccttttacattccggccagcaatatatgagaggtccagctccttcacattctcgttaacacttaatattctctgctttttaaaaaattataagcgttctagtaggtgtgaagtggtatctgtggttcttcaattgcctgatgatgcaccttgatgcacaaaagttttaaattatgatgaaattcaatttattttttcttctgttgcttgtgctcttggtgtcatacctgagaaaccattgcctaacccaaagtcacagagatttactcctgtgtt

SEQ ID NO: 81647 - DNA, 1034 bp, Homo sapiens
taaagcttgggagaaggcaatgaaggaagtcagcatctctagatcaatttatggtgcatgcaaagcgtgttttcaaatacttacagagtctccgagggaattacatcactgtttataactgttttgattgttttttatgactcagggcccagtagagccaagcagtgtaactcctgagaggctctgagcagaacgcctcatgcctcccgggaggagagtccaggcataatgggaaaagcgctccccgtaataagccaagcaccggtcgtgtggtggggagttattaatgtgctgctgggcggcggtgggtctgcactgaagaatgccatgtttcttcagctgcagatcactggggtgggtcgggggctgagttcaaagaggcatgaaccctaatggcctggaattggcaggatggtccagcctggacacagaaacagccttggggtacagattttggatctgcttggtctggggagtctgcttggtctggggagtgtgtcagaaaattctagcaggaaggagtcttgaatgattgaggctttgtttttaccctcagactccatcccatatggtaaagctgccctgagtttgtaaagggaaccatcgtccatttccatgacagggcaggaaagtgaggggaccctgctttctgcaggagatttgggagcacacaagcttggcaccctcgatcagcatgagagggcagcctccgaactccgagctgtgtccttgactgtgggtccacgcgagcttccattcgaggcagcgaggcctggaggcggaggcagtgaggcctggaggcagaggcgtgggctctggggccccaaatcccagctcctccccgcattagctacaccttgggtacagtccttaatttccctctggattaaatgggttaatccttggaaattctcaggccagtgccttatgctcagtgcacagtcagcttgggaaatgtttgctgattgctgttatttagcattgtgacttctattttcaatgctagtcttcggaacaaagtagtgggatttttt

SEQ ID NO: 81648 - DNA, 1054 bp, Homo sapiens
ttcactcccgttagcgggtctgtgaaagggtttcctggatgaccttctgctgtaatgggcctcagttctttagcctctcctccccaagccaggtgccagcacagcagctggcaggatgctgctggctcctgattctggagggtctctcaacatggccctagaacattcatgggcccagtgaggaacaaagcaagtgcgttgtgcaaggatccaggttggtccaggaagccaacctggggagagggcttcaaggagggagtgagaaatactgacatggagtagcttcccaggtagaacaggaaaagtggagagcttgaggcggagggtttcagcctgtggcccgtcttcctgcttcccctggcactcggttacttgaaaatatttatttttgctattagatagtattatgcattggaaaaaaaaataggaggaggccaacatatctgtggtctggagttcctagggagtcagcagggtggctactgttggtgggccttcgcctcctcaggagaagggagcgggtggagagcatttgggatgaatggagaacatctgaagtaccagagtaattaacgttgaaatgtggctgcgtggcacgtggcatttgctgtcattagagatcttttccaagtctggccgtctccctggcttcaacaacgcacggtctccaggcaggttttgcgggatcatttaactccgtggactcccttagcgtcctcggaagatggctttatgtacatagaccacagtttcagaagttaatagcagaagacacttttcagttactttggggactttaagatctttctaaatcagttttcatcattaaagtacaatgtaggtgtattcacgtgacagtgataatctctgcacattgtttaacttgaaagataaattacttggcagtcgacttgcattttcagcgttaccttagaaataactgtagggtggagaaccacttctgtttttttcattgactgttctactttctgtcttggagttaattttttaaagtgatgacttttgatagatggcttccttattttcttcctgg

SEQ ID NO: 81649 - DNA, 1099 bp, Homo sapiens
tttagctggtacttgtggctggaatgattctcagtgtggtcagaaatcatccatcctgtgggtatgggatagagcggagctgcaggaatctgccctgactggctgctgtctttcaaagacttgctttcatgtgtacgttcttaacaatgaacaccggtgcacagctgggcatggcggcacacttctataggcacagctactctgaaggctaaggcaggaggatcacctgagcccgggagttccagaccagcctgggtaacgtagcaagacccctgtctcaaaaaaaaaaaaacaaaaaacaaaaaaacggaaagaaaacctacacacaaatgaggccctggccttggctagtgatataaatcagaccaccctgatacttacccactgcagagaccacagggagctctgacaggacacccacaagctgctaccagcttcctggacgtaaccctttccacctattctgtcttcacgcagagttcatggtcctatccctctttgcaaatttagctctctctgcaagaagggtacctcttcaagtatgttttccagaaaaatcattcttttccccaccagaccagctctttcaacccagaaaaattaaagttgtaaattcttccatcatctgtaatctcagtgtcatttgcagcactgctagctctctttgatcctaggccattgcgatggaaatgacaggcatggctctggaatagagcagcttgtgttgggacccttgattttcctgtgaagaacagaggagtctttctggccccttcccctcgtatgatcctgtgattctgcaattttaaggctgctgctacaggcaaaggcacaccattaaaatccaaacagagcccccaaaaccatgctctcagcagcatccagatggtctgaatgcaaccttcttatccctttgaaggaacatttgggagatgggactctaggttcggggggagacccaccctacgaggttctgctgcggggctaagccttgttcctcttgtccctccagggccggcagggcctgggctccattttcgtctgggcatctgggaatggcgggagagagggggactactgctcgtgcgatggctacacc

SEQ ID NO: 81650 - DNA, 1084 bp, Homo sapiens
tacccacctgtccctccgagtttagtactcacccagacactaaatgtgagaaggaaaattaaggaagaggggcggtgtagacacacacacgcacgcacacagcatggggtcttgcgggcatccttgggacactggacagcttcctttatctccattcccccaagaaaacaccgaggcagcttcaatgaggctgctgagcacctaagccaggcccaaggctgggctgagtgagtgctggcacactcgggtatgaccaagtcagctgctgcccaccaagaactgccgaatacataaatcacccttccattacttagctcccagctccaacccactagatcgcttggatctcagtcttgatgacaagcgagacatcctaaaaattaagctgaatttaagcttcggagagggtgggtaagctggagggcgggtttcctgcatagaacatattgctttggatggtgttcctgctgagcgtctgtcatttctacgggatgatttccaaagatggagctcctaggatgaggcaccctccgtccaggaggggtcctggttgtttggcagtgatcgttcgggctctctggttcactgagcctatgggaggcttggggaggttggagctgcagagagggatctttgcattcggaattctgagcagtgttggtttcatccagctgtcaggggagtggggaagttgcagaggggaccacgtggtttcccctcattcttgtcacagttttgtgaaatactgaggtcatttgattttttttcgtcatttggaagtaaaatatgtcatacagagaaccttaaatcgcaactgtctcgatctgtcactgaaaatcctcctagaaatttgatgatctcaaaccaaaccacattcccccatctgcttttcctccttgtggccctatttgtcgcctacagtcttctgtaaaatctgactttatctttggtagatgatgtggcccggcggtgagagactgtagaagctgtaacttggcacaaagatctgtttaacgttggtccttaggaagcctggctcctctcacacctagttattcagaagggaccattagacattgctgtg

SEQ ID NO: 81651 - DNA, 1050 bp, Homo sapiens
actcgggaggctgaggcaggagaatcacttgaacccgggaggtggagcttgcagtgagccgagattgcaccactgccctccagcctgggtgacagagtgagactctgtctcaaaataataataataaataataataataataataataggtcttgttttttaaaataaaaaacagaaatatgcatttttagataccagcaggacatcatagcactgagggaagctgaaccctctctttgggacgtagcttgctttcttttgttgccctggcctgagttctttcacatcagccagcatggagaagaggagccagttttgcagaatgactgggaacagcccctgctggggagggactctgtgatgcggtgtcctcatccgagcctcctgggcccgggttcccgtcgctgtgtgcccggagcctgggcgccgacaccgagcctcctctgtgctttcaggcatccgcatgctggacggcgatgtcacagatgtggtcgaggcaaagtcgctgggcatcagacccaactacatcgacatttacagtgccagctgggggccggacgacgacggcaagacggtggacgggcccggccgactggctaagcaggctttcgagtatggcattaaaaaggtgtgagtaaccagggctacaggggagcgctctgggacaagggtgacagtaaacattttaacaagtatcagagtgacactggccacagccctgaaacaagacagggaagactctgctgtgacaggtgccagggccagtgtggaggagtcactcggggagtctgagaagtggctcttgaccggcgagagcagaagtgtttttgcctcgttccagaacagctgttccagtgacagccaggtggccactgctagcacgaccctctctgccttggagtttgcccatccctggctgaagggggtacacaggtgggtgacgggggtctaaggcagctcacctggcctgttacttggactctgcaggggcctcggcccacctgcccttagaaacacccagctgtggaactctgtgcattcatcgcgggg

SEQ ID NO: 81652 - DNA, 1027 bp, Homo sapiens
acgcccacgtggctgacactgccgaatgtctctagcactgttgttgaacttctgatgtctcctatgcctcaaccttgctattgccttggtgtaaatttctctgacattgattttgaatacaattccaggcttttggagcagaagtttccagttaagcttggtgtcccacctaagtgttaaggtcaacatgccgagccctagagtggtcctccctctcccaccaccaactatcctacctggcctcccaagaactgcctttggtgactcttgtattctctgtcttgcttcatgcctgggaaatttcagggcatatattaaggggaaaaccttagggaaacctgaaccttcaaaactgggtagaatgaatggatggaatggaagaatttactgcagcgaaatcatcttcaaattccttttaggttggaagcttcttaccctggcaagtgaagaagtacatttggttatatgtttataatccatgtgctactgggtgaaagatgataggacaagaacatttgaaatgtatgtgttagggatctctgcccagcagtttccatcaaaagagcacacccatgattatcgtacaaatggatgggacagcaggattctactcacgtaaaatgtttgtccctgagcacctagggagggtgtcacctccagggtctccttcctgttgctcttctgcatgagtcctgcaccacctcttttaacctcagggaaaacttcactattttgttttttaaagtcagtcatatttaaagttgctgcttttgagtatgcactacgtgttgatgtagattctggaatgtagaacaaacaggcgcagactagtatgggtaaggtggggaacccctacttcagaaggtgaaccccagaaggaagctgcctgggccaggggtgtgtgcatgatggcagggagctgcagccactaagccttggaagagtctttaatggcacagggaaatgccctgtataaagctcagtgggggaaaaaaaggatttagaaagaaagtatatgccagaggca

SEQ ID NO: 81653 - DNA, 1110 bp, Homo sapiens
ccctgaatgtagtgcagactcctcgagagcacggccctggcgcccatccttatcccacccatgtcaggccccagagccaggctgaaccccagctttgagcattattcaatcaggtggagctgccgtggtaagaccaaagaaaacattcccactcagggtccaagaagtctttaccccaagatccttttaaaatgaaaaagtttttccagcttgaaaagaatgtgtacacgggatgataagagcaggagtgctccaggcactggtctgagggctttatatgtgttgtttcttatattaaccctgtggcaacccatgactgtccccactgtgtgggtggacaccaccctgaggccatggatgtccactgtcagctccaagtcacacagctggtgagcacggggctgggttttattgcaggtggcctggtgccttgatccttggtcttaaatatcagtgatacagccttgtgaacttttttccttgatcgtgaaaacaaatcatgctgattgaaagacatttatgacatcctgaaagtaattgtaaaattttaaattagcaataatgtcaccacccaggaactgatgctactactattttgctgtattcctttctagatttttctctgtgcatgttttggtaccatattgctggtggctgccaaatattccaatatatggcttaccatatttacttatgtccttactgtaaagcaaattccaataccagttaaccaaacactttcttcattcactgctttcccatgtgtgtatttcctttttcttcaggacaaggatcaccagataatttatcggcaatttcacaaggctggcttccttccttctctccctctctccctcccttccttcttgtctttctgtctctctctctctctgtctttttttttttttgacagggtcttgctgtgttgcccagactggagtgcagtggcaccaatcatggctcactgcagccttgacttcccaggctcaagcaatcctttcacctcagtctcctgaggagctgggactacaggcatgcgccatcatgcccagctagatttttttttttttttttttggagaggtggggtttcaccatgttgcccaggctg

SEQ ID NO: 81654 - DNA, 1022 bp, Homo sapiens
aagtgggagggatttcatgctctctttggtgacactggctcatgagtgaaagtttcaaaacaccctcccctgtcgcttgtcacacctgggaatgatatgtcagcaagcttctggcccacctgtggcccacagggaagaagacagggccaaggctgcccatggctgctcgctgaaaggatgcttggacaaggatcacaactcggtggcatggacagcctgcagcatggcaagccatttactggaacgcgggcagggccccctcctgggtctctgcttgtttatgttaccctttaggaacatccttagattttacctcgtcttatcaacagagggacagtcaacggatgcctcattttaacttggcttctcgagaaggaagctggaggaagcacacactacaaaagaaagtgttgctgcgcacctgtcttgagaagacgatgaagccttcttcatgattagaactccctgccccagagcgtagcttatctataactgtgctgcatgtttagcaggaaacatacatttggaaaatagagaaaaggataaaaaggtcagagtgaagttctatcttcaaagtatgacgttaaagaaatcctggcactttctacagatttgcagagaaagacggtttctgtttgggctagaagtggcatttggcaaaccttgcctttgccccaaatcacttatagttgattttccacaagaaaagtcaacagatgtcatctagcagtcatttagacctaatcacattttctttctttctttctttctttctttttttttttgagacagagtctcactctgtcacccaggctggagtgcaatggtgcaatctctgctcactgcaacctgtgagggttgcttccattcgatgggagggctggagttttagtcgcttggtttggggctggtgacacacctctgacctccacagagtgtccaggtggctcctggtttcaccccgagggggcattgaaggcagagctttgcatcccagctggggatgggagggggaggcactt

SEQ ID NO: 81655 - DNA, 1039 bp, Homo sapiens
attttaggtgtgttaaaagtcctatattcagtttgggtctgagggcaaagcattcccaggcattagttgtctcctcgaagtcagcagaaggaaggatagagacttcctaggcaaaggctaacgtagcagttaaattttttcaaataaaaatctccttctcacagagcttcttaataagctcctggcaaggcttctatcaatgcatcctgccagtaaagaagaaaggaagaaaggtaaacagcctgggcatcccaggccttcctggaacgttcctaggattggctgattgtttctcatagttctaattaaattgttagccccagggaaagcacacagacatctgaaccgattatgaattcagaatcgcaactgaaatacctctgtttaaatttgtctagctttaatgcaaaccaaatcaattagctgtcagtctgactaatatttactccacccagtcattacaattaaacacttggtgaaattagctgttttatggaagtatttagtgttatcttttattgcagtgcatcagaacgtttccctacgttggcaaagcatttttatgataccttcacatctggagagttgtgtaattaatattattaacaaaaggaaaagatgatttaatattattcagagacttcggaatgcgaggctgccattgtgttcaaatgaccaaactggaaatgaatgttatggggcttaggataaagttccatcaaatgcagacggtatcttattttaattagttccagtccctattgtataggagtgctttgataagtgatggaatgtacagtccaccccatgtcacataaaagcagatagaatgtacatttgggaaagcaaaacaaaactcaagggggtgtcagcagcaggactctgttaagcacgtgtgtgcacgcacacttattaggcatcttcttcgcactgatcctgtaccggaatggtacagtcattttccttgcattcttaattacctttacttgatgtttttcttaccgtctttgaaaagggccattttgctcagattgctttg

SEQ ID NO: 81656 - DNA, 1084 bp, Homo sapiens
gagaactgtgggaaaaccaaggacctacctggtatgtttcagagtcatttgtttatgaaccttacataaacacacacacctggatatgtatatacacgtgtatatgcacagatacacacacacgcctgaatacatatgcagttggctgtctttatccacgggttccacatctacacattcaaccaacctcaggtcaaaaacatgaaaaaaaaatgtatggtggatgtagaaactattttcttgtcatttttccttaaacaatatggtataacaactatttccacagcatttacattgtattaggtattataagtagtctaaagatgatttaaagtattggaggatgtgtgtaggttgtatgcaaatatgatgccattttatatcagggacttgagcatctgtggattttggcatctgcagggtggcctggaaccagccccccacggatgccaaggcatgactgtatacatatatatacatctgtatacaaacacttgcacatccatatacatatgcacacacacacaccggcatacgtatatacacgtgtatacaacactcacacattctatacatccacacatatgcacacacactcgtatacagacataatggaataatatgtacctgaaacataatataggcctcccatgatttccttattgaaatgaaggaaagtgcacacatgctgagggtactggttctctgggaaagaacctgccgcaaaggacaaggaccaaggtgcctgaaattccccatggtaactaacaatcttaaccatgccgagaggcagaaggttcaacggtgaagaatcctgactgttcattgactaaatgaatcttgaacagtttcactgctctgtgcctcagtttccccatcagtcagatgaggatggtcataacatctactccctacagttgttatgaaaatgaagcttattaattcatctgaactccaagcttgctgcctggaatggggcatgtgcccagcaagcgtcagctgttgtaatgagccaggggcactcggtaatagtgaggatccctggctgggggacaggtgaaggagggggaattgctgttcccca

SEQ ID NO: 81657 - DNA, 1330 bp, Homo sapiens
gcatctgatcaggcttgccctctttttcatcttggagcctctccccaggtcctgcgagtcaagtacactgagtagcctctgtccccttgcttaggtgatcactctggtatgcccgccgctggcccctactacccaggatcccgcagttcccgtggagagtgggaacctggtgctgtgggagcatcccttgtcaccggcgggatagagcggacagcctccatggacttctttaggaggacgctgaccctcccccaggcattttcctaaccccttggtgaggagaccagctccaggcctccccagggagtataggccaggtggcttaacagggtgtcacgcagtagatccctccagcctcccatttccctgcattcccagcagaccagcagcagctacatttgggaccttgttagaaatgaaaatccttggaccccaccacagcctgctcgatcacagactccgggagagggcccaacaatctggctttaataaaccgtctggggctggagaaccacagctctgcaggatgtcccggaggtccagcatactgacctcatcagcgattggtttttattaattctagacttggattagccaatcttgtagactatacacacccctcgatgttcaaggttcacattaaatgaccaaattgtgagggaaccaccttgtccacacgtgtgggtacatatgacctacttgcatttcgtcccgcttggagcccacctcccaggctcctgcccccacacagtggacatctccttctgacgcagttcctgtgccttggggtctgccttgttttatgggcccaggtggcgcaggatgtgggtgagtctgtggagaaagggcaccagcttgcaaggcagcagccccaggagcagcctgggaaggctttgtgcagaggaggcctgtttcctcctacgtgttgggagagttgtctctgcagatggtgggtgagagttcgctgccaaaaccactgtcttccctgccctgcggacacttcttcctcaccttcctaaaactgtaagagacctggagccgttgagcatcaatgactctttgactcaggaatcttaaaaaatcacaccctggggctaccatgggggccttctggttctccttgtgtattactagttgaatgtttatagctttcaatttctttttccccttctatatgctctctaaggacataggaagaatctacctgacctcacagctttggtaggcactgttattgccacaccctcttctcccagtgggcaccccacaccccaactccccggcacgttgttcagtgggactgccagtatcatgtataatcatgaatgct

SEQ ID NO: 81658 - DNA, 1064 bp, Homo sapiens
ttagatttgtttcagaggcttagacaactttatgtatcatgactttgataatctaagaccctcacaaccattcattcattcattcattcattatttatttatttatttacttatttatttgagacatgagtctcactctgtcactcagggtggagtgcaatggtgcgatctcagcttaccgcaacctctgcctcccaggttcaaggaattctgcctcagcctctctattagctaggattacaggcgcacgccaccacctccagctaatttttatatttttaatagagatggggtttcaccatgttggccaggctggtcttgaactcctgacctcaggtgatccacccacctcggcctacaaccattcattttagcacaagatgcaaaagcctgtctgtgggaatagatgctttctcttccccatggagttctgtgaactcattagtactttctaggatttttgtttgcttgcctgctttttcaaggaatttgctattctaccttgttctgatatttggtcaaatcagaaaacgttagaaaaccaaattgattctttcttacactaaataatcttaaaatccaaatgaaggctaggcatggtggcttatgcttgtaatcccaacactttgggaggccgaggtgggaggatcctctgagcccagaagttcgaggctgtagtgagctatgatcatgccactgtactccagcctggatgacagagtgagacactgtctctacaaaaaataaaaaaattagccagtcatggtggcatgtgcctatagtcccagctactcaggaggctgaggccagaggattgcttgagcctgggaggtcagggctatgcagtgagctatgatcatgccactgcactccagcctgggtgacagagcgagactctgtctctagaaaagaaaagaaaacaaaacaaaaaccaatccaaatgaaacctcagaggtaggtatggacacattagctctgggagactgtcaatacaaggctcacattgagggaccagaactaacagacccacactatcacaagccaggtcttaacagccttccttt

SEQ ID NO: 81659 - DNA, 1987 bp, Homo sapiens
ttcactaacagtgggacgtcttgggaatcttcccatgctcgtacatagagacctacctcattctttttaaatagttttatggcattttagagatgcaacatgttttgttataccacacctgtgaatgttcctttgatttgcctccagtttttttctgttataagcagtgttgcagtggttatccttattcatgactctgcacttgtgagaatttctgtaggatccataagaacaaaacaaatactagttataataataaatggtgattgctggcccttactgtgtaccaagtaacttttcatgtgctttccttgtattgactcatttaatcttagaaactctatggggtaggtgttattattaccctcattttacagatgtggaaacaaaagcacagagaggttaagtaactttttcccagttacacaacttgtaggtgccagagccaagatttgaacccgaatagtctgactccagagaggggacctgctgagtcaatgtatgtgtgcaagttacattgtgttagatgttggccatggctctcccaacagatagtgccagttgacactgcccccagaagtgtgtgtgggccccaccgattttgtgtagtgatgaccaattgtcatatttgccagttcttataggtgacaaatgagatctggtggttgttttaatatgcttcttttccctcattgttattcaagttaaatgttgcttggccagcacagtggctcacacttgtagtcccagcactttgggaggctgaggctggaggatcatttcagcccaggagttcgagaccagcctgggcaagatggcaagttcctgactctacaaaaaaaaaaaaaaaaaaattagccaagtgtggtggtgtacgcctgtggtcccagctactggggaggatgaggtgggagaattccttgagcccaggaggttgaggagtcagtgagccaagaccacatcaccgcactccagcctggacgacagagcgagaccctgtctcaaaataaatgagtaaataaagttaagtgtctctttatttattaggcattttaatccttctctgaattgcttatttatattctttgcccattttttcagtggggctgtttgtcttttaatgattgctttctctgtgttgtagatattcatcccttgtttttaagtacgttgcttttcattgaacactgttcagagtgtttgttggctttgcctgttgttgtttgaagtaaaatctgcagcaccatttgtttgccaggctttgggctcgtcactcagtgtaattcagagatgagtaagacaaagtccccacctaaaatagacagcacgtaactcttgcgagaggagtagtgaacggaatataggggcggagtccaaatgttttaggataagtgaggagaatggggcagcctctcaactggggattcagggaagcctttgtgaccagtggcgctagggccagacctggaggggtccatagaatgttcacagaggaatgggaagtgggggtgtgtttgggcagatggatcgtgagtgctttaatctgcatcccatccgaaaacaactcaccttcaatgacccactggaaaagagtctcatgaagaggctacttacagggtgtgcatggggacaagggaaccaacagagggtgttgaggtacccggggactgggtaggcagtggtggggagctgctgcagggatggaggcaaaacagtgttagcagatcctgtgggagctggagctgagtagggtgcagcctccttctggtgcctccattggcctgggcagtattgcctggagggcttagtcttctgcagcactgagcagggcagagaatggtggagagtgggtcagaggtgtcaggggaggtggagggagaaaaatcagctcagtaaggataaaagcagagatagaagttccagatgtgtgaaggcctcagcaatcctcgatgccattagagggtaggggggttcatttgctgctggt

SEQ ID NO: 81660 - DNA, 1325 bp, Homo sapiens
ccgccaactgcatgccggctgggaacgtcctgagcttttttggatctctgagcctctacacagattgtggcatctagaaagtagttcctctgatcttctgcagctcagccaggctgccgacacctctcctcctcctttcaccctgccctgggagggcttccgggttgtacttgccctgggtggctggcctcctcctggctcctgggactgggtcttggccttgccaccgaccagaagccctggtcttgctcccaccagctgatgtttctcctgactattgctccgaaggccctcaccagccctgcagggaggtgtcaccaggcctggttaatggtgatgaggccttagacccaggtaccttctgacaaaccagtgactgacaggccagggccggaccccacaccctctgactcaccttctactgctgtcacctcgtacctgcttcccagacaaaggtaaatcatcagacagaaaagcctttcggcttctgccagaatgaacagacaagaggcatagcaacctccggagaccccaccagccgccgtttctccctctgtccaccgggtgcgtgcacatgcgtgtgcgtgaacgcgcacagactcaaagggctgcacaccagcatggctctgtctcggggaatctgtactggctcctgctcatcagcattggaaccactcacacctctctctattggagggaaaaagaaaagccctccagtccttctaggaagccactcaaactacacatttgagtcactcacatttcagtcactcaagctgcacatttatcagctggactaatcatcttttgctgaaacctcctcctcgtgtgggtccctgtctacaagaagagacccctgtctaccttagtggcagagctggaggcctagaggtcaccatcgcctcctcctgctcccgtgctcccccaagcctgtctcactgtctcctgaatggctctcaggctccctgcattgcccctgccaccgcccagcacaggctgtggcctctgtggcctctacctgcctcagggcctcctcctgccccaccccaccgcctcgagccctggctgtagctgcagctctgcccatcccccatcttcatgcttttgcttcctttcaggctttgcttctgttgttcttcctgcccagaacggctttacctgtcaccaggttcgcccctcagccttcccacccgtcaccaggttcgcccctcagccttcccacccgtcaccaggttcgcccctcagccttcccacccgtcaccagattcgcccctcagccttccaagttctgctgcactgtcagttccatcagccgactcaccccg

SEQ ID NO: 81661 - DNA, 1108 bp, Homo sapiens
gttaatcggggtctccccagctctgtctagtgcagccagcatgaatgccacgcagcccggtcactcaggcatggtgctggcagtggcactgcggtgacattcactaacagagattagctggttggggataggagctgtctcagaggcttgtgtgtgattactcacggagggcctattactctttattccaaaacgagcttttctttcccccctctaagtgcactgctaatgtggaaaaggcctggagcatttgagcctctacccactcaataagaactctttgaaaaccttatttgcctttttttcagccaggagaatttgtgactcataaataagatgtagatattattagctttgacttacagatgagtaaatgggggtgaagtaagggaaggaagctgtttgtgttcacatggtacgcatatgtcacctctgacagttccatccctgctcatttgcttctgccgtattctctgttctgaggtctcctttgtgaaactctttctccaagcccttaatgggcaattagtgttatgttctgtacttgcctgaatcgcagccctggttttctcccagatagtcgctgtgctcaaggttcttgcttgttttactttcttccatacaactaataactggattcagtttatttcacatggcccagaggtaatttagactggtggttattcacctttcttgtgtcatggctccctttcagcacctgataaaggctgtggatcctctccattgtaaaatatgcatcaccagggacaagacaagacagcctctctttgtccctctactcatcagtccaggtaacaccacaggatttcaaagggaataaaaatgtggaagtgtccaatgtcattatcggcagatgacataactacatggataatccaaaagagcctggagattaacccctggagctaataagggagttgatcagcaacagccacctgcatggcagcacatctgagaagacgaaagaaaccattcttcattcttgcataaaagctgttagatacgttgaaataggtcttttaaaaaggtgagacttttatagagaaacataaaatatttagaagaaggactgagaaaagaaagttta

SEQ ID NO: 81662 - DNA, 1015 bp, Homo sapiens
tcgcgccgcgtccctggcgctggctgctgctgctggcgctgcctgccgcctgctccgcccccgccgcgccccgtctacaccaaccactgggcggtgcaagtgctgggcggcccggccgaggcggaccgcgtggcggcggcgcacgggtacctcaacttgggccaggtgagtgcggccggccccgcgcgcccaaaactttcccggcggcctccggcgcgcgcgaggggggcgcctccgcagtcctgtccgcccggccccggccccgcgcgcgcgtgggaaggctccgggaccgcttggggacggcgggcggccggggcgccctgcgggggggggtgtcgcccgggggggcgcgcgcgggacactcggcggggtgggggggactggggtcccgcgtgggcgcccacgcaggtccggcgcgccgaccgcaagtcccccggcagtgccgcccaaccccgcgctcggaagtgtggcctcagaagccggggcggcgcggacacctgccgggctccgggggagtctgggctgcctcaggcgtcgcgcgccgtccgccgctgggtcctgggcgcccacccggctctcccccgcgggggagcggcccctctgccctcgacgggcggcgcgagctccggacccggtgcgcgcgccaaggcggccgcggccgctgcttgggtgacatgagcgtggcccggcgtctcggggactcgcgctccctcggtgtccgcggctcccgggggtagatggccgggagcctgcaccctggagcccggccgccgtcggagaggccttgggacagcgcagggccgggggtcctgggtttaaaacctctccaggagcggagggagggcgctttgtgtgggggcttctgccgcggttctgatggccgagcggtgtgacctttggcaagtcgctcccctgacaagctcctttgcagtcagtggcaatgtctacaccgctgggttgtcggaaagatctaatgctgcgttgccacagagcctggaccggggcctgaccctca

SEQ ID NO: 81663 - DNA, 1028 bp, Homo sapiens
tacatgtagttatctctagtagtttctctttgtttttataaaaattccctttagtatacgaagtcactttccatttttgaatatttattgtattttagattatgtgaattaagggtagatacacagccattttcagtagatagtcttcgtatttataccttttgacgtttctgcctcctctctttttccaatcccacgctcatttgtcaccttatttctattatttttccacttcatccatcaaaataaccttcagtccgtgcttctttcccttcagcaaatttcctctactgctaaaaccctgttcctgatgttggaatattaaaggctccctcaggactgtggaaatggaaggattacagcgggactgatggagacttgaaatctagatctggttttgctactgggatcttgaacaaattatttatcctctttggaccttggtcctcatctttaaagcggtggggttggtctgacgacctaaagtcatttctgctttgtgattctaagtgtccaccttccagccacatagtcacgggatcaaaaagagtattttgtagaattgttccttaatacagtgagtaaagtaggaccagttttaaacaagcattagtgtgttttgctaggtggaggctctgactataatttcatcactttaaagtgacattacttcagtgaattgaaactggcagagatattttactgattcttatttggatgtaaaaaacagcagtgcacttgaattttaaactcagattactttttagagaaagcacaagagttcttaactcttgcaggcttttgaaagcccttcttttcaggaatacttgcaattttgatcctttcagttggtaaaaatacattgcacactcattaggttggttggaaataagttgcagcttactgaagatgttattaaagtagagaactgttttgaactttggtagcgtaaaactgtaaatattatattagcaaatgtggcttatcgaagtaccagtgtgaaataatgacattttaaagttgatgcc

SEQ ID NO: 81664 - DNA, 1050 bp, Homo sapiens
tcatttgcgccctagtgccaggtggagtcagtgtgagcctgtaagagctccccgctctcatttgcaccctagtgccaggtggggtcagtgtgagcctgtaagagctccccgctctcatttgcgccctagtgccaggtggggtcactgtgagcctgtaagagctccccgctctcatttgcgccctagtgccaggtgcagtcagtgtgagtctgtaagagctcccccctctcatctgcaccccaggaccacaagagctgttctctcaggtggacaatagagagatgggatcagaagtcattgcttccctcaagaaacttaactatcagaggatgaaccaaatgctcattagatgatatttaatattagtgaagaaaaacttgataaaaacatgtcatgggactgctgacttaatgtttggtaaattgctgatttaaaatacatttctttacctttcttttctgcagtggttggagaaaaggaaaagatagataatgctgtaaacgtgcgaacaagagacaacaaaattcatggagagattttagtaacttctgccattgataaactgaagaatctcaggaagacacggacactcaatgctgaggaggccttttgaagtccttccctgatatttgcttctgtgtaactttgttttgacccttaaaaatgtatttttcttaacatgttagtacttctacgactttggagccactgatgggtccactcatggcctcagctgagaaaggagacgatgaacgtgtagctgacatgcacgaagtttaatttactcatgtccacgggggacgtttagagggcacgtgggaaattttccagcaatcaatgccttgagaaacttaaatggggaaatattattcatcgagaaagtgaaacaaaacactaggaaatgattatgaaatgttagtgattttcaaaagatgggcttcaaataaaagtctgcagagttttttttaaataggagggaaaatcttattttctaatatgtctcaggtatttttatgacttctactaaaattcacactgaaactttatctt

SEQ ID NO: 81665 - DNA, 1051 bp, Homo sapiens
aggccaaggcaggcggatcactagaggtcaggagtttgagaccagcctggccaacatagtgaaaccctgtctctactaaaaatacaaaaattagcacatagtaaaaatacaaaaatacaatacaggcatggtggtacatgcctgtaattccagctacacgggaggctgaggcagaatcgcttgaaccagggagacggacgttgcagtgagccaagatggtggcactgcaccctagcctgggtgagggagtgagactctgtctcaaaaacaacaacaacaaccacaaattaatggcatttgaaatgcccagtagccacgtggcttgtggcctccatgctgcacggtgtcgctcaaggctgtgagctctttgtatccctcgtgtctcagcacctagaacatcagtagatgacctttcaatgtttcttgaagaaaagtagagttgttttcttcatttcaacattgtgtgtaataatgtgtaaatatgtttttcttcgtagtacaataaatttaaatgccgcattctgaatgagaaagttaacactgcaactaccaccgtgtacaggtttgtgtccacacatggtaaacgctgctcagtggtaaacttgaaggtgttagcagtagaggccgagtttgttttctggttggagatcgatttttcaagttgtgtagttgataatctaccgtagttacaatcttcaaaatgttttcactaaagagaaatgattattttcccctttttagtaatcaggacagtactgagacccatattttgtttcctgggtgttagctataacaggatttttctccatgtgagtgatactgttgggaaaggagtttctattctgtccttccacgttcttattaatgtggcagtgggggccattacaagccatctcctcggcagtgattctctgcctcatacttactgtccagagtgcaagtgtagaagagtctgccccattgtccagagtccaagtgtacagtcttcatgcattagcaggatactcatgatgagaccaaaagaaaatactgggaaacaaaggcaggatca

SEQ ID NO: 81666 - DNA, 1059 bp, Homo sapiens
taaagttctgtttgagtctctgctttacttcttttgggaatatacttagaaggggaatttctggatcctatggcaattctgtttttaagttttcgagaactcgccataccgtttggtgcagtggctacaccattttacagtcccaccagtgatgcacagggggttcagtttttccacatccttgccaacacttgttttgttttttttttaatcatggacatcctaatggttgtgaagtggtatctcattggggttttgttttgacttgcatttctctgatgacgtactaatggtgagcatcttaatgtgcttattggccatttgtgtattttcttgaagaaatgtctttggagaaatgtctgttgagctcttttgcccattttttaattaggtttttttgtatttgagttataagagttcttgatatattctggatatccatttcttaacagatatgtgatttgcaaatatttaattctgtgggttgccttttttgcagctacttttaagaactaaacacaattaatctttgttaaggaaaatgatttgttgtgaatatatagatacgaaacagttaaatcatgcagatacgggtttttctcccaacaactagcttctttaagtagttatttaatataaagtgccttgtataccccgatagtagtgatggaagcagaaaagaaaggaaaaggaaaaaaacccttagttttataaatatatcatcattacgataaactttgcttttgtttttatacaaattaataatatagctgtgtccttgtcagaattttattgattaatgttaaaattagatcttctagaacagtactgtccaatagaaacataatggaatccactagtctgagctacatgtgtaacctataattttatggcagctacattttaaaagtaaaagttgcaattaattttaacaaatttttaacccaatatataaaaagtataatttcaatggtagccagtataaagaatgattaacgaatgattttcttcttctttttgcaacattatacttccaaagtccagtgtgttttatactca

SEQ ID NO: 81667 - DNA, 1050 bp, Homo sapiens
ttttttaaacagtgaatgtggctgggcgcggtggctcacgcctgtaatcccagcactttgggaggccgaggcgggcggatcacgaggtcaggagatcgagaccatcccggctaaaacggtgaaaccccgtctctactaaaaatacaaaaaattagccgcgcgtagtggcgggcgcctgtagtcccagctacttgggaggctgaggcaggagaatggcgtgaacccgggaggcggagcttgcagtgagccgagatcccgccactgcactccagcctgggcgacagagcgagactccgtctcaaaaaaaaaaaaaaacagtgaatgtatattacttttctacataaaataaatattgcaaaacaagaaatatctgtcctattagtttatgtttgtactttttatacacttcaaaaaaaaaaaaccctagaaattcttttaatattttaaggaatcattgtaacagtgataaagttaactcccaagtggcttttgtcttcttagtcaggaactggctgaaagcacggtaatagccaaagtcaatggtgaactgtgggacctggaccgcccattggaaggggactcttctctagagctgcttacatttgataatgaggaagctcaagctgtgagtatttaaaaaccagacagccaaactttgggtagttatgttgtaaactacattatataagaggccacatattgaagtcacgaatgttgagttttttgggggtttctaagatttaaaatttgattattgatgtttaataaatatttgtggcatgaatgtatacaaatacatgtcagtttttaaagtagcccatatttataatttcttttttttttttttttttttttttttgagatggagtcttactctgtcacccagactggagtgcagtggcgcaatcacggctcactgcagcctcaacctcccctggctcaggtgatcctcccacctcagcctcccagctacctgggactacaggtgcacaccaccacactcagataatttttcatattttttgtagagacagggttttgctatgttgc

SEQ ID NO: 81668 - DNA, 1049 bp, Homo sapiens
aggcaagtctgaggagccgagggagatcacagtaaaaactgtcaaagatattaggaccacaaaaaggtaaatctaccacaaaaactaattggaccaatgagtggataaggccaatgatagaggaagtggctaaaaagtatagacacattcttgggctcatgatggtcaggtagtggagaggtttacatatggccatgtatctgtcaaaggccatggctatgagcagcaccatctcagtgcccccaagagcatggctaaagaagatctgagtaatacatccccgaaaggagatggccttgtgcttcttgaaaatatcacaaatcatcttaggggctgtaattgagcaaaatgccatatcaatgattgagaggttagccaggaggaaatacatgggggagtgcagatgagcatccatggttacagtgaatacaatgacaaggtttcccatcatgctcgcaaagtagaacaacaaagagaaaacaaaaagtagaagctgaatctcccgtgagttggtgagtcccatgaatacaaattctgataccacagagtgattcattccattcattgcctcagactccaagatcagttttcatgttacttacctgaaggaagaaagaaaatgagaaagaattacctaggcaagtattcatgttcaagaaagaaagcctccagccatgaaaataactatcatattaacatcttacacagccaaataaccctcatcacatgcaccctggacttccacttagaggggtcagctggctgctatttggcattatggttttcaaaactactactactaaattaattccatccttagacctagctctcctctgcttttgtgttacatgaatatttcctatttgatccttcccaggatgttctatttgggtgagatataaggtcatctttaaatacttttcactatgatttcttatcaatggatatgatttcagccagtcacatgagccacctaacaattactcatgcacagcatacagctttcaaagtctctattctattatttatattgcttgattagactttag

SEQ ID NO: 81669 - DNA, 1128 bp, Homo sapiens
gttgcagtgagctgagatcgccccactgcactccagcctgggtgactgcgagattccatctcaaaaaaaaaaaaaaaagatattatagtaatacctactttttttttttttttttttttttgagtgcagtggcacgatcttggctcactgcaatctctgcctcctgggttcaagcgattctcctgcctcagcctcccaagtagctgggattaaaggcgcccgccaccacgcctggctaattttgtatttttagtagagatggggtttcaccatgttggccaggatggtctcgaactcctgacctcaggtgatccgcccgccttggcctcccacatattaagtaatacctacttttgacagccatgagtagcatctttttttaaatgtggtcacttcttttttctcattgccagagtcgtgtcccaaatgcgaacatcctcgtgcttacttcatgcagcttcagacccgctctgcagatgagccgatgaccaccttctacaagtgctgcaatgctcagtgtggacaccgctggagggattagggccaggatggcccagctgccctagtgtgtgcttgccttgtccctcggggtagatgcttagctggcagtatgagttgtgtgtcctgagggtctttgctagtgtggtggaaagataaaccttttgaggtgaagagccagggggtcaggaaatatggcctatctgccaggcagggtggatgaagtcatgaatgtctgggagtttttctgtgtggggaggagacagagacccataactaaatatgctctgtgtaaagtcctattctttcatcttccactttattggcagttgacattcccttactcccaatcaacactcttaaatatttgtactgtttgtaaaacttagtacatgtccctaaatatttaactgttacttgtaaacttgtgtaatttattatttattttaatcaaaattctgaatatttcatttaaatgaaagttggaatattgccttctcagtgttttaaatagcttaagaggtagaaagcaaaccccaaatcacagtgatcccagaatagactacatacttacatttgaacaggctacgaaaatgttaatcaccgggatttcaatttctttctttattc

SEQ ID NO: 81670 - DNA, 1030 bp, Homo sapiens
cgcgcccccagcccccgcccgcacacacctggatcggcagatcgcagagcagcgggtcctgcaccaccatagccagaccctcctggaacacgtccatggcctcggagtgcggcagcgcctcttcttcgtcctcatcttcctcttgcgcctcgggcccacccgcggcctccgtctcctccagggccgcccctctcagccgggctctgcccgcactgccagcccgcactagggaggccaagcgcgcacgcgcaggaactgcggcccgccccagcgaggccgcccagccactggcgcgccggggggggtggggcggctgcagtgaccaatgacaagtgcgagacagcctgcagcagggccgggagcgcagaatcgccctgtctattggttggttggtgtggcgggaaggctgccaggaccaatgtgagctcgaggcgggcggcgcatcggcgctgagcggcagtgggagctgccgggagttggagcctgcggagttcgagaccatgctgctgttctgccccggctgcgggaacgggctgatcgtggaggagggacaacgctgccaccgcttctcctgcaacacgtgcccctacgtgcacaacatcacccgcaaggtgggacccgaaggccggcgctgggcgcgggcgactctcgcaggccttccgcgtcctccgactgctgctccatcgccgccagccccggcgtctgcctctgtccgctctttctcgcgcccctttctggtctgcagcagatctgtgggctctactttccaatacactcagaaagccccaccgtttcccaccgccttgggttcctgctcccacgctcgcgcccttctctgcgttcacagcggcggccacggtgatttccttaaagctgaggcacgcaggtccgtgctgtgcgcagaaaccttcggctcttctccagctcacgcagacgaaaagccggagttctcccagggcctaccaggttccgacactgactccctcccctgcgtgcgtctccgatttcaagtcctaatgcccttcctgtt

SEQ ID NO: 81671 - DNA, 1072 bp, Homo sapiens
gaggaaatcagagtgggcatggaggcgaaaggctgtgactctatctgacactcagttccctgccccggggacttgtgagtcggagtgcttctgggtctgtgagaggatggccactgcacttcctggccttcccagaagccacacgcctcccctctgttgtttcttcgtggtcctccacagcctcaggaggggagtcacagatatgtccttctgtagggcaggtgctttatgcctttccttctttttcagctacggcatccggaatcgagacgaggtttccttcatcaaaaagctgaggcaaaagtgagcctccagacaggacaaccctcttcatcactggtggctgagctttttcccagcaggaatgggtcctcgaatcatcgtgcctctttcacagaaaggacgttgtggtggcctcaccccaggcatgcccaacagtaactgtcagcataaacctgggggccctcaggactaggacagggtgagccagtgctccctcctttcatgtacttggcctgagactgacctctccctaggtccaaatgccctagtcacatggcagacccacggcctggcccactgtataaaataaacctgtttgcttcttagtttgaaaagtagaaagccacagtaacctgggtagcaaagactgagattgccccatcacagaggtgagttaaggggagagaattggtacaggcgagtcctatagtccaagatggcgccacaccaccaaagccttgaggccacaccactccccaaaccacacaactgtgttaccatgatctccacagcaaggaggaaataaaagcagagcggctttagggtttgcatcctggagctcacagtggcagcaagcatagcacagctgtgtgtgggccctccagcctcagcctttagggttccctgcagcaggttcggtggacagggagggagtgtggggtggaaattggagctgctaagggtgggggcggggtgcttcccagcatgtggggagggtatgacagtacatccctaggtccctgtcccagcgtcggctaccagccactctaagaaagagcaaggtgcacgt

SEQ ID NO: 81672 - DNA, 1092 bp, Homo sapiens
tgaggagtcaggagcagcagtcacgctgtctttgcaaggcctctgtgcctctgggtgagctaggagcccccatggtcctgactccagcatctcctcccctcctccagatcatagaccccctggcccgtggccgtgccttccgtgtggcagatgacactgcggaaggcctgagtgccccacacactcccgtcacgccgggtgctgcctccctctgctccttctccagctcccgctcaggtttccaccggctcccgcggcggcgcaagcgagagtcggtggccaagatgagcttccgggcggccgcagcgctgatgaaagtgggtgcaggggccaaaggcggggttgggggccgacccagcagccgggtctcatgctcacttccccgtccccagggccgctccgttagggatggcacctttcgccgggcacagcgtcgaagcttcactccagctagctttctggaggaggacacaactgatttccccgatgagctggacacatccttctttgcccgggtaagaagtgcccggggtgtccccccaccccacgttcccttcctgcctgtgtccaccctgacctcatgtgtttgctcaggaaggtatcctccatgaagagctgtccacatacccggatgaagttttcgagtccccatcggaggcagcgctaaaggactgggagaaggcaccggagcaggcggacctcaccggcggggccctggaccgcagcgagcttgagcgcagccacctgatgctgtgagtgcggcaggcagggaagaggggcagagagagaccccggggcccgtcaggaacagctgggcgagtatcggcattcacctctgtgggcgatggaaggggtagcctcagggactgggaactcactactcactgggccaccaggggtgggagacgcagagctgggcatggccccagtctcatggcttgcctgtggaatgggacagcaatcttagaacccaggggctgggcagaatccaacggggaggcggaggtgacagaggtgatacttgctgagttgcagaagtcagtgtgtccccgttccagctccctgccatccccggaggcccgcagtgttgct

SEQ ID NO: 81673 - DNA, 1008 bp, Homo sapiens
ccaggttcctctgaactccccccgctgcattttccttcccggccacgaccggcgggtggtgtctccgagctgaaactccagcccagggcgggatggtccctgtcccggctgccctcaccgatgggaatagcaggagccgtggagctgggggtgggggactgactccgccttctgccccacgacactgactcccccatctgtacacttcgaagctccagggtgggctgggagcgactcccgaagacagactctcactctgtgcgcagaggccaacggggacaggccttctcccggctggggtgacagccagaccccagatgctcagggcattggcagagggcctggttgtctgtcatgctgggggcatgtttgtggggctgggcggggaatgggcaggggatcttccctggccccccagggcctgcttccgaccgaggtggtcctgaccagagtttcttctgtgtgtgccgcttgagatggtgaatgtgtgtgtctgtcccggtgggtggggcctaggtctggaggcccttctcctatcctgggaactcccacccgccaacgggacttcctgttggagaccgggagaagattcaaggatgaaactggcttttcaggtttgacccagctagatgcctgggcagtcccaggctcggttctcctcacccctgtggagctaaccccaacctcctagccccgaccccaagggtgggcagaagctggggaccaagcagctggctggggctcaaggggtccctgaggcggagccccctgccaccaggggtcattctgggcaagccgggccccttttcctgagaatggggcaggggcaaatggagtgcatgggagtctggtggtgccagattgaaggggcctcagaccctttcccagcccttccaagtagctttcactggctgggtggcctccgttgcacaagcaggcccctcaaccagcacccctcatgagctggccggtccccaccttggggagctgactttctagggtgcgctc

SEQ ID NO: 81674 - DNA, 1051 bp, Homo sapiens
gttgaggggcctgcttgtgcaacggaggccacccagccagtgaaagctacttggaagggctgggaaagggtctgaggccccttcaatctggcaccaccagactcccatgcactccatttgcccctgccccattctcaggaaaaggggcccggcttgcccagaatgacccctggtggcagggggctccgcctcagggaccccttgagccccagccagctgcttggtccccagcttctgcccacccttggggtcggggctaggaggttggggttagctccacaggggtgaggagaaccgagcctgggactgcccaggcatctagctgggtcaaacctgaaaagccagtttcatccttgaatcttctcccggtctccaacaggaagtcccgttggcgggtgggagttcccaggataggagaagggcctccagacctaggccccacccaccgggacagacacacacattcaccatctcaagcggcacacacagaagaaactctggtcaggaccacctcggtcggaagcaggccctggggggccagggaagatcccctgcccattccccgcccagccccacaaacatgcccccagcatgacagacaaccaggccctctgccaatgccctgagcatctggggtctggctgtcaccccagccgggagaaggcctgtccccgttggcctctgcgcacagagtgagagtctgtcttcgggagtcgctcccagcccaccctggagcttcgaagtgtacagatgggggagtcagtgtcgtggggcagaaggcggagtcagtcccccacccccagctccacggctcctgctattcccatcggtgagggcagccgggacagggaccatcccgccctgggctggagtttcagctcggagacaccacccgccggtcgtggccgggaaggaaaatgcagcggggggagttcagaggaacctggggcacccccggactctagactcccgctcctgggaccctcagctgttgggcgggggctggagccgagctgtcccgcccggccaggccgctggggctgctaatccg

SEQ ID NO: 81675 - DNA, 1046 bp, Homo sapiens
ggtctccaactgcctctcctcctctgaccagccgtcccacccccatgggccccagccaggacttcctggggagggaggggccatcagccggctggaagccaccagctgtttgtagcactgtgtgccgcttcccggggtgggggcataatgtgtcatcaatccgtgtttataaagcagccctggatgtgattccacaccctccctgcttatctgcagccatgcctcccaaacaatgagtctctccttcctgtgggaacagccccccatccccccgagtgctccccctcagtctagtagggaaactgaggccccagttgagcctttgtcctcttgatgggcagggagaggatgggtgttactttgtacttatatttattctgatgttacaagtgatacatggtccttgcagaactcacggggagtccagaggctcccagaggggtgtttttatccccacctttcttatgaggaaagagaatcacttggagagcagattggcccctgccccaggaggtggagaggccggcaccggggcgccagcaaccaacttctccagatgttctggactgagtgctgggggttgcgcaatctctgggcactccccccccccacttcctggtttgtggtctcatgctcccaccacaggctggaagcggtgggatgagagttccaactgtggcctgcagagtgggctggcgggctggtccaggacaagagaaagtggtgccaggtgagaggagggggcctggggcttcctctgtccccagtttgtcccactgctgggctggaacaggcttgttggaggaggcaaggatatcagtggaagatggagatgagaacacccttgaggctttgaaaggagtgaaggctagtattggtgctggggtgagcagccctgacccccgacctccacaataggccacaggctgtggaggggctggagctgcctccagctgtaggaggtgtggccatcagtcgctggagcctttataaacaagtctttgagagatgtggctgtattggctacaggggccagggttctagta

SEQ ID NO: 81676 - DNA, 1044 bp, Homo sapiens
ggtgtgatgacgggcgcctctaatctcagctacttgggaggctgaggcaggagaatcacttgaacccgggaggcagaggttgcagagagctgagatcacgccattgcactccggcctgggcgacagggcgagactccgtctcaaaaataaaaaaaaaatacaatgggcatttgtgatacaacaaaacagcacgtgtggcaggtgcgtcgtaggaacagggcaagggcgcagcatggcatcagggaccacaatacgtttgtctctattcagcatccttgtcaggccacagtcatgcccacttgagcccattggtggacaagatgatgtccagcagagaagagggtgtctcaccctgtgtcccttggatcagggacagccctctgccctctccataacctcctagtggatgcccttgcagacccctcagccaggcttgggtcatgcactcatccctaaaagggtcactgcagtgagttgccatgaaatcccaggccactctctgggctgaggagggtgtggtctcccccaggaggctctgccaacaaggaagaggggtgtgtgttggccatgggggtggggaggggtgagaggccccagtatctgccactggtggaaatggtatcagtgaaatcctgatcagaaatttgggatggaaaaggaaacaatgagaaaagggctgtgggaacctcctctccagagtggtagttgggcccccccagtgtgcccccatggaggcacaggagtgtgcagagtgaagcccctggaggggcattccctctaagctccagggaagatggaacagggccaccctttctcccctggacatggcctggccaagcctggcctgttcacttctgtcctcatggctctggatgcctaaggatttctgggcttcccgcccaggcactgaccccttcttcccaccaccctatctccaggaaggcctcctgaatgctccccacactgaccccttcttcccaccaccctatctccgggaaggcctcctgaatgctccccacactgaccccttcttcccaccaccct

SEQ ID NO: 81677 - DNA, 1195 bp, Homo sapiens
tagtagagatgaggtttcactgtgttggcaaggctggtctcgaactcctgagctcaagtgatccacccgcgtctgttttatttcttaaattcatgtgaagtctggatatcttgcagtccttttgaccaagtcttcttacttgcctgggatatatcccccattcccatccccagttccccagccccctcccaggaggtgaccctggccagcagctccttgttgaccctcccagagatgagtagacagatgtgtatctgaggacactgatgtgtctcacactccttactgttcaacgcctgagtctgggcagtactttctcatggggactggactctacctggcacaaggctcctcactgctcctcactgccagccccacctgctaacccagagacattggagggcctggccaggacgtgccttctcacggtgggggtgggggtggggtgctccacccccaagcccagggtcactggcctcagctttcttgtggatccactcttgtgctcagggtggactttcaggtagatccaaggagaggactttctgctctcagggtacctgcccacagcctctttttaaacagtgtctgggcttgtgtggaggtggacttgctggctgggtccaactccagggccagtgggccaaagaagagaggaggcagaggggcagctgcagcagcacagggtggggggtttgctcagcgaagcagtcacaggggcctccacgtctcaggtcctgctcctcagccagatgctgggtggccccggtgtgtggtgggagcctgtgcaggtgtgatccagatgttcccctggcccctctcccttcccaggagggtgagcgggccttgcagagctggctggcagctgggggctccctttctgagaagagggcctttctgcctgtgcgtcagcacagggagcgtgctgtggccatgtctagggccatggctccctgatcacccaggaggaagttggagtggggagggggaccagcctcacctgctgccacccgcagacccagctcatccagatggtggtgtggatgctgcagcgccggcttctcatccagctgcacacctatgtctgcctgatggcctcacccagcgaggaggagccccgtccgcgagaggacgacgtccccttcactgcccgggtcggcggtcgcagcctcagcacgcccaacgccctcagctt

SEQ ID NO: 81678 - DNA, 1131 bp, Homo sapiens
gttggccaggcaccaaaggctgtggaagccccaaggccaggctctcacttcagcctaactcctggccactagcatacccaggtcccaattctggtctggctctgtgctctgtggctctcctgtgtcccccatatgcctggccccctcctccaggctggctcttctaatccaccttgagggatcagaggtgagatgcaggatgaactgtgcccatggctcctgctgctgctcaaggggaagtgcccaggctctgtccacctggaggcctgcctggcctcataccgttctgccctcatcgcactgtcctgacccacctgccacactttgcttctctgctgcccactgaggccagtgttgagaacacggtgggggggtctgctgcactcactggcatgctcacctgcctgcaggtactccccgctggccgagcagttctcccaccagttcccatctcatgacctgccgtccgttcttgccaagttctccttgccggtctccttgtcagaatttaggaatcccctggcccccgctgtgcaggaggtgagtcacagaagctcaaggagcccagagtggcaggtgtgtagtggataggcactacctgcctggctgttggttctgatctgagagccctcagcactgccacctgcttctccttggttttgggggcttgccgtgcaagtgctacgtgcccagcaggacccaaaagtcagctgccgggccacctgcagatgcttggccagtgacccaacacttgagcagttgttccctccccatagagcccaccctggctgtggcaggcagtttttagtgttagaaccgagttaagcaggagagtgcttaccttttctgggcctacagacctgccttgtacccctttgggactggggactgcctacagatgagggtgcaaaggcagttttgttctcactgggccaggcctgaccctctgagagttctgcttctgtcttcactccctgccatggttcaggtggccacagggtctgtgggtatgagttctggggtcactggtccccagaatctcctcattcaagagagcctagagaggaccctagtgggcctggatcagggcaacgggcaggcaggttgggagctaggagtggctgggggata

SEQ ID NO: 81679 - DNA, 1038 bp, Homo sapiens
gacctcgtgcaggacctggtgcatacctggtgcagggttccctgcacttcgtatgttccgtgtgtttgagtcccaggtgcatacctggtgcatacccggtgcatacctggtgcaggacctggtgcatacccggtgcatacctggtgcaggacctggtgcatacccggtgcagggttcctgcacttcgtgtgttccgtgacaggtgattgttttgcagcccctaccatgccctgctgctgctcagtgatgagaagtccttgctgggtgagcttcctattgactgctcccctgccctagtgcgggtgatcaagaccacatctgctgtgaagaacctgcagcagctagcccaagatgcggacctggccttgctgcaggtatagctctggaggcccagatgggtggcatgtggcggtgctggggcatcaggaaaggcaggccgcctgccacagtacatccacaggggctgtgtccagctgagagccgcggcacagcccaccatggggtggggccagtccctgggatggctggaggttttggcatctgagtcagacctgggttcagggctggctttgtgagtgagccacgggactgacttgttcttctgtctcagagaggtaaggcgagtctgtgagagaaaggactggggtgcttgcagtcctggaggttgaggcaccagagctagggggtgggcagggcagcagcgggcagggccatgggggtctcacagtggtgcatgaacaacatacgggaactaagggcaggaagcttggatgcggggccctcccatgtgcagaacagagacctaacctggtggccttacgcccctgtgtgtgcacatgtgttggcctgtgcactctgtacaagatgccacgtccttgctgagccacatgcttatgggcctgtccatgcagagggctgccctttctgattagatggagggcccctcagcctcgtctgcggatctggttggagtgtgggaggaaaagcgcaggcaaggctgggcacggtggctcatgcctgtcatcctagcccaggact

SEQ ID NO: 81680 - DNA, 1090 bp, Homo sapiens
ctcctctgtgtcatagaacaagtgctgttggctcttacttaaggcaagggcgctttgtggtgagcggtggagttgggtggcgccctggcttctccatcagggagttttagaagctcctggtgaaaacaactccttccttgttttgtgtggttccccgaggggatgacgtgggctgcatccccactgtggagcctgttcttggggcagggcttcctaggaaagacagtgcatgcagggagggcggtgtgttccttggcttcattcaggaaatgcagctccgtgcctatgtgcctgacacgttttacaatgtgtagagagcagagaatgaaacccacaagcccccctcctcaggagtgagttctggttggggagacagcattaggcagcgggtcaggggttggagtgtcaatggggctggggtcaggggtgcttcactgagaatgtgacacttgagtggagaccgatggagtaaaggagccttggggcgtctgcagagagtttgtgggcaagggcaaatgccagggccctgagcacagcgggacctgagtgactgggcacagggagtgaggccacaggaacgtgggtgttgcaggcccatggctgggactgcccaggtgggagtgtggggagcggtagtcagaggggccagtgctctgggtggcttgggcctggtgatgctgaaaaggcctggattttggacatccctgcaggtggagcagatgggatttgctgatggtttaaagtggactgtgaaagaaataaggaaactgggatggtgttgctatgtttggcctgagcaagctttgggacccgaaagaaccaagttacccttactgatagaatgtggagtgaaaggttttccgtcgtagtgaagtgttggggctggctagcacggctggcttgtggtgaccacttggtatccacatgcactgcaactgaggtgctgtgggcatctgcagactgcagggaggtgggcactgtgtgcttctcaccactggaacactctgggggacttggcattccttccctgccctcctcgccctctgagacagccactgttctgcctggacgtgcacctgtgatgggtctt

SEQ ID NO: 81681 - DNA, 1763 bp, Homo sapiens
agtgctaggactacaggcgtgagccaccacgtccggtccccagttgctattttaattaaagctagggttatggtgtggctgaatagcctggtggccctgtcctgcaggacctaacatctgtgaatataggctgggaatgtgaatcgctcaggaggccaccccaacacttgtgccatacctagcacttgtgtctccctgtggatcccagtggccctcagtgacagcatgtcactcattcatatgaccattgaattgtgtctcccaggagggcagggatgtctcttcactttctgcaacacagcccctacactcagcctgtggaggagcacagctcatccgctaggggtcgacggaatgtgtgggtgggaataacagcagtgtagattccatggagtgtgaagaagtgatttgctgaatggttctccgagttaacaggacctgtggtggggagtgatgtccagggtctggctgggtaggtggtacttggtgcggagccttgcactgcaaactgtcgagagcagggttggtcccatggaccctctgtgaatatcctgagttgtagtacccatttccataaaaatgcacctatatataaactttcgtttgaaatttcaaggtaggctgtttggaacccacatagatcttttgggttatgcagcatcccactacttatggtaggaagccaggcccatccgtgggaccagaggatgcagaggtttgcaggatagcttcacaggtcctgtctagttctaaggttaggaatggatgctttctcagatgctaaaagctgaggggactagactaagcttgtgcacatttctgtcttggagatgaacggcgagagtgtgtttgaagccagccattcccttttgcatagtcattgtcaggatgcagggctttggctggggcacctatctcctgtcacagactgggctgggccctcttggctggcccagagctgtgtgaggggctggataagtcttgaggaggacagtgttttcctccagagtgttttcagaccaaaccattaaacaccttgcaaatagaagtgcaagctcggcaggaaacctttcagggcccaaaccctgcttgtgctaagggctcttgtcttaaagctgcagacttaaaaacagtgacaaacctttctctttccccttgttaacagacctcagtgcagctcctggcttaccctcttactgtgggggatttacaggctggaggttgggccggcacctttccagagcagtcatccctctgacatgttcagggaatttgcccaggtctgccatggcctttggggcactcctggtggcagcacttgtcaccgctctagggagctgggttagttcataaagaagcaccagcctcagtgcagagtgctctgagggagaaagcagcaggtgggtgagctgatgcttgggaaaatggagtaaagtccacgtggaagttagaggaaccaacatggcgtgtctctgccagaggagagggccccatgccagtgtacaaaccagaccacatgactgcggctccaaggacagctgacacggtgagggcagcagagatgaccaagctgggaagtcactagaagaaccttcatgtgaccctcctgccctcatttctccatacccatagctggaacttgttcctggctttccatgaggtgtgttccaagcccctgttcctttccctataactctctccagtttctaatgctccatacaatttgattacaattaggtgtctttttttttaaacgttaattt

SEQ ID NO: 81682 - DNA, 1413 bp, Homo sapiens
ctctctgtccctgtgtttccttcaaactacaagttaactctgaaggcttggttctatttgggtacaagttttggggatgagaaagtctcatgcgtgatgccttaaacttcctgccactttatgtcgtgtatggtgaaaatatggtgtttctaaaagttcccattagtgctggcacaccctaggtgttagctttctcagcatgtccctcactccatgtcaggcctttgcaaaccggacatgctgggacaccccatgagtgcaggtcactgagcgtcactggggactgcaccactttgtatgtctggaaaggtcaagcatatgggccctggacatccaactcatggacactgttgtgcctcagctgaataatcacatatccaggatcattgtcctcctccttgctttgctcgtggaagtatttgtacacagattcttcttctaggtgggtattttgttttgaggcaattgtatacaccccatatgtcagccctctggtcccaaggacactgttgaggcaatgcccttgacatggaggagcaggtctgctgcccagtggtgggcacagcatgggagcaacagtcctttctctggcaagggatgctgccttgttgtaagtccatccaggtgtgagttctgtttgtgaacatgggatctgatgagaatatagagaatttcttcagctccagatgaagaacgtatttactgtctgggtcaggctttgcccctgaagcctggctgtgaacactttgggcatggccttccctctcagataaacaggagggggaggcagcaccagaggttgtaatcagcagtaccattcacccctttcccttgtcccacctccacccccacaggatgactcagcagtcctgttggcctccagaagcactgagtcatggttggcccagttatctgctccctcaagtgttttcacagacccccacagctgcatgcctccacccttggcttgggcagatgtgcttgcctggctgactgtggtccctgataggttccagagggtcgagggcccctcttgttcctgagagcctcctgcactgtcctttgacccagtcatcatggttgcagaaggagctcttgggcagagatatgggcctggagcctgctggttttcttgttaaccagtgtgacttctgctgggaagagcttctcatccttcaggaccaaaagtattcagtgaacaattggcctggtgcctctctttttgtaccgtgcatccctgtagtaacgtggcctgtcgtgactgaattcttacaaattgtagactggttctgcctaccagtagtcagcagtacagtggtgaccacagacactagcagggtctttgctcagggcaggttctgttcttagtttgttacatggctcgctaatttcttccattcagtccttggtgag

SEQ ID NO: 81683 - DNA, 1072 bp, Homo sapiens
cctgctggctgcctcagagggctccatgaacagccactaagtcaatgtgactgtttttttttttgagacggagtttcgctctgtcacccaggctggagtgcagtggcacgatctccgctcactgcaacctctgccgcccaggttcaagcgattctcctgcctcagcctcccgactagctgggactacaggcttcactgcgcccggctaatttttgtatttttagtagagacgggggtttcattatgttggccatgctggtctcgaactcctgacctcgggtgatccacccacttcagcctcccaaagtgctgggatgacaggtgtgagccaccacgcctggcccagtgtgcctttttacttcagctcacagatttccagttggccgtctctgcagaccctggcctctagcagggaaagagccttttatttggctgttgtgagggcgccttgaagtttaggtatttataaacgcgaactgggctaccactgcttgcctctgagaatcccagggaccatctcacagccaaactaaatttggtccctggactggtgcctgagggctgaggctgagacatggctgtgactctttatgacagagcagcagtttttagtggagattttgggctgtcagagcaagggacctttctggagtggtggtggttatttttctgttacctctgtgtcccctgagtcactgggtggcagagtggaggggcactgtttagataggatgtgaggcgttggccctgggtcagttgctagagcagaagtgtttggtggcgttttaatacctcaaaccctccttcaacattaccatgtcccacagatgggagttatagaacagagtgagccatttagggtttttgaagaaagcatattatgcctgtggtgtaaggcacttgaatcctccatctctgcaggagagacctgcagtgggctgctgaggacttggctgtgggtcctgcgtttcccaggataactctaacaagattgatttcagaaggtccaactgcaacctgactgggttgagaggctatttccaaatggcacaaataggtttgaccaaaccct

SEQ ID NO: 81684 - DNA, 1028 bp, Homo sapiens
gggagtgtgtgaccctgtttctcacatgttgggagtgtgtgatctgtttctcagcgtggggagtgtgtgatcctgtttctcagcgtggggagtgtgtgatctgtttctcagcgtggggagggtgtgaccctgtttctcagcgtggggagtgtgtgatcctgtttctcagcggtggggagtgtgtgatcctgtttctcaacgtggggagtgtgtgaccctgtttctcagcgtggggagtgtgtgaccctgtttctcagcgtggggagtgtgtgaccctctttctcagcgtggggagtgtgtgatcctgtttctcagcgtggggagtgtgtgatcctgtttctcagcgtggggagtgtgtgaccctgtttctcagcgtggggagtgtgtgaccctgtttctcagcgtggggagtgtgtgatcctgtttcttgtctggtaagttgcttagtcgtgatggtcaacagttaatgcttaatggtggcacttctgctagacttttgtgcagtttttataaaatagccttgtaacttttcatggtttttaaaaaagtgatatgtttttgtttggtcttgatggtcctgttcccatttcagcgagccatgtcctccaaccgatgagcaattggttgcagggtaagaccgagacctctccaccgtctttctgtcttgattccggctgccttctcttcttgtaattgtgcttaattcctgatttccctccatgttgaagagtgactgatgaggcacacaggcgtggacctcactgccccagttcccccatgaatgcccagacttcccaccaccccggctttttctctacccagtcatttagctatttcacattacctgagaggccaaggcatggctggctggcacccgggagacttctgggaccaggcatgtcacacaaacctcctcttcctccaggtaggcacaagtagtcctgtgagggtggcgggcaagcaggagtggactctgtcatctccctagtccactgccgccctagagagacctgtgactgttgctcctt

SEQ ID NO: 81685 - DNA, 1004 bp, Homo sapiens
agctcagagcatgttcctggagcaaggcagtgaaagtgcatcaaatccactctctgtgtctttgatttttttttttttgagacggagtctcgctctgtcacccaggctggagtgcagtggcgcgatctcagctcactgcaggctccgcctcccgggttcacaccattctcctgcctcagcctccggagtagctgggactacaggcgactgccaccacgcccggctaattttttctatttttagtagagatggggtttcaccgtgttagccaggacggtctcgatctcctgaccttgtgatccaccagcctcggcctcccaaagtgctgggattacaggcgtgagccaccgcgcccggcccgtgtctttgactgttgttcccaaaagtgcttttctttctgaaaccagagcttcagtttaccagactgaaacagtattaacaggctacacagtgacttgtgagtggtcgtggcctgccttagaaaagtgaggacacagccgtgctgctcactattacaaacactggccagtgtggccatttaaattgaagttaactgaaataggccagatgtcgtggcttatgcctgtaatccaagcactttgggagtcccaggcagatggatcacctgaggtcaggagacagcctggccaacatggcaaaaccctacctctactaaaaatacaaaaatttgtcgggcatgggagcacatgcctgtaatcctagctactccggaggctaaggcaggagaatcacttgaacttgggaggcggaggttgcagtgagctgagatcacgccactgcactccagtttgggcaacagaacgagagtctgtctcaaaaaaaaaaaaaaagaagaagatggaaattaactgaaataaaaaattcacttgcggccgggcgcagtggctcaagcctgtaatcccagccctttgggaggccaaggcgggcggatcatgaggtcaggagatcgagactcatcctggctaacacggtgaaaccccatc

SEQ ID NO: 81686 - DNA, 1036 bp, Homo sapiens
ctttgggaggcagataacctgaggtcaggagttcgagaccagcctggccaacatggtgaaaccctgtctctaccaatatacaaaaattagctgggtgtggtggcggacacctgtaatcacagctacttgggaggctgagacaggagaatcgtttgaacccgggagccagaggttgcagtgaaccgagattgcatccagcctggacgacagcaagactctgtctcaaaaaaccccccaaaaacccaaaatgaagcccttctgaaaaggataactgctaactaatgtgtagatgatgggagctccttccctttttcacttcgtgggagattttttggagggaattcctgaggttcacattgttaacacatagccatcctcatccgctctgtttctgcaggggtacacatgccacccttgagctggctggctcagtgggcgcacacgggcgctgtggtctgggtctttctgccaccggtatcacagtgtagctggtggccttgctctgggctctcctgccacaggctgtcccctccaggaggacagatgggtaggtgggctgctctgccagcccgtgacacaggtctagcccagccaactgtctccaaggaaaggagggtggaaggggccgccctgtacaggagtcacttgggattgatgctgtgctttgcaggcatcacccatgtcgatattccctgcgtgttgctgttcctcccgtgttggtattccccccgtgtcgctgttccccccgtgtcgctgttccccccgtgtcgctgttccccccgtgtcgctgttccccccgtgtcgctgttccccccgtgtcgctgttccccccgtgtcgctgttccccccgtgtcgctgttccccccgtgtcgctgttccccccgtgtcgctgttccccccgtgtcgctgttccccccgtgtcgctgttccccccgtgtcgctgttccccccgtgtcgctgttccccccgtgtcgctgttccccccgtgtcgctgttccccccgtgtcgctgttccccccgtgtcgctgttcccccc

SEQ ID NO: 81687 - DNA, 1250 bp, Homo sapiens
ggaggagctcgcacggcgccaggtgatgggctgcacaggcactgtcccctgcctgcgtcctggggcctgtgcactgttgcgtccatgctcagagtggctgagacttgtgtcctgaccaggccctgcttacctctgttttggtttttgtttttgatatttttttttccattgtgtttttacgtagtgtcatgttctgtgcatatagtgttgtattctcctttgcactgtttatgttacagtgaaggctctccttattaaaaatcttcgcaaaggtcactttttaatggctatctaacactccatatgtggtgggcaagtctggttggcctccggggggtttccaggtataggggatgtagggccttgcctggcctggtctgcgggtccatcgtcagtgcctgagcggccagcagaaggggggcagcagcctccactgagcctctggttcccatttcccaggttctccagagagcgggcatccagagaggagtcctgggagagcgggcggagcgagcgagggcccccggactggaggcttgagagctccaacgggaagatggcttcacggaggtcagaagagaaggaggccggcgagatctgaacccgtctcccgggtgctgtaaatagtctgataaacgttcacacagtctaaaattaccctttatatttgctgaatacaactcatcttttgtagtttaaaatttctattgttttggagctagctgtgagtttctagaagtgtacagagttgctcctgtgttcccgggtcatgttgagtaggaataaataaatctgatgctgcctcctgaggctgcggggggtttctgctgtcctctgcgtagaggcttttcactgtgaccctgtgccagtgccaccagcacctcacagaaaccgtgacttactcgtgggtcacgtcttgtcttctggcatccagtagatggcagggcacttcctgtcccctgcatctgactgacgggacccaggtgtgcatgggtgtttgtttgctcgctcccacacaaccttctgagtgtctgagctgcccatctcccatggggaggagggaggggtccccattctgcattcatttatttaggaaaagctgtcttgtctgctcagctgctaccatagccttaacttgggactcaggtgagttacactgcatgtccccttttgaagttactagcagaaaacaaagacccatggggctgggcatggtgacacatgcctgtagtcccagctactactaagaa

SEQ ID NO: 81688 - DNA, 1049 bp, Homo sapiens
taaagcattttttcatgtgttatcttcttcattaagaagttttaaaaatgaatgtgttggccgggcgcggtggctcatgcctgtaatcccagcactttgggaggctgaggcaggcgggtcacaaggtcaagagatcaagaccatcctggccaacatggtgaaaccccatctctactaaaaatacaaaaattagttgggtgtggtggcatgtgcctgtaatcccagctacttgggaggccgaggcagaagaataggttgaactcgaggtggaagttgcagtgagccgagatcacgccactgcactccagcctggtgacagtgagacaccgtttcaaagagaaaaaaaaaagtattcccatttcctaaaagtgtcccttcaatttttaaattaccaatactgagctcatataaaggtgatttgttaagtagcattcacactctggtttgtgtaacttgctcttcctcattttttgtttcatttatttagaaaactgtcgctgaaaagcaggagaagagaaatcaggatcgcttgaggaggagagaggagagggaacgggaggagcgtctgagcaggaggtgagcctgagggctggcactggatggcctgcattggcctcgggcattccctgctcggtccattccactgttgcttggaataggcagggcctgcccaataggccgttataaaagaaaatagtaaggccaggcctggcggctcacgcctgtaatcctgtcagtttgggaggctgaggcgggcagaacacttgaggtcaggggttcgagaccagcctggccaacatggtgaaaccttgtctctactaaaaatacagaaattagctgggcgtgctggcatgagcctgtaatcctagctactcggaggctgaggtgggagaatcacttgagcccgggaggcagaggttgcagtgagccgagatcgtgccactgcactctagcctgggcaacagagactccatctcaaccaaaaaaaaaaaaaaaaaaagtaaacagcatattcagtccaacaaaacaaaacaaaacacgtcccagcg

SEQ ID NO: 81689 - DNA, 1049 bp, Homo sapiens
ttgtatttttaatagagatggggtttctccatgttggtcaggctgatcttgaactccggacctcaggtgatccgccagcctcagcctcccaaagtgctgggattacaggcgtgagccaccgcgcctggcctggtcttgatctcttgaccacatggtccgcccacctggcctcacaaagtgctgggaccgtgcctggccgcgtttcttaaataaacagtgaaaattgagttggttataaatatctgaagttttgtttgtgtttttttaatatttgtttaaaagtcacctctgtcatcttatcaaatattttcattttggagattgaatttgtggtggcagttctatatacctcacttttatttctccattttccttcttcaggaagaatacagaaattccatgcctgcatccagttttcagcagcaaaagctgcgtgtctgcgaggtctgttcagcctaccttggtctccatgacaatgaccgtcgcctggcagaccacttcggtggcaagttacacttggggttcattcagatccgagagaagcttgatcagttgagggtatgttcatctgtttctggagaaagctgaggagtcttggggtgttttcacatttctttaatttttaaaaaccttatgttttggccgggcgtggtggctgatgcctataatcccagcactttgggaggccgaggtgggcgaatcacctgaggtcaggagttcgagaccagcctgaccaacatggtgaaaccccgtctctaccgaaaaattagccaggtgtgttggtgtgagcctgtaatcttaggtactcgggaggctggggcagaagaattgcttaaacccaggaggcagaggttgcagtgagccgagatcatgccattgcattccagcctgggctatagagtaagactccatctcaaaaaaaaaacaaaaaacattatgttctgatctctaagaacttgagttttatagtgaaatacgcagatttcatcacttggattcacacaagagacatgatagctcagagtccaaaggagccttggagatttatt

SEQ ID NO: 81690 - DNA, 1016 bp, Homo sapiens
cttctgtttttctcttcagtggaactaagcctctccttgttttttcttttcagtgttgtaaaagcatttcttaggatttatgcaattgctaatttgaccaacggtgctattttgtttcagaaggtaaatcctagtaattaggtattttggttacagcttaaatctgtacatttaaacctaggcattttattaccatacccagaagaaaaagtcataaagagagacagcctagacaatgaccaatctgtgatgatccttggaagcatgtcggaagtgacaaaggtgccactggtttcattggaacataggactcgtttatggttacagtctcaatgctggcagtaaggatgccttcattgttaagtgtggatctttagctcttccacttattttcagactggaaatggagcaggagaaacccttgttgcctttgcattcactttcattttcagatgtctgcttacctcattctttctcctcacaggcagaaaaagtacatgagttaaatgaagaaataggaaaactccttgctaaagccgaacagctaggggctgaaggtaatgtggatgaatcccagaagattcttatggaagtggaaaaagttcgtgcgaagaaaaaagaagctgaggttggtgagataagtgccttagggcaagagaaatcttagtaatttggcagcgttgaccgttggaattaattgagcccatgcttgctcccattttttaaaaaatttatacattttgggcccagcacagtggctcacgcctgtcatcccagcactttggaaggccgaggcgggcggatcacgaggtcaggagataagaccatcctggctaacacagcgaatccccgtctctactaaaaatacaaaaaaattagccgggcatggcgccaggcacctgtagtcccagctgctccggaggctgaggaaggagaatggcgtgaacccgggaggcggagcttgcagtgagctgagattgcgccactgcactccagcctgggcgacagagcgagac

SEQ ID NO: 81691 - DNA, 1033 bp, Homo sapiens
gaacatgagggaataatatttacgtggctcacaaagaccagtgagtacatcatatgcatctctcacaactccccagaagagggcctccagcacgagtctaggctcagccttttctgtccctccgagaactctatgaattgctgccaagtgttttaattttcctcagaatttctttgtaatgttattgagggttggaggtccttttacaaattttggaaataagtaaatcaaatgagaagaccatgcttccaaacaatcattctgtttaacagatccccttgatttaatgcaattatgaatgcgttagtggtagtgtagtttaagatctttcccttgaatgtacaggctttaaagaaacgaacctaggagtgtatttcctatcaagcaaatgggttctaagactttacgctttacacatcattgattatagcgctgtgcttttcccgtgctaggcaatggatcacttggagtcctttattgctgaatgtgatcggagaactgagctcgccaagaagcggctggcagaaacacaggaggaaatcagtgcggaagtttctgcaaaggtatgcttgggtggcttcggtgtctggtgtgttcttaaaaatactggcttgtcaatagcttttttttttgagatggagtctccctctgtcacccaggctggagtgcagtggcatgatctcagctcagtgcaagctccgcctcccgggttcatgccattctcctgcctcagcctcccgagtagctgggactgcagacgcccgccaccatgcccggctaattttttgtatttttagtagagacggggtttcaccgtgttagccggtatggtcttgatctcctgacctcgtgatctgcctgcctcagcctcccaaagtgctgggattacaggcgtgagccaccgcgcccggcgttgtcaatagctattaactgaccctcagcactgattgtgtggacagtactctctgccttactccagttaaggatagagggctgtgatcaagcattcatgtgtcatggaattctcatccct

SEQ ID NO: 81692 - DNA, 1035 bp, Homo sapiens
caggcatgcaccaccacgcctgggtaattttgtatttttagtagagatggggtttctccttgttggtcaggctgatctcaaactcctgacctcaggtgatccacccacctcagcctcccaaagtgctaggattacaggcgtgagccaccgcgcccggcccctctgcggctctttggaggtgtttagcgcacgtgcctagtgcagcacaagggcacctgtctgctgtgacagttctgactgacatcatgggcttttctcaggctcagtgaccaccggcctgtgtcagtgctgctgggccgggagagctggtaacagcaccaggcagtccgtgtgtggagggacagcctcctcagtggagatgacgtgtgctgatattgtccagttttgccatactgttaggacacaagtctttgtgctggtgctgtctgtgctcaggggcttttagggtttatgtttcataacgctactcagagatagagagagattgggtgactttctagtaagtggtaggttgtgattaggacttaatttttggaatcgaatgtcttttttttatcatttagatctgctcttttaagaaacaggctaaagttgagaaacactttgaagggagagggcagtagaacagaaagccaccttttaaagaacttggcagctcttggttggcttgttctctgttgtgaagtttaccatttatagttgttgttttctgtttgagccagtcttgctctgtcgcccaggctggagtgcagtggcgtgatcttggctcactgcaacctccgcctcccaggttcaagcgattctcctgcctcagcctcccttgtagctgggattcacctcgtaaggcgaattaaccttagcatatgatagttcttttagtgtttcccaccacccttttcagagtaagcaattagacgtctagagtttcttttcctctatctctttgggtaaatagcaaccagtggtgcccgccaccacgcctggctaattttttgtatttttagtagagatggggtttcaccatactggccaggc

SEQ ID NO: 81693 - DNA, 2303 bp, Homo sapiens
gccatggatggggcttcagcctccttcctatgtaccgtcctgctacttcctccccggcgggcgccgcggctccgtgcccctccgcgaactgtggagtcggcggagggctggaatcagcgtgggctccaggtcgctggcagccgggtggcagaactcttccgaggctccttgggaagaagctacacccgagggagccggatgggcctcgaaaacctggcccgctctggttctgtaccattgcaaggggaaccgtaaactgagcttttctaacgtgggtttctgccaagtacttttccagctgcccccttccccccagcacacaggagagcctctgtgtagccagcgcttgacagtcgttaggtaggttgtactgtgtagggaggagctcaagatcatgatggttgtcacaggagaaagcggttgcatctttgcaaaactatatacctgctgtggtttgtgttttcttttctgctgagtaatgaagttgtaagttcacactggcacattctcagggctgtgcagattatttgcactttatttcataggtgaataagtgctttttagctttctttgtatattgagttgcttttgaattgcttcccatatttttatttcatacaaactgaacaattgtggcccctctattttatttataaaggttcagtgtatctttgcctgcctacatcaatctgcaagggagttgcagaaagcctcatgttcatcgagccgtgagtcacaaccaatttctaagctgttataacaaaaaagtgtttgctttttttcacaagtaactttaaaagtgtagtttagaaagaaaacattttcaataaaaagacactacattaatcctggatgcttgcaaatcctaaaatatattcctcctctagcgttgcacagctctgtgttgtatacacagactagctttaaaatttgtcacataccactttacctttacttttatgtatcattcccccgacttccttactgcaggtgtgggcaagaaaacttttcctttaacacttttcaacagcgggcataaaattctgcagctgaggtcttgaagaatgcagatgggtacagtatgtgttggagctcacagtgtgtattgactaacctagttccttttttgctttttttggtattgtcttgttaaaagtgactcccaggtagcaactctcttttttaagggtgggaacgaaagggacgtaggaagaatagatctagattatttaacagtcttcgatagagtttgaaagctttcttcttcattcaattttgggcaaaatactgcctctgcatttgttcataacaaaaagattagattaataagtagcttttgttggtggaaattaccagctctataagtcacccttggtggttcatggacctctgattagcttgggttttgcagtctcattgccacatgtatatgtggagccaatggccttttggtgctcagctgtttacgtctgactccttgacttctttggtacagtgatggagtcagatctcattaagtgtgattctccatgatataactagcctcaaaaaaatgtgtattccactccagttgtaaatatctttagatcagcttttcattgcatttgatggggagaacacagaaatgatagtctgcaaatcatccaggtgaattgttatactagttattttttggtggttaatgtgataatattgtcttatttaaaaccacaaatgaatttcaggagacgaaaccagacagagggtcaagtttacagatgaccgtgtctgcaagagtcaccttctggactgctgcccccatgacatcctggctgggacggtaggtgcattttgggggacctcatggaacactctgacatgagtgctgtataggcagtgacggtttttctatgttgaattttgttttaacttaagtctctttttctctaagtggcttaattatggcaggtgttcctccactcgtatgtatgtttgcatgcatgcatgcgatggagtgtcactctgtgttgcccaggctgaagtgcagtggtgtgatcacagctcactgcagccttgaactcctgggctccagcaatcctaccacctcagcctcttgagcagctggtactacaggcatgagccactgctcctttctcaatcctccactcttcaacaggcagaaatccctgatgcccttaaaatgatagattctattcatttggtaggattttatattatggaacaaatttcactgttgtaaaattctgtctgtaaagttaccagattttttgtaaagtcatttatactgagatattcacaactaa

SEQ ID NO: 81694 - DNA, 1021 bp, Homo sapiens
acagctaactcgcctttccacactaattagagaccttcttaagtataatctgttaagactgacaccctaaacatttatttagcttttatttcctgggctggtggcccatagttagagctgcagccagtccccaagaagccgacgccagcagacccctctgtgctgcagctttgtgccgtgggactgctggcctcgccgacctcttgctttatcgacacagtgaccaggagttaaactttgggatgtgcccgtgatgttggaccacaaggacttagaggccgaaatccaccccttgaaaaatgaagaaagaaaatcgcaggaaaatctgggaaatccatcaaaaaatgaggataacgtgaaaagcgcgcctccacagtcccggctctcccggtgccgagcggcggcgttttttctttcattgtttctctgcctttttgtggtgttcgtcgtctcattcgtcatcccgtgtccagaccggccggcgtcacagcgaatgtggaggatagactacagtgccgctggtgagcctcggcttccccgcccagtggggtccaaagcagctcttcccaggggatggggcggagggggcagaactgtgtctgcgagtctagaagtggcctttaaacagtgaatcaatcccaagaggctgccagttctatgtccaaggttttcccggagttttagggagcgatagaccagcctttttatttttgagatggagtttcgctcttgttgcccaggctggagtgcactggcacaatctcagctcaccgctacttctgcctccggagttcaagcgattctcccgcctcagcctcccaaatagctgggattacaggcgtgcagcaccacgcccagctaatatttgtatttttagtagagaccgggtttcaccatgttggtcagggtggtctcgaactcctgagctcgtgatccgcccgcctcagcctcccaaagtgctgagattacaggcgtgagccacagcgcctggccctaattttgtatttttggtaaagatggg

SEQ ID NO: 81695 - DNA, 1021 bp, Homo sapiens
acgttggccaagatggtctcaatctcttgacctcgttatctgccctcctcggcctcccaaagtgctgggattacaggcgtgaggcaccttgcccggccaacttcactcttttggtgtttgattttagggcataaagtttatcacttgagtccttgaatgaaaggaagtgtaaaccctgacgagtatggagtgtggactgtctagatgccccctggtctagggagggatttatccctgaacagaaggtgccagaacatccaattcttaatgcccagatgtcctgcttgttcctttctgaaggttaacactaggcattgttgcccaccccctggttttcacgaaggaaattactcatcctagtgaggaagaagccaccgtcctcgttgggtgccctcacagtggcaggttccatgtagcagagaagtaggtcgtgctggacctgatcgttcctggaaaccaggcatggcccgcggagtatagtctgtggttttctctttcagttatctatgactttctggctgtggatgatataaacggggacaggatccaagatgttctttttctttataaaaacaccaacagcagcaacaatttcagccgatcctgtgtggacgaaggtaatttcattttatatgaaaaaggcggagctccctgtagaaagaggaatcgtcattttgggtcaccctctcgctttcagtgtttgggggaagcagatggtggtgtttctggaacccatctcgtcatccttcctggcagaccagaaagaggcctggaagcccagtcccagcactgccctggcccctgagccccgtggggtcagcattagagccccgggagcctgcaagatacaggagatccacctggcgggaggggctgtggcctaggagaggtgtgaggaaaacagacctggaacagcacatgctggggctggccggcctgcctgcccagatggtgcaacagtgaggtgccggtgtctctccctacaggcttttcctctccctgcacctttgcagctgctgtg

SEQ ID NO: 81696 - DNA, 1120 bp, Homo sapiens
cttcccagacaggattcgggtctgaccacttgccggggactcgcccagagccccacgttcccaactcccatagacccagcatactcagggggctccatctctaccaggcagctttggggcctccccaagaatggtggagtacacacttcccatttgtgctgttgcagtgttgggggtgaagctctgagggctgggagcacctgtgaggcactggggctgccctgcctgcctcatgtgccccgtgcagtgtggaggcaccaaccatcgtggcagactctctgatgtcagcgtgtctttcctcaaaaccaagagcctgtgggccccttacccttccacatctcccattgtagagtgccccgcccccaggctcacgtccctctcttcctgggccttgtgtcattgcagccccaggctcaggtccttctcttcctgggccttgtgtccttgcagccccaggctcaggtccctctcttcctgtgtcatcctgtgtcattgcaggttagtggccacctctactccggcagcaccgggcaccagattggcctcagaggcagccttggtgtggacggggaaagtggcttcctccttcacgtcaccaggacaggtgcccactacatcctctttccctgcggtacgttgtttctgccacatccctggccagcctcactcgtggagcatgactgccctgcggctcctcaggtcctgcttctgctctcgaggtgctggagtcaggaagcccaggggcctggctccatgtggcactgcgtgcccctggtccgggttcacagcgtgaccctggtgacctcgggcccttctgtgttttgaatagcaagctccctctgcggctgctctgtgaagggtctctacgagaaggtgaccgggagcggcggcccgttcaagagtgacccgcactgggagagcatgctcaatgccaccacccgcaggatgctttcccacaggtgggtccgggccgcagcctttctccatgcagagcgcccaccccatggctctgctcgcctgcctcagcgttcggacaatctgtgtggagcccagagcagccccaccggcagggaggtgctcggggtaccgcaaggtcaccctgggctcagatgtgagaaat

SEQ ID NO: 81697 - DNA, 1030 bp, Homo sapiens
ttttttttttaagacggagtcttgccctgtcccccaggctggagtgcagtggtgcgatctcggttcactgcaacctccgcctcccgggttcaagtgattctcctgccccagcctcccgagtagctgggattacaggcgcgcacctccacgcccagctaatttttgcatttttagtagagacggggtttctccatgttggtcagactggtctcgaacttctgacctcgtgatccgcccgcctcggcctcccaaagtgctggaattacaggcatgagccaccgcgcccagctcttctcttttcaagctgtagaactgagaaacgggttatgggggcctaagaggagcaccctgagacgggcggtgccagagcctccactgggtgcctgaggccgccccggggacccggcgcccctttctcccactctcctgtctagctctggagcagtgcgctacctgatgcatgtcccagggaacgccggtgcagatgtgcttcttgtgggctcagaggccttcgtgctgctggacgggcaggagctgacgcctcgctggacacccaaggcagcccatgtcctgaggtacagggtttccccaaggaccgcgcaggtgctgcaccccttcccggcatcccgggcacatcccgttggctggcgaggagacagcgctgggggtggggccggaggccgtgtgctgctgcccgggcttcttgcctgtctctggtacttgccccttgccccagacgtcggctccgtgtcctgggccctggtccagatgtggccatgggagactgaggggcggacgtgttcctgggtgcttccttcatctcagtctcctcactgagacccctcgtgagcgcttcctccatattgttccagaaaacccatcttcggccgctacaaaccagacaccttggctgtagccgttgaaaacggaactggcaccgacagacaggttcgttgttcttccttcggaggtggcacctttgttcttagctgaggatagactggtctgaaagcagacggggctgcggccc

SEQ ID NO: 81698 - DNA, 1080 bp, Homo sapiens
gcaagtacggatgtggtgagaaggacccggctgagggatggagcctcagttttcctggggaccacagcagggccccacaaggggtcgtatgtgcagaggattctgccatcttcctgggggtccctaggcccaggtcctgagggaggggctgtgaaggcctgaggacagcattcctgccctccctaaccacatcagggtcccgggccgacctgccgtcggttgtacccctccccaggcacagactgtgactacatccaagacttgtgcaggcccccagccccaccccgccttgaatgggggcttagggtgaccagtgagggaggcagtgtctgaacagggccctaaggagcgagttgacctcagttctagttggagagactggccagtggtcagtggagtctctcggtggtgggcaggcagggagatcctcagacacctcctgcccagcccaggcttcttcccagggaggtctgagggtggggtgacactggggaggcacagacgcaggcgtcctggacaccttctccctgcaccacgccagaccccgtacttctggacaagtaccctgaggccggctgcagagctggactatggtgagcaaggggacggctggccccagacaagttcccaggactgggggcctcagggtgatgccgtgaggcagggcagagctggcccctctgcaggctgtccctgttcttccagccatctacctggccaagaagaacatccgaaaacgggggaccctggtggattatgagaaggtgggaccccccacccttcccgccccggctgggtacagctggaggaacccaagcctcactcacggccccccggggcttcacggtttaccccagaacatacagcccaggccccaaaacccaagacagtccccaaccccccaactgcccacacagtctcactgggggcaggggccggggtgacccactggaaacctcgctgcccccaggactgctatgaccggctacacaagaagatcaaccacgcatgggacctggtgctgatgcaggcgagggagcagctgaggtgaggccccgccctgccccgccccgcctgcag

SEQ ID NO: 81699 - DNA, 1047 bp, Homo sapiens
cctagagggtcagtaggtttgggggccgccgagggccctagagggtcagtaggtttgggggccgccgagggccgctgctctctagcaggtagcccctgaccctgggctgccctcatctgaagtcttcgctcccccgccctttggtctccgagtcagggagggggcccttgtggacatctgggccagaggagctgcaggcctggcggtctctggaggcccctcctgaaggtctgggtgcggtgcggcacctccccaggccgccctgctctctctgctcgctctctccctgagcccccagaggcttcccttgagtccctttggatagtgggaggtacagctggccagagggggctccagcctggtgctcgaatgccagggtccgctagtggctgctgctcacgcccctccccacccccagtcctcctggctgacaaggagggtgggccgccggcagtggacgaggtgttggatgaggctgtgcccgagtaccgggcgccggggaggaagagcctcttggagatccggcagctggacccggacgacaggagcctggccaagtacaagcgggtgctgctggggcccctgccaccggccgtgggtatggcaggggtctaggcttggagggctgggtctggggggctggtgaggagcctggtgggggtggggggcatcctgcagacttccagtttctcctcagacccaagcctgcccaatgtgcaggtgaccaggctgacactcctgtcggaacaggctccggggcccgtcgtcatggatctcacaggtaactcgcaggatgctgcaccctgaacacaggtagggccctcccaggcacgcttctgcacccctgagttccgagccctgggccatcacagtcgcacacctcatgggtaccacaccctacgtgggggctcctggagcaggtctcagcctgtaggggagttccgaccctagctgaggtttccccaataggggacctggctgttctgaaggaccaggtgtttgtcctgaaggaaggtgttgattacagagtgaagatctccttcaagg

SEQ ID NO: 81700 - DNA, 1050 bp, Homo sapiens
cgtgcagccagccttggaggctcccgagtgagcactgggcggtgagcagagggggcctgaccccaagagcctggcagagcctggcgggtggttcccaccgtccacaagccactgtgcaaacaccccatgactgcagatgtggtgctgagggagggccccagttggggtcacctccatgacggggctcagcccttgggaagcagacaccccacacccgtccacttcccccctgcaactcctgagaggctggggcaggtactcccagggggatgtggggtgctcccagcaggcagtgaactcaccccccatggctgcccacttcacccacatgtggtcattgcactgttcactgttgccctgggagggggcgcacatgcagtgggggccgtggggcatggacaggaggctcctcgggatggggtgtggacacgccgtcccctgccacaggcctccttcccatctgcggtgctgcctgctcactgccctcctcacctccgtcctgcagatactacttcaagaaagtgagcgacgagtttgactgtggggtggtgtttgaggaggttcgagaggacgaggccgtcctgcccgtctttgaggagaagatcatcggcaaagtggagaaggtggactgataggctggtgggctggccgctgtgccaggcgaggcccttggcgggcacgggtgtcacggccaggcagatgacctcgtactcaggagcccgatggggaacagtgttgggtgtaccacccatccctgtggtctacccgtgtctagaggcaggtagggggtccctccaagtggtccacaagcttctgtcctgcccccaaggaggcagcctggaccactcctcatagcaatacttggagggcccagcccaagtgaggcagccgaggtccctgctgccagcttcaggtgacccccccccatcccccggcacctcccttgggcacgtgtgctgggatctactttccctctgggatttgcccacgtacccaggtctgggtggggcccaggcccggatgcagaggcctgcagggcctctgtcaatt

SEQ ID NO: 81701 - DNA, 1045 bp, Homo sapiens
agcacagacagggcatgaagtccaggctgcgttcctcacatttagaccattctctttgtcctgccaggtgtaggtgagggtgcactaggttggaagtcgtggaaacccacccacctgagcccaaccctgaagggcactgttgaggcagagcctcaggtgtgccttagggcctggcacctttgctttgtgccattctgactttgcctgcctggtgggcgacttcgtgggctttgtgttggaggtggctgctgcagtgaccttgggctctgggctcccttgtttacagatgcttcccgcagctctgacggatgggcccgctgttgctctgaggagggcacgtgtgccgctgtgtcccgtctgtctcagcacagtcacggtgcgtgcgctgggggctgtgcagcagggtcactcctgaaggaaagtgggttctccacccagacagacggctgctccccagtggggagctgggggcagtcctccaaaggaaggctgcgggtaatgcaaagggaaaaggagagtgggtactgaacaggcggctggtgagcattgctaccacagcagggcctggagcttaggcctcacgtgttaggggatgcatatcctgtggagagccggttagtcgtcccggtgtgtccggaattggtgggttcttggtctcactgacttcaagaatgaagccgcggacccttgccgtgagtgttacagttcctaaaggcggcctgtccggagtttgttccttctgacgttcggaggtgttcggagtttcttccttctggtgggttcgtggtctcactggcttcaggagtgaagctgcagatcttcgcggtgagtgttacagctcataaaggcagtgtggacccaaagagtgagcagcagcaagacttactggaaagagagaaagaacaaagcttccacactatggaaggggacccgagcgagttaccactgctggctcccgcagccagcttttattctcttatctggccccacccacatcctgctgattggtagagtccagtggtctgttttgacagggcgctgattg

SEQ ID NO: 81702 - DNA, 1231 bp, Homo sapiens
ttttgtatttttagtagagatggggtttcaccgtgttagccaggatggtctcgatctcttgacctcgtgatccgcccgccttggcttcccaaagtgctgggattacaggtgtgagccactgtgcccggcctattttttttttagagacaggatcttgctctgttgcccaggctggagtgcagtggggtgcgattatagctcactgcagccttgaactcctgggtcaagtgatcctcttgcctcagtcttccaagtagctgagactacaggcatacgctaccatacccggctaattaagaactgttttttggtagagattgggtctcactatgttgcccaggttagtcttgaactcttgggctcaagggatcctccagcctcagcctcctgagtagctgggactacaggtgcgtgacaccacgcctggctctgtggatccttcgtgcttccagccgtgagcagctgttggctggtaaagtgtgtgcaatgtgaggaagttggtgtgggggacagattccacatagacaagggacagcagtgtggagtggtggctgggggatagatcccccttcagttggtcctgggttttagggttttatttgtttgctgtgacttgttcagcactctaggcttttgaacccaacatgcttctctaaagccctctctccagccccttttagccaggaccacttacatcatggcaggctgttgtttcagtcacctgcatggccgggttgacaggcatagccagagctcctgggctcctgtaggacgtggcaggaaggaccatagaccatggcaggggttctgttggagcccttatctactctcttttgcacaccccttgcaggcttgtagcagcagcagcagtagtagcagcaaattctatagttccctgatgtctaagagggtgggtggtttggttttcagcttaaggagtgaagtcacatgaactatagcttccttagctaaaaattgtatttgcatttccttttattctgtaccttctctgttccttgaagtacccatttactatttgctatctgaatcctcatcagagaggcttttcagagtcaagtgcagcattctgacagagcattttaagattgtctccagtgacggtgtccgagcgcctctgtgggcctgggtggtgtccttgatccctcggtcgatggggctgaaggtgacccatgattatctctctttgaggcgtgtgttgagagtcggagga

SEQ ID NO: 81703 - DNA, 1032 bp, Homo sapiens
agtgctgggattacaggcgtgagccacctcacctggctttggtttcagttttaagatctccattcagggacaaggatgggaaagcatgaaaaacagactgtttttgtttgattttcagctggtgttgacttgtcttgggtttctagtttcagaaaagctaagcagactttttcggattacattggtcattgagaatttcagtgatgggggaataaattacatgtgaaatagtagccctgaaccttcaagagttaaatcaatggacagctgggaagatgtcagagtcgtgttgtgttacttgcctcctccatgtaaatcaaaatgtcaaaagttacgtttgggtaaaataaatacctacacacgtaggtagcattgagtttgctgccatgatgcctggagcatatgcctaagcggtgacgaaagggaattttaaatacagtatcatacttgtaggcatcccgcccgttttatggactcactttattgatggtagctacaggctgtgggccagattcagtgcttgcaggcatttgatactgaactgagtaaacgtgactgctttatgtgtggtgtgtacttgtgtgtacactaaatgcttggtgtgcttccctgtgggaacccagagatttcaggaattgggacatgtttcaacaacatcagtagcttgtagaggggttcatgtgcttccagggacaccaaaaagtcttctgtcagttgacagccaaaaatacacatgattgtaagaaaattttcttctgggctctgaaaatttggttcacacatgaattaaaacattagttttggggccaggcaaagtggcctgtaatcccaacactttgggaggccgaggcgggtggattgctttgagctcaggagtttgagaccagcctggccaacgtggtgaaacccaaaatacagtaattagccgggcgttgatgactcgtgcctgtagtccccgccacttgagaggctgaggctggagaattgcttgagcctgggaagctgaggctgcagtgagctgagatcgcccca

SEQ ID NO: 81704 - DNA, 1041 bp, Homo sapiens
caagcccacacgcagcgcccgcaccctcaccctcagaccctctccgggtgtcccgaggaagggtcaggggaagagacaaagggagcagggtgaggcaggatgaatcctgacggacctcggaccccaaaaccgccccggtgggtcttccacgtcaggtttcacatggaggcggcatcaaagacccccgactgatccaggccggcgtcccggccgccactccaaggttaggagacaagccatgtcaagtcggtgccgtttaagcagcattttttcgaggagaaaaaaaaaaaagaaacagaagcgatataaagaaaaaaaatgtccacctatgacacgggaagcggccagcccgatggatcagaagcgccaaatcccattactcgggacttcagggacaggccctgcaagggcagctgcgattaagagcttgtcaatggactctcctttagagatcaaagcggggcgtgcttgtgtgtgtgtgcgtgtgcacgtgtgtgcgcgtgcacgcgtgtacgtgcaggagcggacactgtggggtgacagcacagaggtcgtgcaccgcagcaccacggggcccatacgtcgccgacgcggccacctccacactgcttgcgtccttgctgccgtgtgcgacgtgtgtggacgcggctgggggcctgggccgggtacctggtcccaacacctgcaccctttcaaaggcctccacctcctgctagaggccgtgccttccccaggttctgcccagaggagcccgcaggggccgagctgggtgtgaggacagccgtggctgcgtctcctccccccgaccacgtcctgctgcccacagaggccttgagctctcagttggcctggcaggcgcgccctgggggttcaaagctcccgttgacacgattgttaggttattaggtaaactctgagacgtaaatcttttaatccactgtggctaatccggttcacttttgtttgccacgacagacgccgcggcgacaaaggggcctggggcccagcacacacagtcacacgctcagaacttggccgcgg

SEQ ID NO: 81705 - DNA, 1144 bp, Homo sapiens
tgtaactccagccctctgctggccccaggcacgggctggattgtgtggggctcccaggctcccttgagtccctgtccctctgacacccaccagccacccaagctggaaccctggccacatggccacacccagcagcctgggctcccgtgcggtcctggctccctctgccgcagcgccccgcagccctccctaggcgggctccagccttggaccatcctccctaaccactgcctgctgtcctgggatggtgtccctacccacatcctgtccccagacaagctggtagctctgagcatggcatgggaagggcttcaaggccgggttccatcctgggacaggcggctcacaaccaggccagtgcgaagaagcttggatccggacccagagtcctgggggagcagccgcggcccgagacccccggcgcccagagtcctgggggagcagccgcggcccgagacccccggcgcccagagtcctgggggagcagccgcggcccgagacccccggcgcccagagtcctgggggagcagccgcggcccgagacccccggcgcccaggcccatgccaagcccggttccctgggactggccccgaagtcgctctcttgaaggtggatccccatggaccatgctccaggctcccctggatcccgggtccctctgatggccttggtagtggcctccctgggctgcagcagcccaaggctctcgcttgctccttgcagtcctgcagctgttcatcaccagattctgctcatcgggtgctgggcctgggccaggaagtgggactcagcttcccgggcttaggggaagccttcgaaggggtcttggccaggcagtgctgctgtcagagcgcgtggacaagccaacactgtttctggctgtcacggggctgggggcagggggtggttccggggatgctcagtgccctgcagtgcccaggatgtccacgggtgacggttgagaagcctcgtctccagacatacgggaaagctttgccaggggccaatgctggtgcgccctggagggaagaggcgttcttgggacgcaagagggcactgcagcccaggggagagcgggtgcagccgcaggtgtgtgactgatggcgagacggtctcctcagtgtggccaaagacccagagtcc

SEQ ID NO: 81706 - DNA, 1053 bp, Homo sapiens
gggcctgctcgcagaaattcccctgccactatcagatctgcaagaacgatcgggaggaactgtacgcagtgacgtgacactggcctggggacagctgctgctctgatgacctcttcagccaggagctgtatcgagggggaggcgcctggtccagccctggacagattgatttccagctgaataaattggcctagataccctcttacttcctcctactgaggagagggccacccctccctcacacgcacctctcctcgccagctgcctgctcgctgctgagatccctctgcagatcccagctgctgtctgcagtggcccctggggcctgggcttggttacttggagaccacaggtgcctgtgcgagggtggggctgtgtgctctgctggcctgtgggtggctagagatggggagaaggactccctatggtcctgttccctggcgaggctgtggtgagacccatggcgcccaggagccctgagcccaccactggggccgggagctgtggactccgagacccctgctcctggcccctgtgtggccctgatgccagcctgcctggggcatggaggatccccctctgctgctgtggtcaccatagggacgggagacggaggtttcccccagagctgatgggcactggggatgcaggctcccgccccgcccctccctttttcctggctctggagccttgggtccctgagaagagcttccttggactggggtgctctgctgctctgggggtttggcccagaaggaacccctacccagccctgtccacccaccccagcgttcctgggcccccctctgggagcttcctcttggtcccaggagctgcggtggtgtctgccccctgcactgggctctgtgccctgtgggtgttcaggagactggactgtctctgctcctcatgcaaaccttgtgggggaagcaatgaccaggagcagcacctggcccctccctgaggcctgtgagtgtctcggatccgccctggagaagtgagtggctgagacccgggtggggccctcctacccttggctctgggggcttccct

SEQ ID NO: 81707 - DNA, 1054 bp, Homo sapiens
gtcttctgtgatgccacacggagatgcgggtctgagaccccgcaggcagttgtgagggggcagtgccagctgtttggaggatgccaggaaggaaggtggtaggcaggggaggccaggccccctgccttcgagaagcccccacccatgctccctgggtccttggggccaatgatgctttggggactctctgtggcagctggccctggcaaggggagactcatgccctgggcttgtgagctgcatgctctgccctcccatctgctctgggaactgcaggctgggtactgccccaagggggtgcccatgggagccccacagccagggcagaggggaggctgggaagcaccagggtcctgcagggctgagtgcggggcctgaacctgcagataggcagagaactgtaggctgtgggcagaggtgtctgatggagactggggggtgggagcccctccccatggaacagtgggtgggagactgaagccaccctgatgggggacttctagaaacccagtggtacagggggctagtgagtgtgtgggtgcagagcggccatatgcgtctgtccagtttgtgtgagcatcgtctaatcccccagagatgcctgcctggccacattcacctgtggatgcaatacagaagctgaaggaggggcatgtccctgccggctggcagagctagtcagaggctggcagagctggtctgagggtggcagcagctccgagggggcaggcagaggtgctgtggggccgtggggtacgcgtgctcctgctgggccttgagccctcagagacgtccctgcagtcatccctgtgtcttgcgcaggtgctgtttcttctgggtacactggtcatcgccatgtccttgcagctggaccgcaggggcatgtggaacatgctggggccctgcctctttgccttcgtgatcatggcctccatgtgggtaaggagccgggctggctggcactgctgcccaggtgctcggagaagagagcctggccccttgctctagccacgttcctggtcctgctccaaccagtgaatgcccatatctgctg

SEQ ID NO: 81708 - DNA, 1046 bp, Homo sapiens
gccagcagacacctggaaagcctggagtgcgtcgtgggtggagcctggccagcccctgcccagtcgccacgccaggttcccctggagcttggcctggatttgccgacaggctgctattggcaggtgtatcgtttcttctggtgcctctatgggagggtcacgaggctggcaggagagcctgctgctcacctgtctccctcctcaggaggggcctgggcctgagccagccactctccagtgagacctaggcagcgctcctgagtgtgtggggagggggagctgcagcagaggggagggtcccgccccctgctgtgtccactgtgcttttccttctgaagcctttgtcgttaattaacctcggagggaggggcccccaaagggatgtgccctccgccctgacctacccaggagaaggctgggacccagggagggaaggatgcccaaggtcgcaagggcacgaggctggagctggcacggggggctgggggtgagagcctgagtcctcgcctggggccatgagcaggatgtctcccacgggcccttctccatccccgcaccaggcgtgggtgcgttccctgaggacagttaggagccttgcccgcttggaacgcagagggcagctgtccccttgttctcatgactggccaggcttctggcctgggtccctcccacatgcagtatctccctctgggtaaggggaatttgggctccggtctcgccgtgtccaaagtcatcatagcccaagcaggcagccaacccatccagggatggagatgtgggaggctgagaggaggtgggaggaccgtgccttgatatccagggcatctgtgatgaggggcgggggctccttcctgacacctgctgggtccttcggcttcgacctgggttggccatggggagtgtagtcttctaaggttggagggggtccgggtggcagtgcgggtggggatggcagtcagagtggcgatggcagtgcgggtggcgatggcagtgtgggtggcgatggcagtgcgggtggggatggcagtgtgggtggcgatggcagt

SEQ ID NO: 81709 - DNA, 1050 bp, Homo sapiens
gcggagcccacgcctcggggagaatttcctgcgtgttccgagcgcgcccggcgcgacctctccgtcctgggacccccgcgatccctccatcccgcgccctccctccagcgtccccccggaccgcgcgcgccccggtccgtcccccgcgcgccccacgtgacccctcccccctaccggcgccccacgtgacccctccccccggcgtccgcgccccccccggtcccgccccccgaccccgccctcgccttcccggctcggcctgcggggcggggcctgcgggcggaagtgcccggggcgacggcggcggggaccggccgggccatgggcgccgggggcagaggcggaggcggcagaggcggaggcggcagaggctgcccgggcggcggcgggggccggcggcgcgggacgcgggccgggtagcgccgggccgagcgcggagccatgggccgggctggcaccgggaccgggggcgaggcggtggccgcggtggtggcggggccgctgctgctgctgctgcttgcccggcccccgcctgcctccgccggctacagcgggaagagcggtgagcgggaggcgcgggcgccatcgggggcgtggggccggggctgcgggcggggcgggattgtgacaccccgggcgcacctgtgcgctcatctggcgccggcgcggggttgggggtccccgccgcgggttgggggtgcacagtggccctttggggcgcttcgtgtcctaggggtcgaggcggacgggaccccgcgcttcctcctcggtcccccgatcggggttgggccacatcggcccctggagcgccccctcccctccctcctcctcccagagcgcccaggtccggcgcgcccggcgcggggaagtggaggggcccaggggactctgcccgggactccagctgggaggagtggctgggccgtgagctcaccggccgggtccggcctgagagaggggcagagccgggagaaagttgttagaccctgtagcgggggcccgtgggcgtcatggctccagcccttccgcagtgacccccagccctggtac

SEQ ID NO: 81710 - DNA, 1089 bp, Homo sapiens
gatggtctcgaactcctgacctcgtgatccgcccgcctcggcctcccaaagtgttgggattacaggcgtgagccaccgcgcccggccccggacccttctttattggcctcaaaacgggtcattttgggaagcggcgcggggctggccgcgcttccctgggccccggccctccccatggtgtttacggggaggcgaacggggagcccagaggctgcgagcctggcctggacccaggagccaggggtatcccacaagtcctggaggctctgaacgcggcgctgacgccgaatacctgtgaaaaagactcggggaggagacccgcagaccgccgagcttctgccgcgggaaccgcgcccccggccccgcaatgcgcctgcgcctcgcgcgccgacttccagtcccagcaggccgcgggcgggggcggggcctccggggagaattcgggggaggggcggggcctccgggaagcaatcagggcaggggcggggcgtccggggagtggggcggggctcccggttccaggcgagttcgcagctgcgcgccgggtcctggaggccgaggccgctcccgcccgttgtccccgcagtccccgacgggagcgccatggcccagccgccgcccgacgtggagggggacgactgtctccccgcgtaccgccacctcttctgcccggacctgctgcggtgagcggggcctgggaagcgagcgcagccttggtgcggggtccggtccgcgggcgccggcgcccccacgtggtccccgagggctcgcgtgttaggaaacctgtcttgcctggctcctttctttcttttttctttctttttttttttttgagacggaatctcgctgtgtcgcccaggctggagtgcagtggcacgatctccgctcactgcaaactctgcctcccgggttcaagcgattctcctgcctcagcccggctaatttttatttttagtagagagggggtgtcaccgtgttggtcaggctcttttcgaactcctgacctcaggtgatccacccgcctcggcttcccaaagtgctgggatttacaggcgtgagccaccgcgcccggcccaacctggcctcttt

SEQ ID NO: 81711 - DNA, 1071 bp, Homo sapiens
caagcagtcctctcatcttagcctcctgagtagctgggactataggcaggcatgaccatgctccgctaatttaaaaaaattggctgggtgcagtggctcacgcctgtaatcccagcattttgggaggctgaggcgggcagatcatgaggtcaggagacggtgaaaccccgtctctactaaaaatacaaacatttttaaaaattatttttgtagagatgaagtatagtatagtgatactgcccaggcatattattgaactcccaggctcaagcgaccgtcctcgggcctcagcctctcaaagttctgggattgcaggcatgagccgtagcgcccagcctggcatcgccttttatttgccctgtatcatttccagtctcttagccttgaatttgagtgaaagtgtgtgtgaatgagagtgagcatgtgtgtgtgtgagcagttacatatgtgagctggtgtgtgtgtgtgtaatatgtgtgtgcggtgagatgtgtgggagcatgtgtctgcaggatcagggatgtgtgtatgtgggagtgggatatttgtgtgtaagtggcatattatgtatgtgtgtgagcaggtgagtgtatgtattctgggtctacatgctgactgaattgctgaaaggcaaatgaagcttgggttgtataaaacagaaaatgaccaataatcccactatcctgagaaaaataacattcccattattttactacatttcttttcagactttttttttttttttgaaatagagtcttgctctcttgcccatgctggagtgcagtggcacaatctcagttcactgcaacctccaccacgtgggttcaagcgattgtcttgcctgagtctcctgagtagcttggactacaggcgtgcaacgcctggctaatttttatatttttagtagagacggggtttcgccgtgttgactaggctggtctcgaacaccagacctcaagtgatccacctgcctcagcctcccaaagtgttgggattacagatgtgagccaccgcacctggcccagaccttttttaacacagacatagacacacaggtgactgtctataaaa

SEQ ID NO: 81712 - DNA, 1040 bp, Homo sapiens
gaggtgcaggggcgttggaggaggtgcagggaagtcagggaggaggtgcaggggcgttggaggaggtgcagggaagtgagggaggaggtgcaggggcgtcagggaggaggtgctggggcctcagggaggaggtgcaggggcctcagggaggaggtgcaggggcctcagggaggaggtgcaggggcgtcagggaggaggtgcagggaagtcagggaggaggtgctggggcgtcagggaggaggtgctggggcgtcagggaggaggtgcagggaagtcagggaggaggtgcaggggcgtcagggaggaggaggtcctggggcgtcagggaggcggtgctgccatggcattggacacatggcctctggggctgcggggtctgctttacttttgagtaatttgatgtcatgatttatgtttcgttcggaaggagagtgaaactagaataaaacgaagtcgaagatgattttggaattatttcatagcatttagaagaaaggaaaatgtgatcatccaaaccgcacttcagccaaagttcacttcaggtgttagctccatcgtggctgcagcagcctgtgttgtctgtcagccctgtctgcgtcgaggagtgaccagcaggatgtgctggcctagtttgctgggaagcacaaggaggctttcctgtcacagccacaggccttgtttcaggaatagaatgagatagagagggattgttccaaataggccattgctgtgtctcacacaccctcacgctttggaagaataagggaaacgcacgtgaaaaattcctaattaattgaaaattgttttagtttttataaggaaaactaatatgagaatggtatttaggtcctaccaagaatataaaaatgccatctgtgttcatatcccctgctccgccctctggggcaagaccctcagattgtttgcccactgtcagaacctgagctgtcatgcgctgtgtccaaaatgcttcgctgtatattgaaagtttttagttctgtgtttcagtgtttataagcgcaggcaagactgttagcatt

SEQ ID NO: 81713 - DNA, 1095 bp, Homo sapiens
gtggcctgttgagcacgaggtcttctccctgcagatcctgatggccagtgctacggtggtgtcgcttctgcccaagatgaggagcccctggcctgcccggacgagttcgatgacttcgtcacctatgaggcaagtggttttcacccaggagcttgggggaagtctggcatccacctcttcctttatgccctacagctcgtgcctcctgcctccgggctgtcttccgtagaagctggcgtgaaggaagggcctcccgccctgtgtgcaccgtggggctctgtggctgtgacgggaggcccacagttgtctgtcccacacgccctgtcagcctgggcaggaatcctcccccagggcctgtcgccagcagaagtggggtgggcagtgatgtcatgaccacccgctgccaggctggcaggcacaggcggagcagagggcttgggaggattccttttgtcaacttgcaaatgattttctgtgtttggggatgcctgactaatgcctgcccctgcttggctgtcctccaccctgctcccagatgcagccagggttgtcatggtgacgtggcgtctcctgtgtctcctgtcactgtgggtcccttgttctcaacatagctggggagagggtcttcgagcacagccgtggtcgacagagcgtaaccatgtccgccggtctggagggttagattccaggagagccacgtggctgcagcagaaaatgcatgaagttgaacttgagcccttgggggccgccgggaaggtggaggtggcagccgccagtcctggtcagcctgctgccgagcaagggtaccagaagtggggctgagctgctggccggtagggcctgggcttctcatgtcagtcctctgagccctgactcctcgaaagctgaggctggcacagggtagtttttgagttgcttttggacgccactgtaccgtgggagccatggtattatactcagttccctgttccgagaagctgccccagggattagtcaccctcacccttgggtgggcagcttaacttctgcccacacagaccctgggggtggttctgccttacggcggtgtcccagttatcagctgggctgcagctt

SEQ ID NO: 81714 - DNA, 1089 bp, Homo sapiens
gatattgcacgactgcactccagcctgggcgatagagccagactctgtctcaaaaaaaaaggtaaagaaacagatttatttatttattttttttttttgagacagggccttgctctgtcacccaggctggagtgtagtggcatcatcactgctcactgcagccttggcctcccaggctcaagcgatcttcccacttcagcctcccgagtacctgggactacagtcgtgcgcatccatgcctgggtgatttaaaaatgttttttgcagttgaggcctccccctgttgcccaggctggtctcaaactcctgagctcaagccatctgctcgccttggcctcccaaagtgctgggattacatgtgtgagccaccgcatccagcccactttttttttttttttaaacgtggctcccaggactcacgtgtggcttgtagcacaccctatggaaagcaccttccacaccctcagctcgggggtgccctggccttcagtcagaagacatcatttctgttttactttgcaggcctcacccccatggccagtctgtcatcacggtgatcgggggcgaggagcactttgaggactacggtgaaggcagtgaggcggagctgtccccagagaccctatgcaacgggcagctgggctgcagtgaccccgctttcctcacgcccaggtaatgacgccttgttccagcacaccctcctccctcttcttcccgtggttagtagtgggaagtttccctttttggttcgtgcattggtgagagaacttgctttccttgacgtcatgtgattaagtaaaccatattcaaacattttaaatttatacctggatttatgaaagttgggagaagtccctcttctccagccacatccccagatcactctacatttctgaggcttcagcaaaatcctgtggcacagagctgtgtttgcacacttggcttgcgggctcctttgctgtgggccgtggatcacatggtggtctgtgcaggcttttgagggaggcctcatgatcataagtgagtcttcagattcatttccttataaatatctgacatccccaaactggaaagctgtgactctgaata

SEQ ID NO: 81715 - DNA, 1021 bp, Homo sapiens
gagcctctcaggcagcgggactctccctggggccccgcctcccaccctgcacgctgtggggccaccagggccctgcctcctcccctgcatgcgcagcccaggccagtgcttgtcttggtgggaggaagtgatcggtctttgcaagctgtgctgtctgtcctgtgtgtgaaagaggatactttctgcattttactaaaagatttctttcattgagctcatgagacagaattgggaaagttaaagatttagtctttaagaacagatatgtaaacagctttcaggattgtcagtttaaatggagttttgaatactcacagtgagcgtgtgagggagctcactgtgtctcagcaggggagctcttgtggctggccctcatgtctaactcccagttacagaagacggttttgagtgctttgcacatattgacgtgcccgttgggcatcgtgttgatttcgcttgcggtgaagcccctgggtgggcagctctccagaagggtctggtgaagaaacgggccactttggagctttccacagcagccctagcctagcagaagaggtgagtgagcatacaggctcatgctggcaatctgggacggcttcctgaagaacgggacctggcctgtggggagggtttgtaaaggtggcagaaaggtgagttatcctgacggttctagcatgtttagaggtatctgtgaaactgcttacctgtcttgagcctgccctgtccctgccccagggggcttctgccgaggcacatccttgctggcgggcgctcactgcccacggccttattgaggcttctgtcctgcctctagttccatttccagggcacttaactcttcttatgttctgtgaaatgctgtgaagcacagggcccccagccagtgcccattcaggtggagaggatgggggtggggcccggcactgatggccattctggagcatcgggggtcttggcagcactggtgagaaagcagaagtgctctttgaagagggtcttcccgggagacccgaggccgccc

SEQ ID NO: 81716 - DNA, 1906 bp, Homo sapiens
gagcatgatgcatcagtgcctgagtcgaagccagcggcaaactctcctgtcacagcggggcctgggtcacttttcacttgggggcctccgaaggccaagcgtttgggggtaatttggcttcagaagcattgggacagtgcagccagcgggtgggaccaggtgtggcgctggcctctcagtcgtggtctggggtggctgcatctggaagcctctttgggggctggagtaacgagacgtatgcggcctcaccccagcactgccgtgtccttgctgttttgctgagtgagcatttgtgcatggacttgcctggggggccctgcatgccgggagcattgctgaaaggccgcccacctcgtatctccacagcctgagtttcctgcttcctcctgctcctctctgtctgttctaacaattttcctgtttattttgttttctgcacagtccgacaaagcggctctccagcaagaaggtggcaaggtaggtgggtctctggttcctgctgaaaaacgttctgaagtggataattaatcatagttttttaaaaaacattttaaaatgttcttttccaaggtattttttaaactcttgcaagttactttacatggtttggggctgaaggtatcctgaaggagtgttgggaaaggggtttccagggctgtgaatttggacctggatttgtgaccagggagggtacgtgtcagagcttttggtgctgggcctcttgtgtgttcactaaggtctggaaggggccgccatccccagatgtctgctctatgttagctctgaggtagcgagacccagtgaggagcctggcttctcagagccgggtctgggcagctccccaaggtgagtcgaaggtgagggatgggtctgactccaattcctaaagaccatttcttcattttccagcttcgtatagatctgttggcttcctgctgtgaaagatggcaacatacacttttatcttcctcccctgccagttcttaccgaaataaacatgcagggttaaggcccttcccagggagccactcagtgtggctgccgggtggcctctgctgccgtcagagtctgcctttgtgtctttatctgctttgccttcctagtccccgtcctgcttcgtggcccggcatctggcagggctgggagacgcctctccagcttcctctggagcatcccctctggagcctcctctctgccctgttgtgccgggcgttctccaggcctcgtggctgtggtcctggacaggtctccccacactggtgggttcctttgtttcgggggttggatcctctagctccctggccccgtcttccttctcatttgttttctctggtttttgtccagcgtatcttcctgtagcttcttgagaaaagaggtgctcaggagataaacttgagcttgggttggtttgtactgtgagagtgggatcattttcctgtaagatttttgacggcattgcttatcttctagagctaaagttgttaccatgaagtttaacctttctgactcggtttctttgggaccagcctgagcaacttagtgaaaccctgtctctacaaaaaaaaaaaaaaaattaaaaattaaaaattaaaaaaaaaaaaggaaaataggcaaggtctagctgcgttgcccaggctgtagtgcagtgagtggcaattcataggtgcaagcatagctcacaacagccccagactccctgggcttaagtaatctttccacctcagcctcccaaaattctcggattacagaggtaagccaccacacccagccaagaacagaaaccttttgttttccattttcttttattttgagacattgtcttgctctgtcacctgggctgaagtaccgtggtgcaatcacagctcactgcagcctggacctctcaggctcactccatcctcccacc

SEQ ID NO: 81717 - DNA, 1891 bp, Homo sapiens
agtggctggtcccctgtaatgctgcatctgtgtgacagcctcaagccctgctggctctctctccgggcacccctcacttgcttcttgccctggccttgggcagcactccggtaaccccagtgccacaggtgaggaaccgaagctggagacagctgttcatggcaggggaggggccgagggaggctgagcgcctggtctctccctcctgctggttccaccagttcacacgaggcaattggagggaaggattctgctgcccggaaaatcctccggaaccacaggtgttgttcatgggcctgagccgctcagtgaagaactcggccgttggtggccgagttgcccctggtccagccctctggcccgcggtgtgatgcctctactcatggcaacaggcgtggacaggtgctgagaaggaggacgacatcattaaacaaaacagcttggggtctttgaaaaacagtgacagaaacccaggaaggctggtgacttgtcaggtctgtgtctgtcctgggtggccactcggccctggaccgtgaggctgaaatgacaggagacacggagggtgggcttgggtggtttcctcataagacacagaagaaggaggcccccaacccgggggctgcctcgtgcgctttgctctcctgttttcctgctctgtccctctggtcctgccctctgacccctggcacagcaggagtgcccagaagcccagtgggacttgttctctgcctaaagcccttccgcatccctcgtacccactcggtgtggatgtgggttttctcaccaccaggctgtgcctcagctgtgtggagccactggcctctcatgccccacgctggagagaacgctgaggtctgtgcggttctcatgtgaccctgtagctggtccctggctccccactgtgggatctgcctgcagcacttacacttgggaccgccctgtctccctgctggatgtggcgccgagggcagggtccgtttctgtttcttggtaggcctagtgtctagcgctatgcagccgtgcgcagagcaggcggtcagtgagcacctggggttggccctcaccacaggcagttctgaatacctgggttctggcagcccagggggactcctgcgtgctccaggaaagtagcacagcagcccctgtggcgtggacacggccacacctgagctcggcctgtttctgagtctgagagaacaggcttgctggcctgtgatctttgcatgtgtgtctcgctgcagggaggctgtgggttggggctggacctagacccgttcagccacaccctgtcactatgtgggtcacacacagctgggtggagacctcccggtgcgtggcccagggaggtgtctgggcgtggagtctgtggacagccacattgtaccactaggacaggggctgctgctgggcccacagggtgcacggaatggggtctgtgggaggatgggggcatcctagcccagggcagggaccccgtgggccccccaagatgagctgcgtcaggctgttgctttgcacactctgaggggcctgcctgagtgctgcatgggaagccagcagtgtggccgccctccccagaactcatccagggcaccagggtggacccatgagtcccgtcgggtcatgggcatcagcctcgccatcctggcctccagatacaacgatttgtcagattccctgaggtcaaagggaagcttcaagggttgccatccccgcctccctggcggtcctagacgggatgtcaggaggacgcagggccatcgctgctttttaaatgtcacagtgactgcagcgtctgctcctctgtggaaggagcttgctccgctaatgagggagttcctcctcatggccttcccctcacttctcttcaaaaagttgccctttattttaa

SEQ ID NO: 81718 - DNA, 1031 bp, Homo sapiens
ccgagatgcacgaccttcacccccctcaaccctccaccgtggccaggagggccccgagccccgtctgatgtgccgcaggaggcgagggcttcccaggggcagcgtggagaccccgctgaagtgcgaggtcgggatgtacccgtgctccgccctctagagtccaggatggcatcacccacgggtcaactggggcgcagcctgcaccctccccagcagggccagggccagagtcgtgctgccacccactgggggctgcgctgtccccctgggcccacacgtcccctgctcctcacctgtcgccagccggtggcctctccactagggctgagggcttcctcgacacagggccggcgccaggtctgtggctgtccacgctccacccgtccctttggggctcaggcagtgcttttgggcgctctcctgggtggggtcttgtccctgccaggtggagcgaggccaccctgcccagcctgagcacatggccgtggtctctgcagaacaatgtgagcttcgtggatgacagcttccctcccgggcccgagtctgtcggcttccccgcgggtgacagcgtgcagcagcgtgtgaggcagtggctgcgaccccaggagatcaactgctccgtcttcagggaccacagggccacgtggtctgtgttccacacactgcggccctcagacatcctgcaggggctgctggggaactgctggtgaggccttctccaaggccggggtggggcgggtgggcgggcgaccggccgcggtccccgcgaggtcaccctgaggctctgcgcaggttcctgagcgccctggcggtgctggcggagcggccggacctggtggagcgggtgatggtcacgcgcagcctgtgtgcagagggcgcctaccaggtgcggctgtgcaaggacggcacgtggaccacggtgctggtggacgacatgctgccctgtgatgaggccggctgcctcctcttctcacaggtggggcggcctgcagggtgggcacgggcggcaggggcagcctctgaccccagcc

SEQ ID NO: 81719 - DNA, 1048 bp, Homo sapiens
ggtcagttttcccccagagcccgggtccctgtcccccacagggcaggcggggtccctggagccctggtgtggagcggcgagtcccggggcggtgcctgtctcagaagaaggggcccttggccagccccccagcgacactatgcaaatcctggagtgcccgccaggatcgaagccatgactgggtgcaggcgggcgccaggcccgctgtgggtgggcaccagttctcagcaccgctcactgctgccgggcacactgggaccagcaggctcctcagccaaccctgtccctcggcccggccctgccagagagggaccccagcacatcgtgggcacgggcagggctcagccgctcccacctccccacagaagcccaggagtgtgtggacgtctgagcccagctttctgcgtgccctcctggcccctcactcccggcagcgggccggcctcgcccccactccccctcctaccccggcaggggcttccggggccttttcacctggagaaacattcccactcccctttggcctccctgtactctgagctgtgaatatttttaaccctgtaaatacggccagctcttgtgacacagagactattttatcaattgtcagtcccgttcctttaccataggattctccacagtggcttccgactcaggctccaatggaccaaataaaagcgttttgttttgtaatcacgcctcctcctcctgctgttgccccgcgcagggccctgtggaagggcggggaggttgcaggtctgaggggtaggccctgcccaggcatcccgggcaggcggacgggtgggggcccctggagatggccgtggtggggtgactcacaagcttgtaaggggcagccggccctgccaaatggacgcagccaggaaggacggagtgactgggcgggggcaggggtcagaccctgcggccgcagccccagggccgggaaggactgggcagacgggacagcagcgcatgcagcttcttccagcgaggcatccgcacggggggctctgtctgaacccatcagtcacccggcaggagcaga

SEQ ID NO: 81720 - DNA, 1027 bp, Homo sapiens
tgtgtgtgtgtgtgtgtgtctggctagcctgtgtgtgtctggttagcctgtgtgtgtgtgtgtgtgtctggctagcctgtgtgtgtgtgtgtggctagcctggcgcccgtgtgtgtgtgtgtgtctggctagcctggcaaccatggctagcctggtgcccgtgtgtgtgtgtgtgtctggctagcctgggacccgtggctagcctggtgcccgtgtgtgtgtgtctggctagcctgtgtgtgtctggttagcctgtgtgtgtgtgtgtgtgtttgtgtctggctagcctgtgtgtgtctggttagcctgtgtgtgtgtgtgtgtgtgtgtgtgtgtgtgtctggctagcctggcgcctgtgtgtgtgtgtgtctggctagcctggtgcccgtgtgtgtgtgtgtgtgtgtgtgtggctagcctggcgcccgtgtgtgtgtgtgtgtgtgtgtgtttcctcagtctttaaagatgctcacgttgctttctcccgtcccatacctcctctgctatcgatcgcttctctttcatcttcctctggctgtgtgatcccagcagctgctagtgcaggcttctttgtgccgccgaccgtcccagaggctgaggtgggagtgtgatgggcgtttgccccacagtacgttgagttttctctcactactcgacagagaagagtagcttctgccctcccatctccttcggtagacacaaggcactttttttttttaaggtaaactttgtagatgaagcacaaagaatacacacaaagaaagcgcacagatcgtgagcacgtagctcggtgaatttacccaaagtgagcccaccgcagaaccagctccccctagaacatctgtttactgttagacccattgtgtttcttttccgacgatatctgtgggcagttttccttagtccctgtgaaagctcttccccagcagggcgtgatgggtccctgggctgagctggtgtgaaaggtgggctgtactgggtggtcccctatggtggtcacacagccagacacgctgggccc

SEQ ID NO: 81721 - DNA, 1027 bp, Homo sapiens
gacctcatctgcctggcggaggtgccccatggggagcagctaggggtcacctgcagttgccccctgccttagacccgggggtgcatactctggaagcctggggtgagaagctaggccagcccaggagaccccgggcagctttctgggccctgtcggcggggcgaggccctgggcccgtgggagttgctgctggctggcaggcgcttcttggcaccggctctgggagcatgtggtgaccaggtggcccggggtcagcacctgcgaggaggccaggctccgtgttagtcacgtgcactgtgaggtgggcgcgttgagcgctgcctaccaccacctgggccaccgagggcccctcccacctgccccctgtcctgctgagctcaggagtgtggcctgggtgtttgtggtcccctgcacagtgggggacggtgggaggaggatctggagagggacacatcactcctctccactcccacgcagagtgttcaagctctggcccctgtccttcctcgggagcaaactctccacgtgcgaacagctccggcaccggctggagcacctcacgctaatcttcagtacacggaaggcggagaaccctgcccagctgatgaggtgtgggcctgccctggtctctgcagggctgggtgcgtgccctctggccccttctccatccccctctgcaccacgctgacccctccggccaggcaggcctcctcctgcggccccaggctgtgctggccaccctcatgccggccgggccggacctcccttccaggaaggccaacacggtggcctctgtgctgctggacgtggccctgggcctcatgctgctgtcctggctccacgggagaagccgcatcgggcatctggccgacgccctcgttcctgtggctgacgtgagtggactggggtggagcccggtgtcccgggtgggcgtggggacccctcctgggcagcagagccttcccgggccagagccaccgccccacaaagccagttctaccttctccatgctctggagacacggccc

SEQ ID NO: 81722 - DNA, 1060 bp, Homo sapiens
gccagggtcatgaaacctttcctgtccagggaggcccatgtgcagcccagctgggacttcctgccctgcccctgtgctgattctgtaactcctgtgctgagagccagaggcacagcttgtctcccatctcccaccttccctgcatggtctgtgccccgtttccagccgggtgcagccccctcctctgcagatctagtgcatttccatgctgcctctgggccttcagcttctctgtcttcctccctcagcaccaaagccccgtctcttccattaggagcttgtcttcctgctgggggtggtacctgactctttggcccaccctcgggcctctgtggaggcctccttgaggcctgactgggtgggtcttgtgtgggctgcaggtgtgcactgggcctgcttgtggccaggccaggcctctgggggcagcatcaggcacgtctgtgtggctgtgggggtgcagggagctccagcccagaaggaaggaggggcggggctggggaaggggctcggcagctttgcctgtggtcgtccgcacctgccaccggcctactttgtcctagacctcccttttgcaaaagtgctcagaaatataaatatttaatttaaaaatgaaagtctcttcctgctgccaagctcttatcctttaaatattaaataagctctatttataaagaatgttcttttctcagccgggggtggtggctcatgcctgtaatcccagcactttgggaggccaaggcgggcggatcatgaggtcaggagatcgagaccatcctggctaacacagtgaaatcccgtctctactaaaaatacaaaaaattagccaggtatggtggtgggcacctgtagtcccagctaattgggaggctgaggcaagagaatggcgtgaacccgggaggcagagcttgcagtgagccgagatctcaccactgcactccagcctgggcgacaaaacaagactccgtctcagaaaaaaaaaaaaaaaaaagtgttcttttctccttcttgccagtcctgctgtggctgaggccttggcccaggcttggaaggggcctgcgca

SEQ ID NO: 81723 - DNA, 1041 bp, Homo sapiens
tgcaggtgctgagcctggctgcccccgccccagcgtggcccctgtgtccctgcagcacgtggccgaggagctccagcatctgctgcagtggctgatgggtgctcccgccgggctcaagatgaaccgtgcactggaccaggtgctgggccgcttcttcctctaccacatccacctgtggatcagtgagtgcagggcaggcgggggccccagggaccccagagcttgctgaagagggtagggacccagccagaccccgccccctgtgcccccaactctgctccccagcgtcctgtgtgtgtgaggcctgctgtgctcagctgagggctggggcctgggcacctcccgagggctgaccccaccctgccaggctacacgcacctcatgtcctgtgtgtgtgagggttgtgctgggccgagggctggggtctgagcgcctcctgagggcctaccccaccctgccaggctacatccacctcatgtcccccttcgtggagcacatcctttggcacgtgggcctctcggcctgcctgggcctgacggtggccctgtccctcctctcggacattatcgccctcctcaccttccacatctactgcttttacgtctatggagccaggtgggcgtgggcttccccctccccaccgccccctgggaggtgcagaggctccggctgggcgggcgttcgagtggggcgggggcggggcggggcggggcggggccgggcccgacagcactgcgtcctgtaggctgtactgcctgaagatccatggcctgtcctcactgtggcgtctgttccgggggaagaagtggaacgttctgcgccagcgcgtggactcctgttcctatgacctggaccaggtatggggcagggttcgtggctggaggggctgactgcctccggcctgtgcccgctgggccagcgcggtgcttgggcaccacaagggggcagcctgctcccgtcctgcagctgaggccgcgcacaggccctgggaatagataagtctgcggtgtgggctgcacgtggggctctgaagcagcgcag

SEQ ID NO: 81724 - DNA, 1090 bp, Homo sapiens
ggccacgtgggtggcctttcaggaccctctgggcagtgagtgctgcgctctggagtgggcgaggccctatcctggccagtaagacaccctcactgccctggagcacgcagctgggtgcgtggtggaaggaccccacggcaggtggggtcacgcaagaggcctcccctggtgcctggcactggggcagacagtgggaggtgagcagaaccacctccagcacctgcttgattcccaggcctcgatcccctctgcatgtgaggctgtggggaggcacctctgacctggtgagagggccgggtgctccgcctccagctttgctccagagcaaggcccaatggcagactccgtgccctgctcagggtggggtccctgctctccccaggaccctgcagcctctgggcccccttcatcgtggcccaggatggggtcggactgctctgcccccaggcgcgtctggccgggccggtcctaaatgctcctctgccacagctccggctcctggtggtcgccgtgcagggcctgatccatctgctcgtggacctcatcaactccctgccgctgtactcactgggtcttcggctctgccggccctacaggctggcgggtaagtgctgcgtattgggcagctggccctgggtaggtggaggggaaccacacctgtgggccctgcagaagcaaggacagcatgggccactgtgcctccagcctggaagccgtggtatgcatgcgcaagcgggcagggaggacagggcctcctagtcccagaggtctgcaggaccagctgcctccagggaggtggagagagactcagagactcacctgccgcgcaggttcagaaccctggagacctgaggccacaggcctttgttcttctgccttgggattttctgggcttgggagtctgaactgcaggccaggggccaagcgcggcaaagtcagaggcactaggagccagcagggcggccaccatccagtaagtgccccgtccgctgtgccggaaaaccccgtccactcaacagcacagcctgcgcccgtccctcactggggctcttccctgcttgccggacacctggcttctttcagtggagtc

SEQ ID NO: 81725 - DNA, 1034 bp, Homo sapiens
gaaggcccacgcgggaccccctcccccttacccccagggcctgaggacactggtgtggtcctgtggatggggcccattctgccctgtgtcggaggcgcccttggctggctggggctgccctgggccccacagggctcaagttctgggtggaacagaaccgactgagtgagtcctggggtggggtgtgcgtccctgtggcacggcccctcagagttgggcagccccgaggggagatgcagcttctgcctccccccagcgctcccttctggctgcaggctcacttgcctccttgggaactgggactggcttctcccacaggcaagggaatgtctgagacagcactggccctgcctcacaactgcccgcccccaccctctctctgcagacggggttggagctcagaccaccccactgaccgctgcccttgtccttccagataaacccactgccctacagccgcgtggtgcacacctaccgcctccccagctgtggctgccaccccaagcactcctggggcgccctgtgccgcaagctgttccttggggagctcatctacccctggaggcagagaggggacaagcaggactgagggaactgctggctcgcctggcaccaccacacggccacagccagccatctgctctgccagggtggcaccagctcagctggcgcatgtcctgtgctttgtggacgctgctgtgtgctcctgaacacggcaggccctgctatcacaccttgggcttggaggtcattgggagtgagcagatgtgggggtggccagccaggctggccgcactccatcactggcactgcctgccttgggacccgcttcccacctgctgcggtcaccatggtggcgagcacagcaaccccaggtgtccagagcactgccccatgcccaccctgtgtacccaggtccagagggtccgtccaccacagcagccccaggtggagggctggtctccctgggggctccccagtggctctgccctggctgtgggggtggagggaccttgccaggatgaaccccccag

SEQ ID NO: 81726 - DNA, 1183 bp, Homo sapiens
agtagctgggactacaggtgtatgccaccacgcccggctaattttgttgtgtgtattttagtagagacggggtttcagcatgtcggccaggatggtctcaatctcctgacctcatgatctgcccacctcggcctcccaaagtgctgggattacagacgtgagccactgcgcctggcctgaacgtttgtttttaacttccagtggcatggctaaaatacactagataggtggcatcactggggcttgcctgcctgagcatgcctcttaatttaggtggttaacagagtgagtgagacggtgtggtcctcatcccctctcatgggggcctggacccagccgaatgggatgtggccccagatgaactgggagcagtcagcatccagcctccccagagtccatctgcgcttcagggaatgccatctacgctggcgaacttacctctcctggtccctgccctctccccttgctttgtttcttgggctcttgtccgtcctgtctgactgccctgagcgtctgctatttgctgaattgtctgcctttggctgctgagagtgtgggcgcagcatcccccactctctcaactcgggggttggcagagcgtgggattacctggactgaggctgagcgcgcttcctcctggcatggcttcagcagtgggcagcagcaccgggggctctggaagcttgtgctcctggcttcagcctggaggaggggttggaaagggccagggaggaagagctctgtgtccattttgaggtgggggaagtgtaaggcccactggggcattgggggctcacacgttaggcccctgcacctgccgcctcctggtcctgcacttgacagtgactgccccagaattggtaactcctgactcaggtggtgggcggccaagttgattgtgaaggtggcgttgccttctaaagcttggctccaggggcgctgcgcactcccaggaggctggcggcgtgcgtgtttgtgcatgttcagaagagcacgggaaggattgggtttcatcaatcggtgttttcccaggacatgaaggcgtgcttctgagggccggctcagccatgctggccagctcgcctacccaactgcaccacacagccaggagctggagagacaggaccctccttcctccctgtccccttcgtcgggctgtggggcattgccacacttcctctga

SEQ ID NO: 81727 - DNA, 1060 bp, Homo sapiens
ggaagcgcctctgggctgtggaacgcgctttctgtgtctaaggtctcaaggttaagacgtgcacagcacaaggagcaggtctttgtggtcaggtggcagcttgccaacctcaggggccagccctcttcatcagggtgaagttggtggatctgagggtttcccaagggggctattcagggtctcagaagctcaggagcagctggttctcaggactcagcatcttgagaatttattctcctttgaaagagttgtagcaggagctttaggcctctggccctcgtgggaaggacgtacgtgttaacctccattgctttctctcctttgttgggaggtgccctctgtgtttccagcttccgtgtttcttcagggctgcctgctgggcagtgggtgcccttggcagggaggccccttctgtgcaaggcttactgcttcagcatggcccacagctccttcagctcacaccggatcgcttacctgcctggaagtcttgtctggcatgttcctcagacaggtgtgtgagcgtacattgccctctccagcttcacaaacaaatgagtcatcgaagtgacctttttcttagtactggcacctgaggcagtggcgtgtgaccacacgcccagcacctgtgggagcccctgtgagctcttccgtgtctcctaatgtgggtgtgcgctgggtttctggatctctaggtctggaaaggctttcctttctttgacacccagcagtgatcttagggagtgcttcatgctctcttcaggatggaacagagcgctttgcatagagtgcccctgggtgatggtggcgagttacccggcaggaattatgcttcatccaggagtgtgggtggtgcacgcggcggggaggagaaagctgcagttcaggagcgaacctgcagtcaggctccagggtgtgggccagggtggtgggcccgtgttggcccccaggaaccacccgcacagggtgcacacccttccccaagcccagccgctcccgctctgcagggggcatcgaaggtcctggattaaggcagttccaccctcggcaccgtgtccccaca

SEQ ID NO: 81728 - DNA, 1044 bp, Homo sapiens
cactggggatggtgggggacagggtggcaggggacagggtggcctgagcaagcccctccttgcctgggaactcagggcctcctgatatgcagatgggagcccgtggcaggatgatggcaggataaccgtcagcccaaaagaagcggccacgagacgccgccgagagccccaacttagaagccagagtcaccagcttcctggctagggtctgtccttgagggtcaccagaatgtgaggaaagacccagacaggcaggaaaagagctcagggaaggacatcttaccattggcgtcatcagagataccgcatccacgaatgaagagccagacgctgccagaggggaacgctcagagcaccggaaggagcttttagaaattataaataagcagcacattttaaaaaagccatagaagggctagaaaagaaagttgaggacatctcccagaaaatagaacaaaaagagattaaaaaacaactgggcagtccctgcagaggtcaccctggctggcgcggctcaggatggagggcgggagctgtgtgcctggaggggggagctgaggcacgtcaggatgtgtctccagactgcaagggccacagagtacgaaaaagaccacccagagcaatgtggtcaaagaccatgccttaaaaggttttaggaaacagaatgggtcccacgggagggtggggatgtgaacggcaccagcctggtggctcgggtgccaggccagggccagatgtagcctcataccagcccagctgggagtccgcttgctgagacttggtctcctgtagctggtggggaagcggcaccctgtgcggtagacagaaccagcagccgaggcgccggtggctttgctctggtggcaggacaggtgttctgacctccctgcctctgtcccctgaggtcagagcgcctgtcctgtggagcggctctgaccaggacagtgccgtgtgtctcatggggttgtgttcaggtcggctgagaggcagcgcctggctggggctagatgaacaagagggttattgggaacagtaaacctgagg

SEQ ID NO: 81729 - DNA, 1019 bp, Homo sapiens
gtgcctccaggagctcctccctctaccccgccctgccccaccccgtcacctgcttgccctgaccctgcctggataattgagaccttccaggccaagggccccctccccaggatcctgacacctgtccctctgagagtccagaccttttccagagtgacatcctggggccctgtgtggtcagagggctccatgtggtcagtggctgtggcttgctgggaacaagacactcggctgactgtgcttagagaacaggccgctgtttgtgtctaaatggtatccatggggacgttgtttcatagtcttcttacacttttcctcttcactgttgctgagaatcctgttctgacgcgcaccgtgggcaaccgggtgcggagcctgcaggatgggtgggacgcagacgtccagcgggaggagcatcccagagcagcctctgattcaagagcaaggtgctctagaggccccggctctgtgggtgggtgacgtggtccccaggcttttcccggcatccccgttccttttgcagcagccatggctcctggtggccctgggccatggcgccatctaggggtggcctaggggagtccccgggccatcagcatctgtcttgtgggtgttgctggcgcctgcctgcttggccacattggcacgtcgaggtgaccgtcaaggagaagcagctatggcctttgtggcaatcgtggtgtccaactttggcctctcaggtcagcctcatgggggcttcaacagccaggaccaaaatgaccaaggcccctccgtccctgtgtccctgcttgacagaaccaccggaggagggaggtgcgggaagggtgttgacggcctgagcgcggtgcctccctgaagagtgttgtttcacttgtgagtgtgcacgggacagccgccctggcctgtagaatcaagagcagggacagccgccctggcctgtagaatcaagagcagagacagccgccctggcctgtagaatcaagagcagggacagccgccctggcctgtagaatcaagag

SEQ ID NO: 81730 - DNA, 1127 bp, Homo sapiens
gggtgatttacatctacaaaaatgccttcttgtcttccttttgcttttaagtatttcgtgatttttctgcaataaacatatactattttggtattaaaaaatatggggcgcagttatgttggatgacaataaagggttgttggggagatactggaaaaggcagcagggaggctgaacctgacaggctccactgcgggcatcccagccccccccgacgggctccaccgcgggcatcccagcccccccccgacgggctccaccgcgggcatcccagccccccccgatgggctccaccgcgggcatcccagccccccgccgacgggctccaccgcgggcatcccagccccccgccgacgggctccaccgcgggcatcccagccccccgccgacgggctccaccgcgggcatcccagccaccccccccgacgggctccaccgcaggcatcccagctcccacacagggaggtctgtgggacacgaggccagtacagtcgtgatttctgttcagctgcatgagaactaaaaaagaaaaaagcagttcataagctctgcatttgccaggctgaggtcctggaaagcaagctctgttatcatctccgtgttctttccaaagcatctggcacaactggttatgtctttgttttgtcttgttaactctggaaattctgagctgtcattttccacatgcgaggagcaggttacagacccaggtgcacatgttggtcctgggttgagggtgccaggtgcttccttgccccgggagaagcacctgagtctccaggcgggcctctgaccgccgtgactgagcatttgggccaccccgggagcccagccctgtcctgtgtctctcctgcctggtgagcagcggtgaggtgcgggtgcatccagccgaggtgcagagcccaggtttgcagcagggtttctcccgccgcccctgatgagacacagactagcaaggactgtctgtcccagccgggatttgtcactctgcctccctccgttagagagtggagaggcctggaaggtccccgcggcctgggtcttgcagatggcaccagcaaaggccaccggccactccccgctgccgtcacctgtcacacagcagcagtcccgcggctcttcccgcg

SEQ ID NO: 81731 - DNA, 1134 bp, Homo sapiens
tctctccttggccagcatgcacgcttttacatgcactgctgctgtcttcagcatctgcacggtacatttcactgccgcttactcagctgtcccctgaggctggacatttaatttgtgtctggcttgtcgttgttatcagcgccactgtgacacacatcctcagttacttctgagttgtgggcttgccatgcgggaggttgccatgcgggaggttgccactagggagagtgggctgtgttgtacgctttggtggcccactccccagtctctccacctcccccagcagcaaatgagccagccccagtccctgtgccccaacctccagggttaacccctgggtgtgcatttgtttattctgaatcttatcatttatcgcccaccagactgacttggccatctctggcctcgaagggtctccctcagcgagaggtgtccttcctgagctgtcgctccatcctgagcaaggccttcgccctgggagcttagtaatgtcaaccttgttctaaacaggacctggggctacacttcagtcttccagatatcgaaagatggttctaagaggctctaaaaaccctaattttcagatggacagtgccctcttctttcagcctcagcctcttgtgtgataggctcttccattacgtgaaggttttgtcagcctaggagtagggtggatcacagctcattggctggatctggttgcagaattgtagggtgggagtggacgttggggagaggcgggcataggggaatgggcctgtgatgtcaccgtttcgcccgacagggctctgagtgtgagcagtgtgctcccctgtgctgctggagagccatgactgtcactgccgagatatttagggcaggtggaaacagcccagagctgagctccaagtaattggtctctaagggatgtggcaaaaagtccccgtggcaaaacctgctctgcctggctgggggagcttcacagaaactgtcctggagggactggcattctgctctgcaagttttaggttggaaaactcagaaatgcccccactcagctctgtcccaggtactcccggggggattcactgatggactggccgagaggacacttagcttccacagctgcacgtcccccggctgccagaaccccgc

SEQ ID NO: 81732 - DNA, 1082 bp, Homo sapiens
aatccagagcctacccggggcccaggtacctccatccagcctgccttccccgggagggctccccggacccaggcctacctcatcgatctccttgatccagcggtcgatgccgtcaaaggaccagcggttggtgatgtcatacaccaagaggatcccctgcaacagagacttgggggtcatcaggggtcactgacacgcatggccagcccaggcccagggacgctcaggtgcaggggcctcagttcccgggcagggccaaggatgcttattacttggcggatgggcagatgagccatgccctccaggcagagctggtgcagccctgcccctcacccctgccctcacctggcaggactgcagcaggggggtgggcgccttccatggtgtcagaaatgccgcttcccctccctcccctggagccatcagcctgtggaagtttcctgggcaggcagatgcggggttctggcagccgggggacgtgcagctgtggaagctaagtgtcctctcggccagtccatcagtgaatccccccgggagtacctgggacagagctgagtgggggcatttctgagttttccaacctaaaacttgcagagcagaatgccagtccctccaggacagtttctgtgaagctcccccagccaggcagagcaggttttgccacggggactttttgccacatcccttagagaccaattacttggagctcagctctgggctgtttccacctgccctaaatatctcggcagtgacagtcatggctctccagcagcacaggggagcacactgctcacactcagagccctgtcgggcgaaacggtgacatcacaggcccattcccctatgcccgcctctccccaacgtccactcccaccctacaattctgcaaccagatccagccaatgagctgtgatccaccctactcctaggctgacaaaaccttcacgtaatggaagagcctatcacacaagaggctgaggctgaaagaagagggcactgtccatctgaaaattagggtttttagagcctcttagaaccatctttcgatatctggaagactgaagtgtagccccaggtcctgt

SEQ ID NO: 81733 - DNA, 1539 bp, Homo sapiens
cgggggagcagacagggccggtgctccctctggaagcttgggtgaccggggccctggctcccacgggatggagggtgtggtcctgtggtcagagcccaagcagcactcaggagaggggagaaaggaggtgcacctggcagcccacatttttgttgctccccaaatccctccccacgtggggatgagaaccttcctgctgtgatgtgacaccttcggggacattgaccactcaaaactcagatcatctcgcccaccctggagagtgcagagctatctgtagacttaggaatacttgatgggcagcggtgcagaccccgggcacctgcgtgcagcctcctgttctcggcagcttctgtcgctggccctggggtccccacagctgcagctctcctgtgaggttgcacggcatcagaaccatcctgaccttcttagggacgtgcctggaaccacctcgtccacgtccacgtccacctgggggcctcgggaggctaggcccctcctcaaaggcccaccagcccggcgctcatgctgagccccaggcacgcagggccggccacctctctcctgaagccattggccgctcctccacccagtgcttctgcccatgcctgccccagcagcccctctgcacggtcaccatcgcctgggcctgcccacagcactggtgctcacctctacctcctgtcctcaggccgtgcggcacgacatggccagcacgcagaaggagccctcccgggacccaggaccccccgtggtggactccgcggcacatgcttcccaaggtggtcccacggagggtgttactgggcaccagtggactcgccccatggcccgttcctgggagatgagggccgtggcctgcatgaactaccagatgagtaagggaaccccaggcaggcggccctgccacagcccccaaagacactggcctcctgctccagcttccctgtcctggccccacctgtcctgttgctgccagcagggcccttgtttgggattatgaacaaacctcacagactttgaggacctggatggtcctgcattcacggcatcaacactacccgcgctgctgttagacactccgccattcctggttctctccgaaccgttctttgtacagtaaatgtaattcagctgtggtccccacgttttgctgtgtctggtggggtgggtctggcagtggcggtgccccgtgccaggggccagtgctgcttcatacccggcaaactgacctctggcctttgttttgcctgctgttccctgcgctgaccgggctgacctgccgcggttggctgggttcgcctcaaagtgagggctggagctgggctggagcagctgggcctggtcacggccattctcctcttcccggtggatggaatcccagctgggctgtgctgagccctcgctcacagtccccggcagcagatggcctggggcggactgtccccaacagcagcaggactccagagggccaggtcctccagtcagtcggcccgctcagcagagccgcctgcacgctggccaatctggtgtctgcta

SEQ ID NO: 81734 - DNA, 1050 bp, Homo sapiens
aacaaggatcccatcttgcacgtgctgcggcagtacctggatccggcccagcgtggcgtccgcgtcctcgaggtggcctcgggctccggccagcacgcagcgcacttcgcgcgggccttccccctggccgagtggcagccgtcggacgtggaccagcgctgcctggacaggtgcggcccccggggcggccacttctatcggtgcggcggtccggggcctcaagagcccacggcccgcagccccggaggaaaaggatgcggctcgggctctgagggtgcggggtgggagcctgggggtgcccccggggcaggccctagctgtgcggcccccgcggctgcggaagtgggtggacctcggggtcccccttcccagccgctttggtctccgctcctcaacgtgccccccagcctcccctaagaaattctgtgggggcgtcggaaaggcgggtgcacaggactcggcccccacccaagcgttcgcctcctgcagcatcgcggccaccacgcaagcccagggcctgaccaacgtgaaggccccgctacacctggacgtgacgtggggctgggagcactggggcgggatcctgccacagtcgctggacctgttgctctgcatcaacatggcccatgtcagccccctgcgctgcacggaggtctgtggggagcccagcatgggtgtctgccgtggcaccactcaccctgcatgggggcagctgggatgccagatttgcccccatcacagtcggggtgagggtctccagcctcccccatcacagtcggggtgagggtctccagcctcccccatcacagtcggggtgagggtctccagcctcccccatcacagtcggggtgagggtctccagcctcagggcctggcttctgttgggggcagcacctcactgccgtcctgttcctactcaccaggggctcttcagagcagcaggacacctgctcaaacccagggccctgctcatcacctacggggtgagtgggcctgtccacggcgggcctcccgctcccagtcctagctgctgtctcctgccctgctgag

SEQ ID NO: 81735 - DNA, 1050 bp, Homo sapiens
tggctgtctctggtcactcctggcctgagctcagcctctgcccgtcccttaatcggctgtttgtcaaggcccctgtggtgccgtgaagcaatggccgctcggcctgccagggcgccaggaccctgcgctgtccgccgtggccggcgcgtccacacggtggcgcgccgcacagcctgtccgctctggcccgcccggctcgctggtgcggctgtgcgggcggggccggaagtgtggggacagcgcggggccgagaaccggaagtgcggggcgggcgcgggggcagagcgaaaggcttgaggaccaggtcggggccgggttccgggtcggggagcggctccgggcggcagctatgaggcgggacgtgcgcatcctgttactgggcgagggtaggcgccggcccgggggtctcggagctgcggcggccgtgaggcggggtgagggtctcgggggtcggggggcgccgtgaccttggccctcgcgctgaccgcctcgccccgcgcagcccaggtggggaagacgtcgctgatcctgtccctggtgggcgaggagttccccgaggaggtaaggggcacgcccgccgcgggggtgggagcgggcccagccgggggtccctggtgagcgcgcgggtcccttgcaggtccctccccgcgcggaggagatcaccatccccgcggacgtcaccccggagaaggtgcccacccacatcgtggactactcaggtagcggccgtagcctcccgggggcccggcccgcagcggtccggcgggcctgctgggtccgcagtggagtctctttgtccccctagaagccgagcagacggacgaggagctgcgggaggagatccacaaggtacccgtggtgcgcgggacgagggaggggctgggcgcgggctcggcctaatccgcttcgcagcctgggggattggaccgaggtgctccgggtgtccttggccctgataattctgtgacctccgcactgagggttgtcggggcccctacagcgcaccccgctgggagccggcaccgctcagtccagtggtgctccagggat

SEQ ID NO: 81736 - DNA, 1034 bp, Homo sapiens
cttgcagacatttggtccacgcagagctgcatccctcttccttctggctccgggggctgctgggggttgtcggggccgccgtggccgcagtcctcagcttctcactctacagggtcctggtgaagagccagtgaggcccctggtacccaagccccctcccctgacctgggtgtgcctcgctgctggggctctgcaggggcagcacagctggggtgcaggccaggctgccactccgggaacgcctttgcgccgggactttttgtttctgaaggcagtcgatctgcagcggggccttatgctgccatgcactgccctggctcctgccggacccccagggtgggccgtggcaggtggctgagcaggagctcccaagtgccggccaccgctgtcagggattgcccacccctgggcatcatgtgtgtggggccggggagcacaggtgtgggagctggtgaccccagacccagaattctcagggctctacccccctttcctggtcctaggtggccagtgggtatgaggagggctggaaggcagagctttgggccaaaagcaggcgttggggggtcccccctcaagtttggagccgtttccgtggttgtagcagaggaccggaggttgggttcctgattaaacttcactgtgtgttttctatctcggatcccagtctctgaagacaacttgctttgattcaacctagaatgtgttgtttgtctttatgtgggctggaaacgccacccctcctttcattcctgggtcactgttctgaggtctcaggcgtgtgcatatggcctctggaaggtccactctgggctgctgtggcctgggagcccagtgtccttggaggtcctgcggtctgggagtgggagcccactgcgggaggacggtgcgcgcccggcatggactggggggcgccggtgcctgagatgtttccccggtgactgaccccttctcagggtccagtgtgccctggcactgcccactcactccccagagcgtcctgccagcctggctgagctgcgccgagaacctgg

SEQ ID NO: 81737 - DNA, 1070 bp, Homo sapiens
ggtggtcgggacaggctgttgcgggagcgcgccctcagcgaagcaagtgaggcatctcactgggaaagtcgaatgtgtgtggcggccgccgccgaggcgggttccgaagagacctcagcagggcaggccagggcctacgcgaacgcccacccttaagagcgcggggacagggaactggagcgttcctcccagcccccgacgtcgcgggcccagtgtccccgtccaggctggttgggcgcacgcgcggccccactcgcccccacgcgtgcgtccccgctggtcccgcccccggccggaagttccggcggcggagctgggccgggcccgagcggatcgcgggctcgggctgcggggctccggctgcgggcgctgggccgcgaggcgcggagcttgggagcggagcccaggccgtgccgcgcggcgccatgaagggcaaggaggagaaggagggcggcgcacggctgggcgctggcggcggaagccccgagaagagcccgagcgcgcaggagctcaaggagcagggcaatcgtctgttcgtgggccgaaagtacccggaggcggcggcctgctacggccgcgcgatcgtgagtgcgcccgcgcggggagggcggcggcggtggcaccggggagggccgggcccgggcccggccggccccaccgagggtctggctcctcttcggggcgtgtcctcggctcccaaagcccagccgtggttctcgagcccagcgccgggtgccggagaacgagggtgcgatgctggatggaggccggccgggtggggggagggcaggggccctcgacccttgaggaccccaggtcctaagcccggactctccaaagatttggaaaactttacaaaaccaagtggaatcaagcggataggctcagccagtactccactgtgcacagatccttggacccaggggctttgacaactgagaaacctagtttcttgattctagccagagcgcagaagctgggacgggccgtgggtcagagtgggcacgctgagcctacgccctcatgcggctggcccggccttggtccctagacccggaacccgctggtgg

SEQ ID NO: 81738 - DNA, 1013 bp, Homo sapiens
tttctcaggtggatgagaagaggaaggtgagtgtgtgtcgcttgctgccgatggctggcaggtgctcgtgcagtgccccttttcagcctctgaccgtgtgcccctgtgccacagaagcgagacatccccgactacctgtgtggcaagatcagctttgagctgatgcgggagccgtgcatcacgcccagtggcatcacctacgaccgcaaggacatcgaggagcacctgcaggtgaggcctgcggctgggggagcagggccagtggcatggtcctgggccccatgactgccctctgcccttcttgtcactgcagcgtgtgggtcattttgaccccgtgacccggagccccctgacccaggaacagctcatccccaacttggctatgaaggaggttattgacgcattcatctctgagaatggctgggtggaggactactgaggttccctgccctacctggcgtcctggtccaggggagccctgggcagaagcccccggcccctatacatagtttatgttcctggccaccccgaccgcttcccccaagttctgctgttggactctggactgtttcccctctcagcatcgcttttgctgggccgtgatcgtccccctttgtgggctggaaaagcaggtgagggtgggctgggctgaggccattgccgccactatctgtgtaataaaatccgtgagcacgaggtgggacgtgctggtgtgtgaccggcagtcctgccagctgttttggctagccgaggaaggtggagatgaagacgctggtgtcaaggttgagcgtagcatgccaccagcggtcggggaagtacagcacctggtggaggaagggggtgcagcagagattagctgcgggcctctagcctggcctggccctctcctgccagccactgacctcaccagcccggatggtacactccaggggccgtgcagacggtggcagggctgggtatgtgtcccggagccaggccagcgtggtcttgttggggtggaactctggcgtctt

SEQ ID NO: 81739 - DNA, 1051 bp, Homo sapiens
tctgaactgatgacccacccaggctgaccaggccagcccacctcactgacctcctgacccctgacctcatcacctgtgcagccatggagaagatgtcccgtgtgaccacagccctgggtggcagcgtgctgacaggccgcaccatgcactgccacctggatgctcccgccaatgccatcagtgtgtgccgcgacgcagcccaggtggtcgtggcaggccgtagcatcttcaagatctatgccatcgaggaggaacagttcgtggaaaagctgaacctgcgtgtggggcgcaagccttcgcttaacctgagctgtgctgacgtggtctggcaccagatggatgagaacctgctggccacagcagccaccaatggcgtggtggtcacgtggaacctgggccggccatcccgcaacaagcaggaccagctgttcacagaacacaagcgcacggtaaacaaagtctgcttccaccccaccgaagcccacgtgctgctcagtggctcccaggatggcttcatgaagtgctttgacctccgcagaaaggactctgtcagcaccttctcgggtgaggccacagaggcaggtcagggcaggtgggcgtctctgccggtgcccagcctgtccatgcaggcggaaaagggctccgtgcatcagaggccctcaggatcactcccagagggcttcctcagggggaaagggaatcggcaggggagggatggggcaagttgggctggacggcatgtgagccagggcagtcaagtgggaagaggcaagagatgagaccagcagaaattgaggctaggtgtggggtgagggagggcagagccccagcggtctcccagccagcctgggtggtgagcagagagccactgactcccttccctcatgtcggagctacagaggctgcctcatagcaggaggtctgccaggacttccaggtttcctggcccagggaggcagaggaggtgggtttgctgtccagtgccctggggcccttttcctaacaggcccagctccccgatggctgccctgagccagctctcccttgttca

SEQ ID NO: 81740 - DNA, 1081 bp, Homo sapiens
ggatcccagcacccactccccagggtgtccagctttcaaggctgagctgccctgggcttgaccatgggccctcagtctgctggggcagcaacacgggtttctcttgaggccacgtgcctgctgcgccatggtgcccctcctcagagcccctggtgcacccccagaagcatctcaaactgggggcgggagaggagctctgccgctgtgccacgtgccaagtggcagggacgcgggtgtgcctgcgtcacggggctgccacggaatgtgtcagtctgcaccctgtccccaatccccagccaccccagctgtcagccaggctctggggctgccactgcagatggagcccgatgtgcatttctctggccaccagggccctgcccagctctaaggccctctgcaggcagggctcaatggtccctgaggttctatgagggctgagtggttggttaggctgtgccccagtctggtgctgacagagatgggggcaccagagatgggggaagagaccttcaaactgggggcgctgaggggtgaggaggtttcccaggcatgtgtccaaaaggatgtcccaggggtgggcacgcggtgtgcagcctctgcaaggaatgcagcgccgtggcagggaccctgcaggatgagggcagtacttggagagaccactagcccagggcccagcaggaaggcatcgagaccccatgaggcagaacagggcagagcgaggaccctgtgaggtacacctggcaggacccaggtagagggaatcagccagccccggggcttttggagccaatcctagctctatgtaacttctggaaaatccgtctgcaagctctgcttccccactcctagttaggcagtgtgtgaaggaaggactctggccggtcagaggaggggtgcgtgtggtgccagggagagcggggcaggaggacccccttccctctcttggctcaggccagatggtggaggacgggcagccacttcctcagccctgcagctcctgaagagagagccagctgaaaaggagatgggccctcctcatccgaaggctctgtgtattgcaaggcccaccccagccctgggg

SEQ ID NO: 81741 - DNA, 1351 bp, Homo sapiens
cccgatcccagagcgcggcccggcatcgcctgtctgcggccggtgcggcccttcgcgggcgcccaggtcttcgcggagcgcgcagggggcgccctggagctgctgctggccgagggcccgggcccggcagggggccgctgcgtgcgctggggtccccgcgagcgccgggccctcttcctgcaggccacgccgcaccaggacatcagccgccgcgtggccgccttccgctttgagctgcgcgaggacgggcgccccgagctgcccccgcaggcccacggtctcggcgtagacggtgagtggcggtctggttgggacagggtgggagtcccgaagtcttaccctgcctgggcttggcgggaatgtgccttgtcggccccactgcagaaggaaaaagtgagctacaagggttggatgggcttgtcaggccacacagcctgggactgctggggagggatggcctccccgccctcccttcccgattcatctctggaaagagctggcaggggcagagtggagggaaggggaggccgggcccagcaatcctgggcctctggtccctgaacggttgggggaagagatggtggggacagaatcgaagcctccggccaaagctgtccggggctccctggcccagcggtgacctctctcccctcccccagcccaaccaacaaaagtccagtgtgcagcccggtcaccatggagacgccgctcgcctccctgcagggcaccaggcccagctcttgcttggctctcctggagcttggcgcctgaccctgaaagggatgggctctcgctattctgccccctggccctgggccagggaccccagaccacccttcctctgcccccacttcctatcaccctagctgggctgctgctcttcagacctcagatccgggaaactagaggggtcccagatgctggggtgcatatgtcagatgggagtgcaggagggcggcccaggacagctgatcgctaggcatggcccccaggcccacgtctgtgtgcattcctgccttggaggtacgcgcctgcaagtgtgtttcctgagtacaggtgtcgccgagggcgtgcacatctgctgtgtagctctctgggacccccaggtgccatcaggccctgagcgtgggctctgctcatttgcctgctgcctcctgccgcttgtgcggacaagggacggggcctggggtgatgccgggagagggcagggcctctcctcaccaccccctctgcatgccaggtgcctgcaggccctgcagcgacgctgagctgctcctggccgcatgcaccagcgacttcggtgagtgtccccgccatggggggagcctggagcctgccttcccctgaatgc

SEQ ID NO: 81742 - DNA, 2119 bp, Homo sapiens
ggctggttctggggccaggaccgcccctctccaaggcagacttcccttcattccacgacaaagacgcgcagccccgtttccctggggctctagcccgtgagatcgccgggtgtatcccgactcccgccggcacgtgcgctcccccagggcagggcctgcctgtccccttccgcgggtcgccagcagccagcacaggccgcaaacggcggtccgcagagcggaccaacggagccgaccctcgcaggcttggagccggacgcggcggggcagagcccccgaggctgcagctcgccggaacccgcgggagggcagccgggctgggcggagcgcacagcgccacggaccgaccgcgcaggctctgccggccacttccggtgtcgcgcggcggctcccggcaggaggcagagggcacaccgccagccccaggccaggctgcgagggccgcggacccgagccgggaaggaccttgggcggacgagccgcgcgtcccgcagccatggagcaggacgacccggtcgaggcgctgacggagctgcgcgagcggcggctgggcgcgctggagctgctgcaggcggcggccggctcgggcttggcagcctacgcggtgtgggcgctgctgctccagcccggcttccggcgcgtgccgctgcggctgcaggtgcggggcggggccaggccgggcaggggagctcggctgccgctcagggtctcaaggtctgggcgtggccggggtgagctccgccccgccgtgtggtagttcgggccgggctgcgggcggggcgggagcggccagtggactctcgccgccacccggtccaggtgccctacgtcggcgcgagcgcgcggcaggtggagcacgtgttgtcgctgctgcgaggacgccccggaaaaacggtggatctgggctctggcgacggcaggatcgtaagtgcctgcgtctgggtcttcgccgccccacaccgcccacctgctggcgggcgcccctgcccacatcctggttcccacactctcggtgcccacaggtgctggcggcccacaggtgcggcctccgcccggccgtgggctacgagctgaacccctggctggtggcgctggcgcggctgcacgcctggagggccggctgtgccggcagcgtctgctatcgccgcaaggatctctggaaggtaacctggggatccctggccacccgctgacagcccaaggtgcggctgacacctgcgagggctgggggccgggactcggaagctgcgatgacccggtgcccaccaggcctctccccggccggggcgacttctcttccggcaggtgagcctgagggactgccgcaacgtgtctgtgttcctggcccctagcgtggtaggtgcggggttgccagccccgctgggaagccccagccacaccccagggtgtttgctgctctgaggcctgggcctgcctggtgggtgctaggcttggggctaggggggtgagcgcggctgttttctaccggccccgcccccgccccctctactctgctgttctctccctcagctcccgctgctggaggacaagctgcggacagagctgcctgctggggcccgcgtggtgtctgggcgcttcccactccccacctggcagcctgtgaccgcggttggcgagggcctggaccgagtatgggcttatgatgttcctgagggtgggcaggctggggaggccgcctcctcgcggatacccatccaggctgcccccggacctagttctgcccccatcccggggggccttatttctcaggccagctgagtattagacacgataaagactctgtgggttctatcctgactcatgttttatggggggctgggtgggagggttctgtgctggctgaggagctctgctctgctctgctccttgggagacggcctagtggctgccggtccttggatgctggggcttggctggaggcacagcccccactttccaggggtcccctgcacctgccagcttcctcagcctcaggatttcgtgcttgtacctgctcagaggaaccatgcttaagtgacttgcccagctgtggacaggtctgcttttagcgcctgaggcagccatcatccttcattccaaccagaccagggccctgggg

SEQ ID NO: 81743 - DNA, 1271 bp, Homo sapiens
aggggccggccagaccggtggttgctgaggagggaggatagctcttcctctctccatgcctccgtttccccatctggggaatgcggcccagcgccccctgcacataccctgtgcagatggaaccaggtgcgtgaaagcgcccagcctgggcgcagcggacgagcacgcggaacggagcggcagcccgcccgcaggatgccctgagctacactcgctggacaccttctgtgtacctagcagtgctggctgagccccgggacgggggaagtatatctctgcacctctggcctgagaagaggggcgcagacgtccccatcaggggccggagaactcggaaacgactggctcagccggggcgtcgggagggcttcctggaggaggtgccagcgccgggcgcggcggggtcggagcgtgcgcgtggcgccccaccgggcacgcgcaccgccggcgggccttgtggtctcatcgcgcgcaggatccgggccgggcgggggcgggggcggggcgcgtccgcggaggggggcggttggcggctcccgagcccagcgccgcgctcagtccggaccccgtgaccggcggccgaggccccgcctccgtcagtctgtccttcgggtcctcagcacagccgtgccggtgaggcgggcggcgggggaacgcggctgtcccgggtcaggggtcttgcggcggcagggcggggggccgaggggcggggcctgggaggaaggcgtggcctttggggactggggctcggactgggggcggagccggggctggttggggaccggccgggttccgctcctgctggagcccggtgcgtggaattccacgcgagtgccggggagttcctggggagccgggcttctcttttggcccccagcgtgttgaccgagcccgcttcgcacagcccttcctagggtgtggagagcgggccccgccctgaaggggcaccgtgggctggggggcctgttttggagcaggcaccggtggccgagctccgtgaccatgaaggtcaaggtcatccccgtgctcgaggacaactacatgtacctggtcatcgaggagctcacgcgcgaggcggtggccgtggacgtggctgtgcccaagagggtgagggcaggccgcgggccgcagggacccggccgtgtcccccgagagcctccccgacccccctggtaggagcgagcccccacgtgctctgctctccggaagtcattggcggctggggttccttgtttatcttggggctccctgaagttacggcacctctggcc

SEQ ID NO: 81744 - DNA, 1044 bp, Homo sapiens
tggacccttaggaaggcatctggggactgcgtgttgggctgagtgagcatctctggcttgggggaggctgctcattaagtgcctgcctgcccgcccacccctcggcgccatgctcccgcgtgggcagcgggccctgcgcctcactgcacccctccctgcagagaggagccggtgcgcaagttcacgggcaaggcggtccccgccgacgtcctggaggcgctatgcaaggagcgggcgcgcttcgaacaggcgggcgagccgcggcagccacaggcgcgggccctccttgcgctgcagtgggggctcctgagtgcagccccacacgactgagccacccagaccctcacagggctggggcctgcgtccctcctcgtgacctcggccagctggacccacatgagggccacctctggaaccttcttcgaggccctggccagccatctgcccagcctcggagggtgggcaacctggtgcttcccgggtggacacacaggaccactcagtggggcctgtgtgggcgccgagacctgggtgtctgggaagtggggcacacggggcctccgaactatgaataaagctttgaaaggccgttgtcagtgttggcagatgtgccaggagaggagctgttttcgtaggcgtgttttaggaggggtgcgtttattagacaaacgctgggagacaggcctggtggggacctggctgggggatgatgcagcccgcgatggctgctgcttcgtacttggcttgccccggaccacagcctcgtaacggtaacccctgctttccaggggcctggcacccccccctgccagggtccacacgcagggttgtggcgggaccacccctgcaggtccagctctgtctcccaccttttgcacagagcttcaagggaagcctccagaagtcaggggtgagaacccgtcttgctctgcctcaggcaaccccgggacaggctgaagcccctcacgcacttgggtgcccgaccagcagcagcaagggcagcacctgtgggcctcggcccagggccaacggaacaggctctgg

SEQ ID NO: 81745 - DNA, 1017 bp, Homo sapiens
gtcctgctcgtcctcagggcatcgtggccgcgtggcggcaacgctcctctcgggacccatcctggcggcagcctgaacggaccatcctccggccgcggttccggcgggaagtggagagtgagtgccgtgccctgcgcagtctggcaccaggctgggcagcacccctgggggtgggcatcactttagggtctcacctgcccctccctggctctgcagcacatcccattataatcacagagagtggacagaatccctgtttgccagtgggtaaactgaggcacagggagggtcacaaatggcccgaggtctcatctcacaggaggtgtgggaggaagaaggggtcaaacgaactccggccctgacccctgacccctgtgccctgcagagacagcctgtccttcaggcaagaaggcccgcgagatagacgagagcctcatcttctacaagaagtgggagctggaagcctgcgtggatgcggccctgctggccacccagatggaccgcgtgaacgccatccccttcacctacgagcagctggacgtcctaaagcataaactggatgaggtagttcatgactcaagttcccaccggcctgctgtgtccaagccatccccagcccctctgggagtgacatgggccctcctggtctcttggcctgcagctctacccacaaggttaccccgagtctgtgatccagcacctgggctacctcttcctcaagatgagccctgaggacattcgcaagtggaatgtgacgtccctggagaccctgaaggctttgcttgaagtcaacaaagggcacgaaatgagtcctcaggtgaccgtccggctcgggggtcatgtggcatgagattgggaagggctgaggggcagagtgggggacaaagcctgaggttgggcgggcctggggtcaggggcacggcctgaggttatgctggtggtggagggatacatctctccttgccacaaggctcctcggcggcccctcccacaggtggccaccctgatcgaccgctt

SEQ ID NO: 81746 - DNA, 1067 bp, Homo sapiens
ggggcgcatgggggggtgtggaggggggcgcgtggagggggcgcgtggaggaggggcacatggaggggggggcaagtggagaagccctggtggaggggcgcatggaggaggggccaacggggggtgggagggcgtgtaaggcgggtctgcagtggggcgaggccttaggaagggcagcatcttcccgtgtggtggggcctagggaagggcagccattgagctgaggtcagctggccggagacctccgaagtctggagaggctgcggtgggcatctgtgggtggggcagtttggacacaggagagcctggcagccctctggcggcgctgagggaaggagaccctccttgatggctgcccggggtctctggcagccgttgactgtggctgaggtgcagaaacttctgggaccccacgtggagggcctgaaggcggaggagcggcaccgcccggtgcgggactggatcctacggcagcggcaggacgacctggacacgctggggctggggctacagggcggcatccccaacggctacctggtcctagacctcagcatgcaaggtgggcggggcggccaggccagggctgggggcagagctgggggcgtggaggtgggcgctctgagtcacccctctctctgtagaggccctctcggggacgccctgcctcctaggacctggacctgttctcaccgtcctggcactgctcctagcctccaccctggcctgagggccccactcccttgctggccccagccctgctggggatccccgcctggccaggagcaggcacgggtggtccccgttccaccccaagagaactcgcgctcagtaaacgggaacatgccccctgcagacacgtcttgtggcctccgaggactttctgtgaccccaccagcgtggcccctctccctctggtcttgcgcccccaggccaggtgggggcccttggaggtcttcctgaccctgctgccactgtgctgagggccaggccagcactcagggtggccccaggagccggtggtgggagtcctgtgcccctgtccccacaggcttggccccggctaggac

SEQ ID NO: 81747 - DNA, 1057 bp, Homo sapiens
atcccaaaacctggccctgcctcttcctgaggtgaccttgagtccgtaaaactgacgcccctggggtgacgcttgagagccggaagctgttccaggaggagggaggggcctcggtttctcccggggcatgtgggcaggaaggccctcgggatcccgcatcagtcccacggccgcggtgcggtcgtcacctgtgatcacggctgcctggcgccccctgccggccccacctcagcccttcctcgcaggcctggccggggcaacccagtgggcctgatgctgcctggcacctcgaggccccagagccagtgagcagacgctcgctcgcccatctccctagagtcccgctgtgcagctgacaccccctgccccagccccacggctctcagctgtccggttccagcgtccactccgacagccactgcaggcaggggccccgctgtgcctcagtctcagggggcttggttgggggtggaggaggccggccgggcccaggcaggagtgcggaggggctgcctggcctggggcccctatcctcggggtcagggtcgggggtggcccgtaaggcctgcacgagctggtccagcgactgcagcagtgtgtgggggctccagcaggcatccagggagggcaggaaggggtcaggcgtgcagacctccacacactcggtgtccgtggggatgcgcaggtagaaagcgtgcagcatcattctgaacggccggtcctcccggcccgagacttctccgtaggtcaggtcgcccaccacggggtggcccagggcactgcagtgcacgcgcagctggtgtgtccggcctgcgggatgagggcggtgccggatcaagctgggagcggggccgatccacacctatctccctgaccaggacccacctcccgtcatgaccccgctgcagtcttgaagcagcctcttggggtggaactctccctgtcccctgccatgagtgaggatgacagtatttaggacagaagattgtgttcaggtcaccactggtgaggacagggccagggtggtgctcggtcctggagaatctaggccagccag

SEQ ID NO: 81748 - DNA, 2217 bp, Homo sapiens
gtcgaggatgatttccacaaccagttcgcggccgagctggaggtgctggcagagctggaaggtggggcgcggcccccggccgttggggaggagctgcgaaagccgggacagtggcgacctcggggagggcgtgccgggggccgaaggggcctccacgtcgccgctggcgggatctgctgtctcggggcggccgctgacaatctcctctcccagcaggggcgtcgactccgtcgccctccggggtccccctgttcaccgcgggccgacccccgcggacgttcgaggaggcccttgccagaggggacgcggcctccagtcccgccccagccgcatctgtgggcagcagccagggcggcgccaggaagaggcaggtggacgccgacctgcagccggccgggtccctgccccacggtaggttggcggcattgccccagggcctccggagtgggcgcgaggctgaggaggcctctggttccctgcatgtgtctcccccagcccccaggatcaaacggcctaggctgcaggtggtcaagaggctgaacttcagatcggaggagatggaggagccgccccctcccgactcctcgccgacggacatcaccccgccgccgagccctgaggacctcgcagagctttggggccacgggtgtgtggcttggacatgggcgtcccatcccatctgtccagtgggactcagatggagcccatcccgtgccctggatgaggcctggggggtggggagggttccatggctgagagcagtctcggacacccatatccaagggtgaccccacgcttgagtttctgccactgagccccggtctctctccagagtctcagaagctgctgccgacgtgggtctcacacgggcctcaccagctgcccgcaatcccgtcctgaggcggccccccatcttggaggactacgtccacgtgacatccacggagggcgtccgggcttatctggtgctgcgtgctgaccccatggccccgggggtgcaggtgcgtggctgtggccttcctgcacggtgggtgggccagtgctgctcaggaaagggtccttggagcccctcacccctgccatttgcttaaagcgggtcctgtgcagagccccaggggtgcagagggggaggctgcgtcatggggcgtagacttagaggacacagcctccccacagcaggttgctgtccagcctgtttgtatggcctcgggtggagagggcctccttgcttcccctcctgcttttgccctttcctcctttctcctaaagctgcccccaatttccctttgcagctgacccatctggatggcttcattcctttggcacccctgtccagtctcccacccctcactggccagcttactggggttgtcccacccgggtccctgagcactgatgggggctgacgtgaatcctgtgacctaggaggggcccagaggcaattgtcctcccttccccacagggctctctcctccacgtcccatggcgaggcggtggccagctggacctgctgggtgtgtccttagcctccctgaagaagcaggtcgacggcgaggtaggggctgcgggtttgctggggggcggtggcggggccgcctgagccctcctgattccagcctgttgtttgcacagcggcgggagcggctgcttcaggaggcccagaagctttcagacaccctgcacaggtgacttggttggcccttccgccctggggacccttgttggctcttgcaccaactcctagctcctagcgtgtgggttggcatggtccctgcgagttgtttgtggctcaggacgtggtcctctccagtctcaggtcgggggaggaggaggcagcccagcccttgggggcccctgaggaggagccgactgacggtcaagacgcctccagtcactgcctctgggtggatgagtttgcaccccgccactacacggagctgctcagtgatgacgtgaggtcttgttctcactcaagtgtggctggcttcctctgttcccaagatggaagaacctgggcccagtgatttttgcacagccaatccactgggcctcggagacggagtgggctctggtttgcccttttgagttgtaggtggtgaactgagcacagggctgtgtgctactggtcccctgtgacctgtgaggcaggctaggggtccagggtgtcacctgatccaagtctctgttccctttcctaccttcacagcagctgacact

SEQ ID NO: 81749 - DNA, 1057 bp, Homo sapiens
tgagtcccccagtgcctggggtgtgctccagggtcatgctccccggctgtgctccatgttcagggcccgcatggggccaggagtctgaaagcacggtcatggcgtctgggggtggcgggccccagcttatcttttgctcagatgtaaccgtgaaggggggtcacttccagctacttgagattggctctgggacctgagttttgctgcagagctgctcccagccttagcacccccacatggaactggagccgggggccccgagagtgactgcactttccaacactccgtttcccgctgtgggatggccatgggggtggtgggggtgaggcatggggcagtggccccggggtcctgctgccccagcgacggcaccaacttgcaggacgctgagtcactctccgtggcagccatcggcaggtttcatcatcatcccacgtacacttgcagttggggaaactgaggctcggggcagttaaacctggctgccgcagggttggggtgcggtggcaccaggactcagccccacattcctgctctggccttgtggcttttggggtttgcggttggagtgcccggcggctctctggccctgagcctggccccgctgacctgccctggtgtccccctgtgctgagcaggaacgtggaggaactctgccgcttccctgagctgcctgcccgcaagcccctcacctaccagacgaagcagctcatcgcccgcgagatcgaggtggagaagatgcggcgggcggaggcttctgcccgggtagagaacagcccccaggtgagcccacccaggctctggagcaggttgcagtctgggcgtgcaccatccccactgtatccctgtgtggccagatctcacaatgcctgctccctacaggtggatgggagccccccagggctcgagggtctgctggggggcattggggagaaaggggtgcaccgacctgccccacgcaaccatgagcagcggctggagcacatcatgaggcgagcggcccgggaggaacaggtgtggaatgggcagctgtgggggtgggaccagggtacatacc

SEQ ID NO: 81750 - DNA, 1042 bp, Homo sapiens
cctttgcaaggctgcatgcgtttccgtgggtcaggcatagggctctgggtcactgctgtcgtggatgctgatggactggtgttagacctcagcagattctctacctcccaccatgttcttctgccctcatctcctctctgtgacactgaagagagacctgggttcacgcccaccagagtgcccacctggaacacaatgcatttcctcagcagagggtccccgcgagcgcaggggtgtcctcggcggagggtccccgcgaacaggcatgtcctcggcggagggtccctgtgagcgcgggcgtgtcctcggcagagggtccccacaagccacctgttctccgtggcagctgacaggcaggaggctgcatccaaagatgccactcttccttcttggggccatgcgccgttggcctcggaacacctgctgctccgtctcttgggcccaggattccatcacctcaagctcctcttcctgtgccggccttggggaccccctcgggcctcgcctccgctcccagccaccggccgggtcatctgtgggccgcacagccttgtgaggactccgccggcgggggcgagcacagatgggcagtgagaagactgatttccctctgaggagatggctcagtgatgctagaagaaaaacaaggaaggcgaggtcccccaggagcgctcaggccgtgcactctacgcggaactgcgttttcataacaaaacagccgaccagatggagggcgagagatgcaccagagcagctgaacggggcgcagctggggatgcctctgcatggagcagggccccgagccccgaagctttcttagaaacaggatctgatgcccagatctgtgctctctggagccctagttccctgaggctagagttccccactgagcccacagcaggatgacccaagggggctttggaaatacactcaggcagggcccaccctgacccaggcaggcaggtgctcagggctgggtgttcctcaaagctcctgatggttctggcatggccgagcatccgaacgggcactggctcaggct

SEQ ID NO: 81751 - DNA, 1037 bp, Homo sapiens
tgggctcaagtgatctgcctgccttggcctcccaaagtgctgggatcacaggcatgagccaccgtgcctggccttgatagttttgaattatggtgcagggcaagttcccacccttcctcctggctgggctgctgagtgggaccctaggtgtggggacttctctgtgccttggcctgggaggcttccaggtccccacagccaggtcttgcgcttagagccttgagctgggctcgggacccgggccccattcctgctggtccccaaccggcacgtccccacccacgtgtccatccccagggaaagggcatcctgagcctgaggggccgcctgtggaccccggctcttgggggttgcagcttggccgcctgtgggcagcaggcggcgcgttctccgactgcctgttctccgactgcctgtgttctcaagttgggcacggggtttacaggtgtcgtctctccttcagctggggtgtgtattctttgcttttagatggtaaagattttaagacaaaaatgaacactttgcttttgcttcaaaagctccctgaatgtctcttggcccctcttagcgtggcaggtgggctccacgtgtgcagggccaggcgggccggggggatcctgtgtgcagtaggagccggggtcagggggccagggacccacaagcctctccctagccccgccccccgagatcggccaggcacctcacggcccctcctgtccctgcagacccagccgatgcccaatcctgtggcgtactacctgcaccactcaccctggtggttccatcgcttcgagacgctcagcaaccacttcatcgagctcctggtgcccttcttcctcttcctcggccggcgggcgtgcatcatccacggggtgctgcagatcctgttccaggtgagcccgcgccgcccgccctgccccgtgtccacagagacgctggcccgtcgccctatttctggctgccccgctctctgggaggaccctggggcattacaggccccctttcttggggacagcctgtcctccccagccttcgtt

SEQ ID NO: 81752 - DNA, 1047 bp, Homo sapiens
actccagaacgagagtaattatcctaattgctttattgcatcagtgtgggggcagctcgggtagctcagaggaaaaggggcttctttcagggcccatcggcttcagggcgacatgctccacccggaaggggcagacctctgactccggcacggaggcgtcgtgggaatttttagaaaatgatatctatggcatcctgatctctggcccccagctgcagccccctgtgaggccgaggcccagaccggagtccctgaaagcgctttgtgcctccgacctccggcgtttttggcagagctggggcaggagccggggtgctcctcgcggctgaagcgcatcagcctccagggcgagggtgtctcagatccccgcacagcccgtcacacagcccctgggacaatcacacaggacagtgctctcctgtgatcttcaaaggatctcctgggttgtgggggtgcaaaataaaactctgctacaaagagcattagtaattcctcttcccaaccgcacagttcagctcaagcgatctcccggtaacagaaccagcccctgtgcttaccgtgaacacgcctttctgggttcacgccgaaggtttctattgaagtgcacgtcgtttgccaaaaaataaaaataaaaatacagtaagtccaaaatctgctctgtctgatttctaagttaaaaccgtgatcacagcaagaggaatttacatggtatggtgactagggcagcaacttctggaaggcaaaccaatcccgtcagagagataggcggctgagagtctacagcagacctgtgcttcggagatgaactgccctcctcttaattcccctcgcccgactaagctgccaaggcctggtgattcttggggtcttcatggtgtctggtgacctgacagcatgtgccccaaatcctggcccctacacggcctggctgccaccccttggctctgcccccacctgggctgctccaggccccagcagccaaggcctcaaggacacccagagccgggggaaggagcagttcaggtgttttcagacagacaagcctct

SEQ ID NO: 81753 - DNA, 2155 bp, Homo sapiens
acccgattaatttttttattttcttttttatagtgacagggtcttgctatgttgtccaggctggtcttgaactcctaggctcaaactgtcctcctctcttgacctcccaaagtgctttaggggattacaggcatgagccaccacgccctcccagaaaatagattttaaaggccattttgtctcattcacacgatcattaacattttgttggttttgaatttctcccatcacgttgttagccatttctgttttaaaaaattctctttactatgcagaattctaaactactgaagaagtgttttgttgctgtgattcatacttccagtgctgaatccacttgagtggctttaatctagaatcttcaacgtggctttttaattgtttttaactgtatggatgcaggatgtttggtggcatctgctcttcattcctagtggattagtgacagtgacagtgagcaaggggcttcctgtgtggctgaagagggcggtttcgtcaccacccattccgcagggggcagctcagcccagcaggcatttggggactcgcacccagcactctgcggacgggggtctgactgcacccgctcctcccctccaccccccgctgccggctggagggcacagtctgtgcggtggccttgccaccccctagcaggtctgcatccgttctcccgcctgggcctcaatacttgtttcctccttttcctcactctcccttgcctaaaccgccatagatcatcccctttatgggtcttttcaaagagctggttttatctatcagaattttaaaatatactctagctcattcgtttttgcctcttgtagttgcttgctttttctgggagaaagtggtttatcatttccagtgcctggagttggttcagctattttctgtctcttcttctctgctaatgaaagccaactggagggcggctacccacttctgggtatgtccctgccctaccctgtcatctgagacccccggctgcccctgacagtggccgatggtgtggttttataaccttcagcgctaatgcctctagaccaaggacagcctggagaaatgcttcgaaaatgccacatgctcagggttttacaggtggccttttgtttctcaactttgattttattacactgtggccagtgtggcctgaagattgttcttttaattattaaaaaaaaatgggcatgtgcatgaatagtcaaattgtattacacgacttataataaaaacagaagcccttgccgtaccacttctcagccacatgctgttctccagacaacccttttatcacttcctgcacttaactctggtatttgtctgtctttctgactgataggtttatatgggttattcttcgcataccacggttagacactgtgtatacatgtcctcttatgaacgacagggattgccctcacacaccctaatgttcttctcatcatcatcagtatagctgtgtcacaagtataatttttattagtttgattgtctttacattattttgactctgtaaatattgtgactgctgagccaaatagtgaactatagtaactttttttctaataactcttcatttttcctggagttcatagttgccttttctattttgattggcttcgtttttcatctctgatcatatctcactcatttgttccaactttaccagcacaactggtcaaccctttccaatactgttgtttttacagaatcaaacacattggacaatccatcagttttttctctccactttgtgaagatttccgctcaggacctcattgttactgcttggagcagatgctttgtaggcctctggatttggagattgtggggcaggttaactctgccagattgggggccactgatgagtttgtccctctgcccattccagggatcctaagatggttcccaggagcaggtgacctcattgtattgagggtaaggctcagagtccacagcccctcctccacgtccttctaaagcagtgctcttagggaggatttctcttttttagagctgggatcttgctctgttgctcaggctagtctcaacctactgggctcaagctgtgctgccacctcagcctcctgagtagccgggactattggcttccctgagaagcctgatgctttagtggggaaggtgtttagag

SEQ ID NO: 81754 - DNA, 1120 bp, Homo sapiens
gacatgagcgaggcccgctcccagccgccctgcagcccgtccggcaccgccagctccatgtcgcacgtggaggactcggactcggacgcgccgccgtctcccgccggctccgagggcctgggccgcgcgggggtcgcggtggggggcgcccggggcgacccggcggaggcggcggacgagcgcttcccggcctgcatccgcgacgccgtgtcgcaggtgctcaagggctacgactggagtctggtgcccatgccggtgcgcggcggcggcggcggcgcgctcaaagccaagccgcatgtgaagcggcccatgaacgcattcatggtgtgggcgcaggcggcgcgccgcaagctggccgaccagtacccgcacctgcacaacgccgagctcagcaagacgctgggcaagctgtggcggtgagtgccggcgccccgggggcggggttcgggaccttggccgcccctggtctcggactgcgagcgggggcctggagggcgcagagctcgcggaggtggtggccacacgcaggctccgggctctgcaccccgggcgggtgtcagggcgggtcccagtggaaaaacatcctctggccagccggggtccggcgccagctatgggagtcgggatccgcggagggcagcgcctggggtgtgcaccctcgtggcgggtgcgctctggagccagttctcctggcggggaacaccctgcggagggccatggctggcaccccgacgtgccctccagccgttgcgagtggccccagccccgggaggcacgcccggcacgacagcaagttgcatgcggctctctggaggtgctccctccttagaaagggctcagctcctctagctcctggaccacccatggggagggagtgcggcaggcggatgggtgggcagcaggtttgcctgcgagtaccctccccgcagtttctccctctcctggacaccctcggtccgaagcagggagggcaggagtggagatgacggggtgcgccgtgtgcacgccttggcgtggtggggccggtcagttttccagaaattaggactgcagagtgaagaacttgttgctcaggacaggccgcccccaccgagtgtcctctggttgggtttcaaatggt

SEQ ID NO: 81755 - DNA, 1075 bp, Homo sapiens
ccccgagggcccctgggagctcagatcctacccctggaggcagccctggggaggcccggtggagactctgctcttctgctgaagctgctgctgaagagtgacaggcctgcccagcgccgggggagacccgggactctcagagggagtgcaggacagggcagggcagggcagggccatgattcccggtgacggccaggctgccatgggccgaactgccatctctgggcctgcgggcaggcgctcagctccccaggcctcattttcctcacctaaggaatgggacacgcacaccttcgcccccagggtggtgcagagaacaggacggtgcctccgagcagtgccttcaacgccgtctggggcctgggaatgcaccaggacttgataaataaacaccagctctcaacacctcgccctctgcaaggagaaggccaggaacgtcccgtttagagagaaggcgagtccacgagcagcagacagtcggtgcttaacaggtgctcgctcttcttcagagccttagggtgccagctggccagagtgagcctcgctgaccagggagctgtggcagccggccgggggtcggcccctggggcaggtgggatgcctgtggggccggcgtaggctcaggctttgtctgggagtgccctgccccgagcactggcctggacacctgagctgagcctcagacaggcgtttcggggccgacccggcaggagcagccgctatccccgggcagctgagcccagcagcgagggctggtagaacgatctagacgaaacactgaacttaatagcaaaaccacttctttcgagggaaaacacgatccgcagccagccggcgcgtacacatggggcctggaaaagaagagaattccggagacacaaacggccctacgcgtcgccgcctcggcccggctgctaagttattaaactcctgcacagggaaaagcgataaagtaaacatccacctctcccgtcgctctcagaagtgaaaggttcctgagatgggaaatgcagacggcctgcagagtgctccatccaaataaaatcatcagatgcttgaagaccctgggagaaat

SEQ ID NO: 81756 - DNA, 1012 bp, Homo sapiens
ccctacctgcatccctggcggggcatctgcggtccagcctggcagggaccctgagtttgggtctgtgggggtgtggcctctgggggagggcaaaccccggtgggcactggtcaccggtgagccggcgtcgtggccacagccttcacactcccagccgctgcaggtccccgtttccgtacgtcacccagcgccacgcttctgcacccacgcagagccacgccccacctgtgcgttcatgctgacttattaccgactcttctcgagtgaggagttctcgccaaacgccattaggctttcagcttccagatgaaatgaaatggctgatgaatcactatatttcaacatattaggaaagatggacctatttgcatccgatgagcaaaatgcacttttttattgattgaaaagttgatgaggcaaacaaatcagggaaaatggctcccttttcatttccctctgagcagcaaattaagcgacttaaaagagctttgaatgagtcaacaacaaaatgcccctaaatgtggaaatgtgaagtgcaaacatttcagcctcactgtcagtgcccaccgaggacacagcctgcctcccgccctgggaagctgggggctgtggaggaccccggccacttggacatccagccacatcccaaagtctccaaggggagatggggtccccagcaagcctgtccggattagccaagatgaggggcttcaggagtcaacacagatggagctgccaggcgtggtggctcaagcctgccatcctaacactttgggaggccaaggcgagaggatcacttgagcccaagagttcaaggccagcctgggccacatagggagacctcccccatctctaaaaagatttttaaaaattagccaggtctgatggcacctgtagtcccagctactcgggaggctgaggtgggaggatcgcttgagcccaggcattagaggctccagtgagctatgatcacaccactgcactccagcgacaggtgagaccccgtctaaaa

SEQ ID NO: 81757 - DNA, 1045 bp, Homo sapiens
ggaggggccgcccgctgggcctcggctccttacctggtagacgagggcagcagcactgcagggcaggctctgaggggcttcagggagacgcaggtgctggcctcagactccaggatgctgcggccaggccaggcgccatctgggtgcaggggcggccacagggcagctgtcgccatatcgacagcagccgtccgtctgggctcccggggccacctgcccgccgctccttcctctcctggcttattttccaaacaatttgcttaacgtgattcccggccaagctaaacatgactaatcgtgtttacccggtgatcccgcgcctcctggcaggcggggctggggcccaggaggaaggaatgcctgcatgtgctggttcagggactcaccaccctggcgtcctcccttcttctcttgcagagcctgacgcaccccagggctgccgccatggagcccctgttcccagcctccacgcccagctggaacgcctcctccccgggggctgcctctggaggcggtgacaacaggacgctggtggggccggcgccctcggcaggggcccgggcggtgctggtgcccgtgctgtacctgctggtgtgtgcggccgggctgggcgggaacacgctggtcatctacgtggtgctgcgcttcgccaagatgaagaccgtcaccaacatctacattctcaacctggcagtggccgacgtcctgtacatgctggggctgcctttcctggccacgcagaacgccgcgtccttctggcccttcggccccgtcctgtgccgcctggtcatgacgctggacggcgtcaaccagttcaccagtgtcttctgcctgacagtcatgagcgtggaccgctacctggcagtggtgcacccgctgagctcggcccgctggcgccgcccgcgtgtggccaagctggcgagcgccgcggcctgggtcctgtctctgtgcatgtcgctgccgctcctggtgttcgcggacgtgcaggagggcggtacctgcaacgccagctggccggagcccgtggggctgtggggcgccgtct

SEQ ID NO: 81758 - DNA, 1011 bp, Homo sapiens
cctgctgccttggtggcaacttcagggtgtcgccagacaagcctcgagggccactgggctccgcctggtcatcccgagcccgagatgccacgtggtcagacctgccgcagccagttccctgcctcggccagtcccctgcctccactcctgcccctccacaccccagccctccaaaagcagcagacctgctgccctgggatggttggaggtggagacctggcgccccgctggatgcacgtcagaccccagggtgtcagtgtccctggaggccggtggtggtaggaggggagtcccgatcacactaggggtgcgggaaaatcaccagggggtggcccgagtcagtgtgcagtgggcgtggacacccactgtgaacagtggacggggctcgggggtcccgggaggggctgcagccccgaggacactcctgcagggcttagcagtgccaatcctggccctgctgcccacaggcatgcggatcctggtcactctgctgctggatacgctgcccatgctcgggaacgtccttctgctgtgcttcttcgtcttcttcattttcggcatcgttggcgtccagctctgggctggcctcctgcggaaccgctgcttcctggacagtgcctttgtcaggtgcccaggccccacccccgtgaggcccctgcccagatggccctgcccaccatgcagataacgcaccatgtggctccaccgccccacgtggctctgcccaccgtgcagtcacccgccccgccactgctgtccccgtcatggctccgtccaccatgctgtctcccgcccccaccccccatcatggctccgcccagctggcagtcaccgccccacatggctccgcccacggtgcagtcgctgcacatatgccccaccccccaccatggctccgcccaccgcgcagtcgctgcacatatgccccaccccccaccatggctctgcccaccacgcagtcgctgcacatatgccccacccccatcatggctccgcccaccgtgcggtcgc

SEQ ID NO: 81759 - DNA, 1050 bp, Homo sapiens
accgggggtgggggcaggcaccaggctccaactggggtgttctgagcgcctgctgtgtgcccgtctagcctggagctcagggtcagggtcggctggaggctaggcagccaggcaggccgggctttcacagtccagagaggctgaatgaggcaggtgtcccaggttccagttgccacccaaatccagagtggcttccctctgtctgtcccgcctctggtcttggttctctcgcctgtggaatggacactactgagttgtagggcaggaagtcccttttaagctagagagctcgggcgcccagggagggtaggaggccaggagagccaagacgggcagagccagtcctgcccctccctcctcccacccccctcccgctcccccaccttcttccgctcagcacacccctgcctccaccctcaacacgcccctgcccccaccctcagcatcctgggcatgcaccttttcggctgcaagttcagcctgaagacagacaccggagacaccgtgcctgacaggaagaacttcgactccctgctgtgggccatcgtcaccgtgttccaggtagtgcccggggtccccgcagcagtgttgggtgctgagtgtggtccccagagaggtggaggtgccgtcctgcgcatccatagctgcctctgccccaaggacttgccggcatttcggggctggggtgaccaccccaggccccctgctatcccccagatcctgacccaggaggactggaacgtggtcctgtacaacggcatggcctccacctcctcctgggccgccctctacttcgtggccctcatgaccttcggcaactatgtgctcttcaacctgctggtggccatcctcgtggagggcttccaggcggaggtgagggggcagggagaggggctgccaggaggagggcgatgagaagagagacgggcttcaggtcgaggggaggggtgtggggggcctgccaagaggtgagggatagagaagggaagctggctgccatgaggagaggggaggccaggagcccagcggagtgggcaggggtcggtcggg

SEQ ID NO: 81760 - DNA, 1053 bp, Homo sapiens
ccggtttagggagcatccacacttctcctcccgtcggtcatgctcgcattcggccttttgtacggggtcagctcattgggcggatgagaaggtgtccccgcctaccgccccgaactggccaattgcaaggggtttcacagggcgctgaactcgcgggagcgtcaccgtcctgcgacgcttcagaggatccttaggcctcagtggtctttgacccccggccccaggacctgaccccaaggaaacctccgggacctgtggctggagaggtgaccgccaggcatccggggagcctttggagatctcggcttcctttttcccccgctgcttgccggcgtgtcctcgggtggacgcgggcagcccgaaggggagtttacagacgctccctcacatcggggacgcggctcctttaagggcgtaggtgtccagggcgccgcctgactggaaagtcgccccccggccgggctcctggggcggacccggggcgcgggcgcgcggcggcggggcgcgggcaacggggagcgctcggcggcgcgggaggcgctcggggccgggcggcaggagcggcgcgcgaggcaggcgtgcagagggcagccccgcgttaggccccgccccgcgcgccccgcccgcgccagggtcctcggagctgctctggctgcgcgcggagcgggctccggagggaagtcccgagacaaagggaagcgccgccgccgccgccccgctcggtcctccacctgtccgctacgctcgccggggctgcggccgcccgaggtgagcgcgtgcgggggccgggccggggccgcggggcgggggtcgggccgaggcctctactcctgttgggcccgggcccccgactgccccgcgccccgccccgccgagccgggccccgcgccgcggccgagctttccggggagcccgagaggccccgcgctcggcgccggctcggtccgcgctgctggcgccgctgggctgcggcccgagcggccgggccgccgcaggccttcggggccggggctcccccacttcgcccccgaggtgcgcctggcgcggggccgg

SEQ ID NO: 81761 - DNA, 1203 bp, Homo sapiens
cagggtggcagctaccccccagccgcagcggcccagcctctgaacatctgtctcctcaccttcgagcagaggccgcagcatgtgtcgcagaccagggctgggttggggccatggggaggggtcctacctgcccccgcctcccggtgatctgggcgccgctcacaaggcctcccctggtagacccccggggtcggacgacggcttgcaagaagagagtccctgctgggccaggccaccgtatgttaggagcaagcctgcctgctgcgggccacgtgcgcgtgctggggtggcaggagcccgctcgcctctcctgaccccgtgctctgcctcctgtgttccagggactttgaacatgtcggggatcgccctcagcagactcgcccaggagaggaaagcatggaggaaagaccacccatttgtaaggagggcttcatttctgtgtgcagtgccgcggacaggctccctcggctgaaaccgcgccctccctactgggagggagctggtcgcgtgcctgggctgggccggtgggactcgcaggccggttcttggtggttttgctcaaactagatgccgccacgctgatatgcttttgtggttgttttcttttctctcagggtttcgtggctgtcccaacaaaaaatcccgatggcacgatgaacctcatgaactgggagtgcgccattccaggaaagaaaggggtaaggggcgctgccggcctcctgcctgtcggggctcagcagatgcgtgcggcagtgccatggggatactccgctcagatccctgccgtccgtgacggccacccttgtcacaggccgcggtcaacagctcagatccccagctgtggcctggcccccgccccgtgaggacttgagctcagaaggtggtgctggcaaggttggggtgacagctgtgtccctaccgagggcatttctggttgagaaggaagcaggctgggcctggccgggcacagggctgagctgtggcagaggggaaggggctctgatgtgtgttgggagcaggcctgaggggcgggcagcctttgcgtgctggaacccgggattctgctgtgtccttccaggtgtggctcaggtcgcgggagctgggtttgcaggagagccaccccggcctaaaaccgtctactggagaacctcctggggcacagggactggcggcagccacctaggatgcctgcttggggccccg

SEQ ID NO: 81762 - DNA, 1020 bp, Homo sapiens
ccttcacattacggcgaggcaggtgcgcgcgcggccccaaggaagacgggagtggtgtcgggttgtggggtggcaaaggcgcctcatccaggcgggacctggggcaggggcttgcagaacaccctggggtgagggcacgggtgtgctcttggcgctgccggccccagtgtgcggcactcgttgccccccagcccagcccccgacccccgtctcctcctctcctttccaggagggcctttccgactcactctctgggcatggcagaggtcctgaccgcccccttggtggggctggtccaggcttcaggctggtatgggagccgcctctgtcgggcctctggcccccggtgtcctcgcagtcctggaggttgtgtcctagaagcgatccccttcctcctgggccggcctgcggcaggcaagcagcccatctcaccacggtttatttccccacagactccgtgggaaggaggcttgtttaaactacggatgcttttcaaagatgattatccatcttcgccaccaaaatgtaagtagctccctgttcagtgtcctggaagtcggcctgttcctgcggggattggagtcctctccaaagaggcccgtggctgtggccgtggcgccctggtccgggcgatccatggagctgggagggagtgagatcacagatttggaggtcggctttgatccctgatccccgcctcaggctgcagatgcgagtctgtttccagctccacgggtgggcggtgcacgtaatagacttagtctctcatcccagctaattggctgggaagctccagagtcctttgcagggagaggctgtgagatccaggctggagctcctgggctaggagtgcctggaccctcagtgattgttggcgatgaagacaggatttggtgcccacaagaccccagccctggatgggatggacgtgcagaagcgccaccactccgagtctcactggagggtttatcttgccccacctcactgctcttcctgtgggctctcgcagtctctcccacc

SEQ ID NO: 81763 - DNA, 1036 bp, Homo sapiens
cgtctcggctgcggccgtgtccccaaggctctgttccctgtgtgcaaaggtggatatgtcttcctttagtctcctcatggccacaatttaatttttttgaaaagtttttggccaaataacctggctaccaacccggggccccagtgttgggaggagggtgatgtggggaaggacgtgactctgggacagtgcctgcctccaaaaagtgcttcctttcttcctcttcctccaggtaaattcgaaccaccattatttcacccgaatgtgtacccttcggggacagtgtgcctgtccatcttagaggaggacaaggactggaggccagccatcacaatcaaacaggtacggggcctccgcctctggcaccggcagggctgccttagtctcccctccggacacgtgggtctgtggtcattctctgtggctgaggccgagtctcacggtgtctccctttcaaactgctcacacccgtcttgtgtttttgtctctggcacagatcctattaggaatacaggaacttctaaatgaaccaaatatccaagacccagctcaagcagaggcctacacgatttactggttagtagcagccctggccccgctggtggcagctcctccccgtcccagccaaggccgcctggcaggacgggagtggaggacacaggctcaccctacggacagccagggtccacgcctctgtggggaaggtcggggggcataaaccctgtgggcagcaggcaccgttgcacaccgtctgcggtgggcatggatggcgccggagccgtgtcccggggagggagcaggccaggtgacgggctgtcttgggccactgccccagtgagttgtggccagctaggaggggaaggaccctgggcgtgggtgccagaggaggccatgctgagaggcctctccaccggctcagcctcccatggaccccagcctcccgcgccgcccttgctgcttgtccccatcccctctacaacttggttccttctgtgggggggcccagcccagcagggctcagtgacgtgatgctgtc

SEQ ID NO: 81764 - DNA, 1043 bp, Homo sapiens
acagggtggaagcccagggtccgtgtgacagcatcacgtcactgagccctgctgggctgggcccccccacagaaggaaccaagttgtagaggggatggggacaagcagcaagggcggcgcgggaggctggggtccatgggaggctgagccggtggagaggcctctcagcatggcctcctctggcacccacgcccagggtccttcccctcctagctggccacaactcactggggcagtggcccaagacagcccgtcacctggcctgctccctccccgggacacggctccggcgccatccatgcccaccgcagacggtgtgcaacggtgcctgctgcccacagggtttatgccccccgaccttccccacagaggcgtggaccctggctgtccgtagggtgagcctgtgtcctccactcccgtcctgccaggcggccttggctgggacggggaggagctgccaccagcggggccagggctgctactaaccagtaaatcgtgtaggcctctgcttgagctgggtcttggatatttggttcatttagaagttcctgtattcctaataggatctgtgccagagacaaaaacacaagacgggtgtgagcagtttgaaagggagacaccgtgagactcggcctcagccacagagaatgaccacagacccacgtgtccggaggggagactaaggcagccctgccggtgccagaggcggaggccccgtacctgtttgattgtgatggctggcctccagtccttgtcctcctctaagatggacaggcacactgtccccgaagggtacacattcgggtgaaataatggtggttcgaatttacctggaggaagaggaagaaaggaagcactttttggaggcaggcactgtcccagagtcacgtccttccccacatcaccctcctcccaacactggggccccgggttggtagccaggttatttggccaaaaacttttcaaaaaaattaaattgtggccatgaggagactaaaggaagacatatccacctttgcacacagggaacagagccttgggga

SEQ ID NO: 81765 - DNA, 1002 bp, Homo sapiens
gcacagtggacagagatgggaagccctgggggacacagcccggtgctcccagccctccaacctctggctcccaacccagtctccccatcctagcgagcttggccctcctcagtttcgtttcaagccttggggctggagctggccctgctgccctggcaccccccggtggctggagctgggtccccgtggcccaagtgcagggtcccaagagggcagggcggggctccccaaaggagcaaagaatgcagggagggcggtccagggccctgggaaggggagctcggcaccctccaggtccgtgtgggactccagccgctgttggctgggaatcgaagttagaggtgacttccaaaggccccccgagccggcagtgccccccaccacccctccagcgactctgcggtgccagtgccttgttggcttttccggctacgcaccctgcagtcactgagctctcggtctgacgtctgatgtttgtggtttgtttataacacggggccttacctggggaattcagctggtttgaatatttgtagcccgctcccagaatgtcttattttgtaatgactgaactacatttagtaatagttacacatgtatatggttaatacatatggaaattcaatatattttgtagttaacgtattctgaagtaacggatgtttctcgccaatcgtagtgacttcagctaacgaaatgttcttttgtagtaccacggtcctcggcctaacgaaggacgtgaaccttgtaagaggagagctctgaaacgcggtcacctttgtttagtggaagggaaagtgtgttcccggcatgaggtgcctcggaattagtaaagaattgtgggcaatggattaaccactgtatctaagaatccaccattaaagcatttgcacagactgcggcctgccgggtgtgtcctttcctgccctgtccctggctcccctgggctttgggggtgggagcccactggggccacagggcgtcccccgaccccaaggccca

SEQ ID NO: 81766 - DNA, 1054 bp, Homo sapiens
cagacagctggtggcgcagtctggggtcgccgtcatcgactgctcctgggccaggctggacgagacaccgtttgggaagatgcgagggagccacttgcgcctgttgccctacctggtggccgccaaccccgtgaactatggccggccctacagactttcctgcgtggaagcgtttgctgccaccttctgcatcgtaggtgagtccaggggccccacagcagtgtgacccggcggcctgctgttcctgctatgctcccagcatcatgtttcctgccgacagaccccaggaggagcataagggacggacaggggaacagttcagacagaccacggttccagccccaactgtcacttcaggttttcggcctgtggagttgcagtagaggcagaatgggatcgctgttctatcagggccggtgtgtggggtgccattcattatcagggcaccactgcccagagaatcctccttatcctccacgtcctccttactgaattgctgatctaaagaggccctgatgaggcgtggggcagtcttggtgggaatgtttgtttcgcagcaaaggagggggacttggtcggttgcagaggtgtggactgtagcaagggaggtgcaggctgggggcagcacgggttctcaggactgtgagctgatgtttgctggggaccctgcggttacttgggagagcgccgccatccggcagcagggtgatcaggaggcacttgaggggaccgtcgacttctttgggtttcctgtttctcacaccgtcaggctttccagaccttgctgtcattttgctgcggaagtttaaatggggcaagggcttcttggacctgaaccgccagctcctggacaagtacgcggcctgcggcagcccggaggaggtgctgcaggcggagcaggagttcttggccaatgccaaggagagcccccaggaggaggagatcggtgagccttggcggggtgggaaccaaggccctccaaagcctggggggtgggaggcctggtcctgctctgagctcacttagaggccactttcctctctcggctcagatc

SEQ ID NO: 81767 - DNA, 1015 bp, Homo sapiens
gtgggccaggacggtgcagcagccgtctccccccttgatttctgggagtgagccctagatagcaccctaggggtggtggagcctccaggaccctctccggtgctctctttggatgaggggcacttggctttgaagcggggccggagtctctcgggggcacccacacgctccctgaacgtcccctctccaggcagcttcccgggcttcagcacaggtgacttggctgaggtaggtggtggctgacgccctctgagttgagtgcgagccgtagtttgtcgggtgagcattgaaggcagcttagcccctccacatgctgcgcactctgcagctggtgggtgaagcttctgccgacttagcacggagcctggtgggatcaccccactccaaggggagaaaaggcgcctccgttcctgtcccccaacttctttgcgtctttgattttcatgaggagtttctggatctctgccaggtgtgaggggcggtgagctctgaaggggctgccatatcctgatcctgggacttgggtgcagagggcaggtccaggttcccgagcctggctgacctgactatgggcaaaccgcttggccctgcccgtcatcaagcccccgtatgggagcatgagggggctgtgggcaggcctgcgggttggggggtcggtgcctgtcctcagtgagtctgtccagggccctgacatggttcaggctgacacctgcaaggatgtagtggggggcattccatgcagggcttggaggccgagcagctttctggggactggtgtggctgatcttactgaatggaaggcacagccaggctgagcctgcagtggcacagcaggttaggagcccggcaaaggacccattgggaagcggtgaccggcacgcgcaagggcacaagcttcctcctttcttgcaggtcaggattcaggatgcaatgaggcttttcttggtaggaaggttactattgcaatgcatgaaggcaggctgggcatgggcctcagggggtgtgggttgagcga

SEQ ID NO: 81768 - DNA, 1045 bp, Homo sapiens
aaagcaaacaaaatgaagtggttgggatttggatgaggactgcgggccaggacagcggagcgccacacactgagactccgtcctgaacccttcggcagcagcctctctgtgcagtggtgggaggggagcgtgccctccagtgacctcgtttcagctttggaggctccagatgcagagctgtgaccactgtgtcctcggcttgcagggagctgcaggcccaggaagccttgcagaacggccagctgggcggcggggaaggggtcccggatctgcagcctggggtcttggccagccaggccatgattgagaagatcctgagcgaggacccccggtggcaaggtaactccacggccgcagctgagggcggtggtggggggggcgggcacagcgcgagaacagctcgggccacttggttccctgtgcctttcagtttacgtgcaaggtgatcagatggggaaaccgaggctcgtggagtccaataccaagccctccccaacagggggtgggtgccgagtgggatttgggcccaggcgccttcccccgcacctgctctgaatctctgcggcaactggcatctcagtggggccagccattgaccaagtggccgaggaggtagcacaactcccaccggaactcgtgaggcgtcctgtcccagagccggggcgcccaccaggcacccaccaggatgctcagcagagcccccagcccaccaggcacccaccaggatgcccagcagagcccccagccctgcgcctctctggggtggtgctctagacagcagctttcaaatccctgagcttggccagaaacatatggaccagggggctgtccctcggggctgggggacctgcattcctggctggcacacagatgaggttatatgcaggggagattttgatttgaaaaaaaacgtggtaaggctgggagcactggctcacgcctgtaatctcagcactttgggaggccgaggcgggcagatcacttgaggtcaggagtttgaggccagcctggccaacatggtgaaaccatgtctctgctaaaaata

SEQ ID NO: 81769 - DNA, 1083 bp, Homo sapiens
tgactgcgacgggtaaggaaggtgacgcagcctgcgtgcagggcatgaactctcattcccacacaggtttaaaggtttatttggaacattaggaaggatgagctttgtggaaattcagcattgtgtttcctgctgtgtttggctgactgggggtttgcgatggtctgtgtttcttactgtgtttgactggttgactgggggtttgcggtggtctgtgtacctgggcggttccacatttggggacaggtgctgcgtccagtgtgtccgtccttctgattagaacaggaatctggaagaagggaagggaattcactgcttgccacgtgctgacagggcgtggacccagggagcttagggctgcctctgggtccatgataaccaggcattgcgtgcctctctgctccccaggtgtccctacctgcaccggacgacgggggacacagaacgcaagtaccacctgcgttactacaaaacaggaacctgcatccacgagacagacgcacgtggccactgcgtgaagaatgggctgcactgtgccttcgcgcacggccccctggacctgcggccgcccgtgtgtgacgtcaggtgagtgggcatccacgagtgggcacttggcctgcctgctgctgtgggctctgctggatgagcaggaactcggcaagtggctcgcctccctgctgctgcaggctctgctggcccaaatctctctcctccagaatttctttctgagtctggatgttagtcctttttttgctttttttgagacggattctcgttctgtcacccaggctggagtgcagcggcgcgatctcagctcactgcaagccctgcctcctgggttcacaccattctcctgcctccgctgcccgagtagctgggactacaggtgaccaccaccacgcccagctaattttttttttttttgtatgtttagtagagatggggtttcaccatgttagtcaggatggtctcgatttcctgaccttgtgatccacccacgttggcttcccaaagtgctgggattacagtgagccactgcgcctggcctctggatgttatttctttcttttcttttcttttttt

SEQ ID NO: 81770 - DNA, 1031 bp, Homo sapiens
cccatggtctgggatggcacctggttccggggtccacgcgcctctggggagggaggaacgccccggggttgggggttgcgcctgggctcggggaccgggaccctctgctccggctgccgaccgtgaggtcacagcgggtcgcccagggtccggggtggcgcttgggcttggggaccagggtcagcgcctgggctacgaggtcgggtgagggtcgcgtctggagtcgggatgggggtgggcgcagcgcctggggcccgccgggaatgtgagtacgggtcgaccctgggttgaggctcctgaggccggtgggtcccgccgcccacgagtccgagtccctggaggtgctgccggaagcgagccgcggcgctgtctgtgtttgtaggtacctgaaggagttcaggacggagcagtgccccctgttttcacagcacaagtgcgcgcagcaccggccgttcacctgcttccactggcacttcctcaaccagcggcgccgcaggcccctccgcaggcgcgacggcaccttcaactacagccccgacgtgtactgctccaagtacaacgaagccaccggcgtgtgccccgacggcgacgagtaagcggccgcgagggggcgccgctgcctgggcggaggtggggggcctccacccggggatgcggccgggaccctcagcggacgccttagtgtccatacctggcccctgcagagggagtcgtaattatacgctgaaattttctagtgaccagggatgctggggcggcatttcctattctcaggccagttcccgagggattatgtgtgttttaggggtaacccttgtgtgactcaaaccaattttgcttcacctcccacttttttttgtttgttttttgagacggagtttcactcttgttgctctggctggagtgcaatggcatgatctcggctcactgcagcctctacctcccaggttcaagtgattctcctgcctcagcctccggagtagctgggattacaggcatgtgccaccatgcccagctaattttttattttt

SEQ ID NO: 81771 - DNA, 1004 bp, Homo sapiens
aggctcataggctgggcttcccgaagccttcatccgttgcccggttcccgggatcgggcccaccctgccgccgaggaagaggacgaccctgaccgccccattgagttttcctccagcaaagccaaccctcaccgctggtcggtgggccataccatgggaaagggacatcagcggccctggtggaaggtgctgcccctcagctgcttcctcgtggcgctgatcatctggtgctacctgagggaggagagcgaggcggaccagtggttgagacaggtgtggggagaggtgccagagcccagtgatcgttctgaggagcctgagactccagctgcctacagagcgagaacttgacggggtgcccgctggggctggcaggaagggagccgacagccgcccttcggatttgatgtcacgtttgcccgtgactgtcctggctatgcgtgcgtcctcagcactgaaggacttggctggtggatggggcacttggctatgctgattcgcgtgaaggcggagcagaatctcagcagatcggaaactgctcctcgcctggctcttgatgtccaaggattccatcggcaagacttctcagatccttggggaaggtttcagttgcactgtatgctgttggatttgccaagtctttgtataacataatcatgtttccaaagcacttctggtgacacttgtcatccagtgttagtttgcaggtaatttgctttctgagatagaatatctggcagaagtgtgaaactgtattgcatgctgcggcctgtgcaaggaacacttccacatgtgagttttacacaacaacaaatgaaaataaattttaattttataatatgggattagatgattccctttttttgcatctagtttttaaaaagggggtatttgggcagctattgttttttattttaatctcttcttgtttaccagagcacgtaagttagttgcaccagcagctatttttaaaagtttccttttccggtcgggcgcggtggctg

SEQ ID NO: 81772 - DNA, 1086 bp, Homo sapiens
cctctcgcgggactgaccctgttgtgggcagtggtctccccccttggcgcctccttgcgcaggcccagcctccactctcctcgtctaggtttctttacctccagggatcagctgtgtgtgtgtgacctccctaccgggctatcggcctcttgggagccagcggcagggccggcacctgcgtgcctgtgcccgtgtgcgtgagacagagcccttgcccctgctgctgccccgagggctgccctgccctggaagggcccctctgcctccacaccagtggagtcttcgagacttgggagctgcttggcctcattttcagccatgagcagacggcctgtggtccctgggcctgaggcacggactcgtagcaccagggtttggaggctgcgaccgccccggagagcagcttcacactggcgccacagaggagccccacgtgcactccccggcctgcatccggcttgggtacacaggcccagaggactggggtgactcacgggccctgtgctgtgatgttgagagctgagaaaaacctccaaggccctgagccccatgcccagccctgccttggtcccccaacccccagagcttggagtctgggccccacacccagccctgccttggtccctgagcctcagagcgtggaattgctgccctgtggacactggctgggaaggcaggtcttcccctagcacatggggaccccggcctcgagggtgacctccctaccccgcccctgccagccaccaagcgcaggtgcagcgggggccagactcctgccggcctcagaggacacctggcccagcacaggcagctagaagggccggtgggcaccggggccgggaagcccccacctcaccacctgagggcccctgggaggctcctctggcctggctgggctgggtctggggccgccacaggcccctcacggggcggcagaggcaacttcagtgtccctgttagagcaacacgggtccctccgtggggggctgggtgcggccccctgccgtgtatttcctccccagggagtggggcctccccgggagctgacgccaccaccctgcttagccctcacagggccccaaggtg

SEQ ID NO: 81773 - DNA, 1048 bp, Homo sapiens
aggccccgacatgtgtgctgagctccccttccctgaggccccgacgtgtgtgccgctctccccttccctggggccccgaagtgtgtgctgagctccccttccctggggccccgaagtgtgtgctgagctccccttccctgaggccccgacatgtgtgctgctctccccttccctggggccccgaagtgtgtgctgagctccccttccctgaggccccgacatgtgtgctgctctccccttccctgaggccccgacgcgtgtgctgctctccccttccctgatgccccgacgtgtgtgctgagctccccttccctggggccccgacgtgtgcgctgctctccccttccctggggccctgacgtgtgtgctgctcttcccttccctggggccccgacgtttgtgtgctgagctccccttccctgaggccccgacgtgtctgctgctctcctcagctcctggggctcctggggctgaggggctgcatctgtctcagcctggccgtgacccactcagccgtgcttcccctctttcagccggtggctgctggcagcggaatcccccagatcaagtgcttcctcaacggggtgaagatcccccacgtggtgcggctcaaggtgagggtgcggtggccctggctgggcagggtgggcgcccgctctttgctggttcaggagcagctctcttggctgcctgccttccagaactggcctcagccaccctgtgtactggtggcactgtgtgcagatgggctggctgggtgtgaaggggtcacctttttttctgaaagtggtaacaactggtatttgcacatattaaattacgtaagaaatgagtagtcatacagaaatgcttgcgtggtgcatgtgtgacacagctgtgcgacgcgtctgtgactgtgggctgcgtggtggtgactgattcaccgtggaagctgtcgtggtagtgggcgtgtagcagtttcccgctttcagtttgcctcatggtcatttacacttggtgttatcagagcatctggttctggaggtgctgggagtcctgacccagttcc

SEQ ID NO: 81774 - DNA, 1506 bp, Homo sapiens
atttttagtagcgacagggtttcatcttgttgtccaggctggtctcgaactcctgaccgcagctggtccacttgcctcggcctcccaaagtgctgggattgtaggtgtcagccaccgcgccccatgtgcagttctcttgctgtgtccttgtccttggtgtcgggatgataatggcctcgtgtgtgagctgagaggggcctctctccttgtggccttgtcaactgtgcttctctctttgcctttttctgccacaggatatggaccctccacatcccttccccaaggagatcccacacaacgagaagctcctgtccctcaagtatgaggtgggcgtccttctgtccccctgaccctgagacccggcctctgccccctgccagcccactcccggtcccctgtgcccgcacccagagcgtgggttcggtgctgagtgctgcccttgctgtcccggcctgcagagcttggactatgacaacagtgagaaccagctgttcctggaggaggagcggcggatcaatcacacggtgagctggacgccgctccctgcagggccccacggtgcggggcctggtgccggccgggcctggggctgctcttctgccggggtgaggtgacgcacctcctccctcctcctctgactccgcctctgaggcctgtggttcgtctggtttctagagacagtgggagggtcacggtcaccgtaaccaagaaggctgctcttacggccgccagatgcggtgcccagcataacaaccgctggctgtgaagttgttgggaattcacccacctccccgagtcaccctcgggccccgggtgcgcctcagatgttggccagaaactgtcctttgtgggactcagcgcaccgtgcacactgggcccttcataatcccggggcctgcaggcggtctgggcggtcctgctgctgccagagtgactgcgccagggccctgcctgaccctcgccctgaccgcgccctgcaggccttccggacggtggagatcaagcgctgggtcatctgcgccctcattgggatcctcacgggcctcgtggcctgcttcattgacatcgtggtggaaaacctggctggcctcaagtacagggtcatcaagggcagtatccttcccagtgcggccgctgcagcttgggaggggggcgtggcctgggccgagtcccgggcagaagtcctgagcccagcgtgttccagtgcaggtggaggcggcccggccaggctggctgtgtccctgtcatggttgggccgtgagacgtctctgggatgtccagtgaacatcatggctccacccagcagggtggcatctgccaggctggtctgtggggcagggctgaggtctgggctgggtggtcatgacggggaagcagccagccctccttgatgagccccagatatcgacaagttcacagagaagggcggactgtccttctccctgttgctgtgggccacgctgaacgccgccttcgtgctcgtgggctctgtgattgtggctttca

SEQ ID NO: 81775 - DNA, 2698 bp, Homo sapiens
ctcagcctggcagtgccgtggcgtctgactggcgggtggtggtggaggagcggatcagaagcaagacccagcggctctccaaggttagtggcgcctggtcagctcctcacgggcatggggaccgtgggtgggtgggaagggcggtcagacacctccaggcgctgtctgcagcgaggggcggccacattcgctggggatggtgcctttgccgggattcctgaaaggcagggtccatggtttgcaccgaggaactggattttggctgtaggagacccagactgggcttggggacatgataagtgacaggtgtcctggtggtgctctgtcctcagagcccatctaggccaggggtggtgttgctccacctgaggatgtttaggggcgtctggagatgtttttggttgtcactaggggtgggttggaggccacggaggcatcctgcagtgcccagggcggcctccccaggacgctcctccagccttgaatgtcctgcctgcaagttcgggaacgcctggtctgctgtccaggcattggccgcggagcctgagtcccgtcaccaaccccatggggcctgggagctgggcggggccggaagagtagcccggggaggcaaggcgaggctgaggtccacgctgctttgtgggatcctctcgggctaggggtgccgtgcccgctgcccaagcctgcacctccgtgatcgctgtagttgtgtctggcagggtggcccgaggcagggcccggcaggcagccccagcagattcaactccgtggccggccacttcttcttccccctccttcagcgctttgacaggtgagtgggttttccgtgggcctgtggacttgggggacagggaccctggacgtaccactgtggccaagaagttcgggctgggatctgagtgggtttgggtgtgaacagggtcgtgctttgctgtggctttttgtaagcctgtgttaaatggcagggagcgtcccgcaagattcctctgtggttgagctttgccatgaggcaccaggcatctgctccgatgctgggcttgtggcatggccggcagtgccgcccgcacgtgcccgacgccatcacctgctgggccctgctcgcctcctcctgcctcagccggcgctgcactggccccacgttcagggcgtgaggctctcgagatggcagagaagtgtggggcctgggttgtgctgcagcaggggtgggggtctcggcgttgggaactcctggcccaggtggacttgtgccagacagccctgcagggggagtaggcacccggaaatgtctgctcctacgatctcggtgcaggcaaggcggtgggcacgggaggaggggctgtgtggggctccctcggtctcccacggtggcccaggaggttggggacctggccctgaggcacccgctgcaccttgggctccatcctgtgctctaggcctctggtgaccttcgacctcttgggagaagaccagctggttctcggaaggctggcgcacaccttaggggccctgatgtgcctggctgttaacaccacggtgagccgggagaggtcgccgggcgccggcctgtgctaaccatggatcaggagcgctcctcagcctcacctgcgcccagggatgggtgtctgagggaggggctgcctgtgtgggcccccgggcagcgggagcatcccctcggctgtcaggcaggccctgtccctgctgctgcccagcagcggaagccgcccatgggtgctgggatgtggggacggcgtcgggaccccactgactgtccctctgctggtgtccaggtggctgtggccatgggcaaggccctgctggaattcgtgtgggcccttcgcttccacatcgatgcgtgagtggcctgtggggctgggccaggccaggggtgcaggcagacacaggggtcttattgtgggggccccgtggagcctcgaggtggctgacaggcagcctggcctggtacttcccaaataggaagtgtgccaggcagggccgcagcgtgggtggtctgccacactgaggggagtgggaggtctggggtgtggtccctgccgagctcagcccccgccttcttgccggcagctacgtgcgccaggggctgttgtcggccgtctcctccgtcctgctcagcctgcctgctgcgcgcctgctggaggacctgatggacgagctgctggaagcccggtcctggctggcgggtgagtgtcggcctgcggtgtgtgtgtgagatgtgtgtcggcccggggtgtgtgtgtatgtgtgtgtgtgtgtgtgagagatgtgtcggcccggggtgtgtgtgtgtgtgtgtgtgatgtgtgttggcccggggtgtgtgtgtgtgtgtgtgtgtgtgtgtgtgtgtgtgtgtgtgtgatgtgtgtcggcccggggtgtgtgtgtgtgtgtgggtgtgtgtgttgcagctcctgcaggccaggctgccatgactccttgggacccacacaggcagagtgtgcaggccggaggtgcagccaccccagcactggccgtttccctcctttggtcctgatcctagaccctgttggggtccctctgtgaccccgcccacccgcctccctgggcccctccggccggtgcagtcctggcaactttttgtttgtttgttttttagacagagtcttgctctgtcgcccaggctggagtgccgtggcacaatcttggctcactgcgacct

SEQ ID NO: 81776 - DNA, 1053 bp, Homo sapiens
gcagagcccccccaaggctccccggggccccaggctgcaggaggccttggtgagggtcccagcactgcgggcagccaagagctctggcagtgtgcggtcccagacacccaagaggcctccccacaggcgggtggcacgcccaccacccggattcctacggtcttccacctccgaccacagcccttgtctgccgtccagcaaggagcaggccctgctggtgttcccgggttccccggttgtgcgccccaccccaggcccctttcccatggctgcctgtcccgcggctcagggcagccctccatgtacagtgctgcctgcacagagcctgtggcatgcaggccccaaggccgtggggagagtccggggtcactgcagacccgagccccctttcttccatggagtcaggcctggcggggctggttcaggcagactgaagacaggaggagggagaatacgccctccacgctgcctcagctttgcttgtcactctcgtctggcagacgtggctgagaaagacccggacgaggactgcaggacgctggcactgagggccctgctgcttctgcagagactcaagaacaggctcctcccacccgcgtctccctagtccctggaggcctccccaggaccaccctcgccgacagcaaggcaggcggctgagcagcggcctggagcagcagagccaggctttgtagcgaggccaggtcttcggccgcatccggtacggagagtgcagatgcaggaaggcccggcctgccgctatttatagtgcagccagtccgctaaaaatacactgggcctgggcactgcccgccgggacatggcagcctggacgtggggctggggctgtgggcgctgctggcggggttgactcttccagtgagggcagaaccaggctggcaggaggggaggacggtgtacctgctgctcagagcccccaaggctctcctctgagagccaccaagcaggacagagcagctcttgtcccaggtccctcgggctgagcgccgtgtcaccaggagaatagtgctcacagcccaggcagggtgtgtg

SEQ ID NO: 81777 - DNA, 1163 bp, Homo sapiens
gagcagatagcagactgctgcatgcgccagggcagctaccacctggccaccaagaagtacacgcaggccggcaacaagctgaaggtgagcctctcccggccccagcccgcggctacctcacaggcagttaggctgcgggccccctgcacgcatctccatttgccttcgtgatgaccccaagctagggctgagcctttctggccaggaagagcacaaccactaagatctctctctaccgggcagccctgagccactcttcttgtgagagctcctgctcggggtcccttgtgcttgtcccggcccagcccctgcttgcctgagccccgctgtctctctgcctaggccatgagggcgctgctcaaatccggagacacggagaaaatcacgttcttcgcgagcgtgtccaggcagaaggaaatctacatcatggctgctaactacctgcagtccctggactggcggaaggagccggagatcatgaagaacatcatcggcttctacaccaaggggcgggccctggacctcctggctggcttttatgacgcttgtgcccaggtgcaggccctccctggcatgccagcggggccccggggagggctgtggagcccggcaggtcttgacgggtttcatctgtacaggtggagattgatgaataccagaactacgacaaagcccacggggcgctgaccgaggcctacaagtgcctggccaaggccaaggccaagagccccctggaccaggagaccaggctggcgcagctgcagagcaggatggcactggtgaagaggttcatccaggcccgcaggtgtgcccccggggccagcggggacaggccagggcagatgtgactacagggccggggctgaccacgagaaaccccagccagcaaaagggcaggacagcagatgggagctcacttgggacagcactactgctgaagacacaccccacctcctcctgggagccctcagagcccgggcacagccttgggaaggtgttctggaaacaccagagacgctgagagagaaacctggtgggggagtgggaggaggaggcagatgtggagcaggagagggtgtgtctggggagccacagacctgctgagggtgtgcaggggccgggcaggggagtcctgagtgagtgccgctgtgtgacctggggtt

SEQ ID NO: 81778 - DNA, 1095 bp, Homo sapiens
aaaacccatcaccgcagagatcgctgagcagtgtgtcaaagtgaaggggcgggttcgcacccggccacattccagaatctcagcggacctggggaagccagtgggagccgcttcagggccctgcctccctccctgcaggagaacggcctggacgaccagctcatgaacttggccctgctgagctcccccgaggacatgatcgaggcggcccgatactacgaggagaagggcgtgcagatggacagggcggtcatgctgtaccacaaggtgagggctggccaccggtggggacctgggggaggggcagcaagccagggggcccttgcctgtgcgaggcctccgtgctcgggcccccaggcctcgggcagctgctcagagcccaccgtatccgcaggctggccacttctccaaggccctggagctggcctttgccacccagcagtttgtggccctacagctcatagcagaggacctggatgagacgtcagaccctgcgctcctggcccgctgctccgacttcttcatcgagcacagtcagtacgagagggcggtagagctgctgctggctgccaggaaggtacggggccagcggggcctgggctcggctccacgcaggcaccacggctcaggtctcctgtccccagaggctgtgggaatggctgcttgcttggttatgagttctccaggaaggctgcggtgggtgccccctgccctaggtttcacatacggcacacccaggaggtccgcaagtgtagactcgccatccttcacgctggcatctgatcatacacagggaatggtgcactcacctatggtggggggtaaaaacacacagaacacaaaatttaccatcttagcctttttttttttttttttgagacagggtctcgctctgttgcccaggctggactgtggtggtgccatcttggttcactgcagcctcaacttcccaggctcaagcaatcctccttcctcctgagtagccgggaatacaggagtgtgccaccatccccagctaattttttaaattttttttcatagactcagggtcttgctgtgttgcccaggctggtcttgaactcctgggctcaagca

SEQ ID NO: 81779 - DNA, 1013 bp, Homo sapiens
ttttgttttttttcgttttttgtttttgagatggagtctcactctgtcgcccaggctggagtgcagtggcatgatctcggttcactgcaacctccgcctcctggcttcaaccctcaaataatctgcctgcctcaccctcccaaagtgctgggattacaggtgtgagccaccacgcctggcctagaacagcatttttaataagctacttgaacaagaggaaggggacgaagcactcatattcgtccttgttcgtaagagtacctgaggtggaagaactcaccctgtgttttgcgtttgccccacctcatggtgcacacgcgccacccagggtgagaagcagcctaagagctgtgcagcactcatccggtgaacagaggtttcagggtgggcggagaattgggaactgggcctctggcgggcactgaggtccctcttcctccctgcagagaggccaaagcacactgtagctgcaggagcctggcggagctggtccctggggtggggggcatcgcttctctgcggtgcagcagcagcgggagcaccatcagcatcctccccagcaaggtgaggccacccctcgtccactcgcccactccgcctcctcacctctgtcctcccaggccaggcctcctgcctgctcgtgcctctctcctcctgtgcaagtcttcctgtcctgtgttctgttcagccccactctccttcccctcgtctccccgggtctctccctcccaccttctccgggaacctccccagcatggtcctcacccagcctctgttcctccccgacctgccatcttctgtcccctgcctttctccaagtcctccttcatcgaaacagtcgattccttgttggagagttgctcgcttcctcttcatccctgccttcttcatcccactcagttttctttggcacgcgaggaggcacaggactgttggagagccctcaggcgtcccactcagagaggcagggtgatgttggtgtgcagagggccagcggcagccacatggaaggg

SEQ ID NO: 81780 - DNA, 1047 bp, Homo sapiens
ctgggaggctgaggcaggagaatcgcttgaacccaggaggtggaggttgctgtgagctgagatcgtgccactgcactccagcctggacgacagagtgagaccatgtctcaaaaaaaagaacataataataaaaaatatatacacctgccatgtacccttataaattaaaaaaaatgtcagttaaacaataaatttaaaaagtaaataaaggaaagagagggatactttctttgccattccccaaacctaaaaaaaaaagaaaaaaaaaaacagaaaagaatcataataaaacccatggatatcttatataacacggaaaacagcctcagcctgtccacagaggacccagtgatctcatagtcgtaggatgatggagcagcagtgttcagaagtgtttagaggaggctttcgaggtgtgcagtggggtgtacagttgcacctcacttttcccgccctttgcctcgaatgtccgtggttcttttcaggatgctgtcgcagtctggaacggaaggcaggtggcgatcttcgagctttctggagccgcgatacggagtgcaggtgggttcttttcacccggacagaggcactcccactacctggctttatttcctccctgcctaatgagagggccactgtggtgcagttgagggctggcacaggggctggggagacccttgtgctactgcctgcgcttccagagccagggctgcagctgtggccccgtgctgccagtgcatcctggggcctgctgtgtgggcgtaaacaaccaccgtgcttttgtggggttccttccagggaggaggtggctgcctcccatcttctgaaatgtttccagaccatgcacagcagtgagacctgtggtgtcttgacccaaggccagcctctgtctgaaacttcaaggtggctcctcagacatgctccgttaatctcaaacacccttctaggtccccaagatctctccagctctctgcggttagttttgccattgttgcccaggctggagtgcagtggtgcaatctcacctcactgcaccctccgcctcccggg

SEQ ID NO: 81781 - DNA, 1066 bp, Homo sapiens
ccgagtttgttttgcttgggtcccgggtggcctgcgggcggacaggtccctgggcagcggggttctcagcccgagacgaggtctttgggggtttaggtttcttgagtggaaagaggtgggttgagggggaagagtgggaagtcttgccacgaaatcccttaagttggggtgtttgtcgtgggtggttttgttctttggcagagttttttttaaaactagcatgaactcgagattccctagaccaattccgacaggagaaaacggccacggatccttgtgtgatctgcacctcagggtgggggcatcattgcgactttgaagccatttcccgatctctcggaaagagaggtcctcgcccgcgtccctgtatttcgtggttggtgttggtgcctcgatcgtgtgttcctttgaagtggaaatgcccccgttctcaacagttgagttgaacgcagggtcagtatctgctgaggaatctaatcttcagcgtttttgcttcctcacacgtgcccgtcccggactgtttctgggctgcagctcttgctgtgtacctgattgtctgagtttatttttgagtggctctgctttctgggctgcagcatttttagtcactgcactttgttgttgacattttacagggcggtgggtagcaaagttgatgcaataattttattaattgttgccaagagttttaacaccattgtcttctaccgcttcttgcacctggacccggacataactgggctgtcactttcccgggtggttccaacctgttccatgcaacaggctcctttgttgcaaaagcatttttaactagtaaatccccgcagcagctcacatttcccaccctgggaagaagattcccagagacccggagctgattattctttatgtgtgttttaaaataagcaggcgggccggcggcattgggccaccatggagttccccgtgcgggcaggcgagcccgcgcttctcccgtcccggggtggatccggcctcctctgtcctcctccagggccagctctgggggccggcgcgtggggcaggtgcgcggggcccgggagccccg

SEQ ID NO: 81782 - DNA, 1187 bp, Homo sapiens
gccccccaaagtgctgggattacaggcatgagccaccgctcctggccacaagcaaatatatctttaagcaaataataagctaagctgtgatggtggcttttaggagaggagtaggaagtgggtctcctttgcatcacagaacttctcggccactgtctgccttggagcttcccgggaaggaaggctgcctgtccgctgctctctgctttcaggttcctcagtgctttgggaggcacttcactgtgcccaggacatcctctgacaccagtctttggagagacctctgctcagtcgttgcttccattacccgtcagaaaagaaggccaggtggtggcagttgccccgcaacagtctttagctcaccttccagaaagatgctcagaggagaatcctcttacattctggagaaatctgcatctggagtggtgagcatctgtcagggaggaaacgatcaatacttcatgtttcaatttttcacttggaaatgatgtaacttctattatgcctaaggaatacttagctcaatcactggcagttcctttggttgattacttactgccctggccagtttcaatctcagtgggcctgagactcttacagtgaatttggaagaaaggacttgtggagaaaaggaaagtctgcttgtttggcttttctgcatgcaagtgtgttttctttctctgaagaagacactcttattgacttcaatgaaaaatgcttttttttctagttcagtttcaaatttaaatcttcttgcattgataaagcgatggtagctgggatttagtgcctgtttgccaggcatcttgcatgtctgtaattttgcttttaaatgagtgcagaacctgaagtagattgtttaagtcacatgctcaacctaaactcaaggtaagctgcagaccagaaatcccaaaacagacattcctgcagctctaatacaccacccacgtgaccctgggacgcactggagatttcggcttagagccgcagaaaccatctgaaagacataagtcaggagacagagtcctgatacctttccctatttggccagttcatgatccagctagccctgggcaaactagtccatcttttggataaaataaacacctgcctcagaatcgcttgaacccgggaggcggaggttgcagtgagccaagattgcgccattgcactccagcctgggcaac

SEQ ID NO: 81783 - DNA, 1034 bp, Homo sapiens
gtcatcgtattctaccaggtgtctctggtcccactttctatttcatttcgcttgagctgtactcagtgagccgaggtcaagcagtgaagccacttctgcatctgaaattttaggggtgaaccagaggccaccttcagtttctgctctgaagtttgtgattgttttttaaaaagcattccaagtttaggccgggcgcagtggcccatgcctgtaaccctagcactttgagaggctgaggcgggaggattatctgagttcaggagctcgtgaccagcctgagcaacatggtgaaaccccgtctctactaaagtacaaaaaaattagccattgtggtggtgtgcacccataatcccagctactcgagaggctgggtgccggaattgactgcctgggaggcagagcttgcagtaagccaggattgcaccactgcactccagcctgggtgacagagcaagactccttacacaacagcaaccaaaaaagcactccaagtctagaataatgggcaccaaatattagaaaaggttacttggggcgatttgctttcttgtctgttttttggggttttctgtctgttttgttttgtagagacaaggtctccctgtgtggcccaggctggtcttgaactcatggactcaagcagtcttcctacctcagccacccaagtagctgggactgcaggtgtgtgccaccacgcccggcagtctactttttttttttttttttttcttttttgagacagtctctcactctgtcacccaggctggagtgcagtggctagatctcagctcactgcaacctctgcctcccggtttcaagtgattcttctgtctcagtatctggagtagctgggactactggtgcacgccaccacatggggctaattttgtatatttagtagagacagggtttcaccacattggccagactgatctcgaattcctgacctcaagagatccgcctgcctcggcctcccaaagtagctgtgattacaggcgcccaccaccacgcccggttaatttttgtatttttag

SEQ ID NO: 81784 - DNA, 1951 bp, Homo sapiens
ggtcctgcagttccataaaaagagaaccctggttatcacagggatatgctgacagttcccgctccctctgcgaggaggaactgaaatgggtgggaggaatgtgttaggccatgaaaagtttttatctgtggtcttttgactcctgccacatctctgcctccggtctcggaggagcctggccagggttctcggtccacagctggggaatgaagcctcctcggggtcgtcttgggcttttccctccttggtctcagaggacttggcatgagattgggaactgatgctataataggatttgcaaggttatcaggtcattctcagaacactacgtttttttggtggacattgattgagggtaaggaattttaagactaaagattcttaggcgttggacagttcatattctgaagcactgattttatctaaaagaaggtggtgttttacacgtttgtttccttgagtttgaatctcaacctacttatttgaaaagatgttaagaatatttaaccaaaaacctcatttacaaaagaaatacgcatgaaatgtgatgtgaggcttcattttgcagagggaagggatctctgtctccattgtggacagggcgtcttaggctgcagcgtcattgtgctgttacatggttccacataaaatcttgctccttttctaactgtaaaaacatttgagggtcatttggccaggtaaagatcctggcagtcctaagcagcctcgctggtgccgtgggtcctgggtgctgcctgccagcatcctcggttgaggagtgtggagtgggacctcagggcagtgggcccttccctcccaccggccctctaccctgcccagcccgccagctttctggaacagatcactgtacggtgctttctctccaaggagctgaaggtggtggatcatcgtctggaaatgtgtctggggttgcccctgctgcccctgcagggggctcgcgctcctcctcccggaacttagggtcttctggtggcgagaaggaagaaggcaaaaaggtccggcggcagtgggagtcgtggagcacagaggacaagaacaccttcttcgaggggctgtacgaggtgagtaggctgtggaggcacggccaggcagcctgggcgtccctctcggatccctgccctccgttccccgtgcttcctctttgctgttagattctagaacgcagattcctgggcgacccccgcagtggcggaggctgatgtgggctctagccttgcccactgaccttggctgttttatctcctcattgagattttagaagctagtactggtgaggtgtctgtgaggaggtgtttttgtgtgtttccttcatttccttttggatattctcaccccttgtctctcaaagatgttcttgactgaaggccctcttgtttcagggctttccctttgtgctgagtgggctgatttaggcgggatggcctcttgaggggaggcacaaggcggtgcttgtctcgggggtcagtgtagctgagaaacctcacgagatgttgctgctgacttgggacaaaatggaaagtcctaaaaatagagagaagccactccctgaccccaccgcccagtgaatgcccgtgctccctgctggccagtttcacctgcattattgttttctaaatccttgtaattattgtgagcatactttttaattaacattgcttgcatttttcacggtgtttcatagctcttttgctctgtatttttttttaacgcctgtaaatattctccttgcctgtgtgctcactgtgtgcttttgtaaaaacatcatattggagcacagccatggccagggtcgatgtactgtctgcggctgatgccactgcagtggcatagttgaagagctgcaccagacagggtggcccttgaggccctggccagccactgctctgcttggccattcctgtgtggtcaaggatgactgagatccttccag

SEQ ID NO: 81785 - DNA, 1042 bp, Homo sapiens
ctactactgttgttttggggcagatggaataaaaaatggtgagtggaaacgtccatttgtttccagagcacttcattggaggagattattttagaattgacttgagccgggtacagtggctcacgcctgtaatcccagcactttgggaggccgcggctggcgaatcatttgaggttaggagttccagcctggccaacatggagaaaccccgtctctactaaaaatacaaaaaattagccaggggtggtggtgggcgcctgtagtcccagctacttgggaggctgcggcaggaggatcacttgagcccaggaggtggagcttgcagtgagccgagattgcaccgctgcactccaggctgggcaacacaatgagactctgtctcaaaaaaaaaaaaaaagaattgactccatgcttaatgactgcttttgaccaatgtttcccctggttccttctgctgccgccctactctgacatcattaatgttcataaaactgctgtggcacttagatctgtgtatttcagctgggttaaggtggtttaagaattttgtctcaggccgggcgcggtggctcacgcctgtaatcccaacactttgggaggccgaggcgggcggatcacgaggtcaggagatcgagaccatcctggctaacgtggtgaaaccctgtctccactaaaaatacaaaaaaattagctgggcgtggtggcaggcgcctgtagtcccagctacttgggatgctgaggtaggagaatggtgtgaacccggcaggcggagcttgcagtgagctgagatcatgccactgcagtccagcctgggcaatagagcaagactccatctaaaaaaaaaaaaaagaagtttgtctcagtacaacatgttgttctctggggactcatcctctctaaattatccctcaagacagaaaatctgtacagacagaaagggggtgagggcatggaagttttttttctaccgtcttgactctttggtcaggctttccaaggctcagctctgtcctttggtatcctgtgtttgattcccagcact

SEQ ID NO: 81786 - DNA, 1075 bp, Homo sapiens
acacagaggtaacctagaggtggactgagaggtcacggagaggtggactgaggtcacacagaggtcacctagaggtggattgaggtcacacagaggtcatagagaggtggactgaggtcacacaggtcacagagaggtggactgagaggtcacacagaggtcacagaaaggtggattgaggtcacacagaggtcacagaaaggtggactgaggtcacacaggtcatctagagatggattgaggtcacatggaggtcacggggaggtgaactgaggtcacagagaggtcacgtagaagtggattgaggtcacacagaggtcatggggaggtggactgaggtcacaggtcatgtagagctggatttaggtcacacagaggtcacagggaggtggactgagaggtcacggagaggtagactgagaggtcatggggaggaggactgagagcttctgctctgagggcccaaagtgggaggactgcacagagctggggcagtggagagaggggtggccatctgaggggaccccaggatagtggcttttccagggatgggacatcagcttgtgccaggccagtcaccaaggcaggagggcacagcacattttctgtaaacagcaggtgtcccttggagtgtgaggtgtggtcaggaaagtagcaggatgtgcagagtcaccacttcttgtttgtcactgtgtcctcccactgtcctacgcgggctcgagaggctggggtggatgcttggccaggccccacctggcctggctcagcgcctctccgtgtgctggcccttccgtccttctgttcactcacaggcctcagcgttccttcaaaactcttttcccagggccaccactgtacgttacaaagggcggaacctgcggatcaaagcgcccatgtgccgggccctgaagaagctgtgcgatccagatggtaagtgaatggggcgctcccgggaccagaggcggtgcccatggtgtcccattcaatgatgggcaggctgagctaccgggttgctgccacagttgctttgtgtctgaccctgcttaatcccagggctgcacatggaccactcttg

SEQ ID NO: 81787 - DNA, 1065 bp, Homo sapiens
atggtttccttcctgttctgcgaacctcacttcctcctgtctgtcgtctccgtaggatgatcgtggagctacatcgaaaggtctccagcctcatcgaattcttgaagcagaagtgggcgctccatgaggtgcgagttgtatccttttccagctaaagcaaaccatccaggctgcgctgcctctgctgcccagagatggaccacgcctccctgtgcctgtcatcgtcatggtccccgtgggcagaacagccatgctgtgacatggtgtacatctggaaccataacctggagccccttattccctgggtgtggagccccctctgtggccttgcagtgctagaactcagtcacagccagccctccacgatgtcagtggcctgtgtctggcccacggggtgtggccaaagcattcctaccagcaggttgagcaaaacgaccaagggtcagcccagccttcttcacatccatggctggctcccggccctgcctgctccccacataggcgtggtgcgtgtcaggtgtgaatttcctgaaggtactaagtgcccgggtcagcattgttgggtagtggtgtgaggaaagccacgggtggtggcatgatttataccctgggggatgccagtggggagcgtggctcgtgtctgtacccatgtgcctggtcagcatcccgacctcagtgctagccagtgtgggccttccttgacgggcactcagcggaagacactcgaggagcggcagctgcaggactcatgctccgcaccgatgcaggagaaggtgacactgcacttgttcccaggcgagaactgtacactgacaccgctgccgggcgtggctcgcgtggtgcactccaaggccttctgcacagtgcactggcaggagggcggccggtgcaagcagagtgccaaggacgcccacgtgctgcccccagcccagatcctgggcatccagagtgggcagggcacggcccggggccaggtgaaatgcccgcggagcggagctgagggcaagggtgtggggcggccccctcctgcggctgacgccttgcagagctccggagagagttccc

SEQ ID NO: 81788 - DNA, 1044 bp, Homo sapiens
cggctaattttttgtatttttagtagagacagcgtttcaccgtgttagccaggatggtctcgatctcctgacctcatgatccgctcgtctcggcctcccaaagtgctgggattacaggcgtgagccaccgcacctggccgaccagtaacttttaaaactggcaagctgccaagcgactctggggacactgaggttgggcgtctctggccctggcctttgccgtcatgacactgtgctttctgagctcgatgattttcttgtgcctcctactccagggcacgcaagagccatttctcatgtgctgagtttggacattgtttggcccatttctgtcctaggctctggaagcaaacaccatctctacagcctcagtaaggcccgcccaggaggagcagtcgatgacgcccccagggaaggtggtgaccgtcagctctcgcagcccccgctgccctcggaaccaggcctccctccgcagcagcaagaccttcccgcccagctctgcaccctgctcctcaggtgaggctgtggcagccacactccttgtgcctgggctgccctgatggcacctcaggcttcaggggccgtgccgaagctgagagcacaggtgtgcctgaggccggaccccactggccagctcgccactatccagatgacagggtgaaggtgcagaatcactgcctcctcatggggagggtgatgccagggcttgtcgtgaaggactttggggtcccagggcgtagaagctggtgagaagccagcctttgccagtctggtgactttggggtctgcttcatggggccagcaaaagccttgctaatgtgctgagttggtggttcaaagtccctgagaaggttgttttttttctgtttttctttacatgtaaaacctcagaatagagaatccttcagttaggggaggtgccagtaggttaacacaagtcccggaaagaatgatggagcaatctccaagtccacagtctaccccagctgcgtataggaaataatttaaattcagggatcataaattgtgttcctggtacataaa

SEQ ID NO: 81789 - DNA, 1032 bp, Homo sapiens
ttcctgtctcctcttcctgcaggttgtggattcccagctggtgtgcatgatgaacgaaaacagcattgattacatttctcggttcaatgacctggcccaagagctgtccatcgctgagcctggccgccgagaagctctgtttgatggtggtggaggcggccccgctgtcagtgacctgtcccagtgaccacacgtcctggtggcggatgaagccctcttcgagctagagaaaaatagataagcccagcagccccagaagatggtctgaacagaggcatctccgcacccaagactgtgcaacgggcaggaacgtggtcacagagctgcttccccacgagcagcaggcaacggcgtccaaggagactaggatgagttcttggcaagggccagcgttagaaatcactgtggtactagagccgttcttcaccacgcctgggcccatgttagggtctgcataatgatcccatttcagcctgtgctctgcctcgattgttgtgttggacattccggtggcatttccttctgagacaagggagtatgtgtgccttggtgtagttgctgtgcactaggagctgtgatctccctctctgcagggaggccccagcccctgctgcttgctttctgccaaacctgtgctatgcatcagctgtgccctctgtggactgtaacgggcaggacagttgggtgtggcctgggctcatgcctggtggtgtcacatcccaaggcagcaagagcatggataccgatcacagggctgctgcggagtcgtggggccctgggctggtgcctcccctccctagaggttttgttcgtactcttaacagggagtgggggcaggaagagtcctgtactatgcaggttgtgtggactttacatgggaccctgctaagctggttgaaaatgtttttcttgtgttttaagaattaggagacatggaagaggaagaacaaagtcccctctgtagttggtttccttcctgtgtccctttgcaagcttccaggcgatctaaggtgtcatttctccctcctgggg

SEQ ID NO: 81790 - DNA, 1943 bp, Homo sapiens
ggtggtctccctccttgcgccctcttgggtggccagcgttcctactgcagacggcccaacatccagtctttccccaggacagagctaacaagggcccctttgccttctcatcctcaggagttccaggcacatgagtcaccgtccatccacatccagtgtggcctggagctgctacagaggtgttgggcaggccatgcctgtgccgccatctctcccttcctgcctcatttcatcccccgcagcagccgggattgattgtgctttcctaacccccttggacctactctccctcctccccaccattcctcttcccccacatgtgtggcacgctgcagccctcaaggccagccctggcccctccactgcttctctccccatccacaatggagaaggtgaaaagaggagggaaaggcctttggtgtggacaagcatgtggacgccctccgtcctgcagtcttgccagcccaccacagccactgtagaccacaggcaggccgtgtactgcaccactgggaggacgtggagaggacagtgaacttccaggcaagagcttccttcttttgtctcacgagtttttcttagagctcttgcctgagctggcttccctccttcagacattgacatgagatcttaagcaaacagtcccaaacctcttaggggtgaaaaaagaaacatgccacttgattaggagagagacagcagtgtttgaactacagcatctttacactagcttgtgttttgtgctacgtataccagcttccaaaattagcatctcattgagccagagaagacaaggagatctccctctgggcatctggctttgctgcgtctctagagggttaggataccaggccgagttcaggccactgctagctttctcatactcccacaggctagaccagagatgccaagtcccaacagcactgagctgtgtgcactgtgccagggacaggagggtttgtgaactgcctgtcagggtacctgttagcccctgacaactcagtggggtgaagttttggaggtcagagtctgctttcgtaggctctttagacagcacctaccacttggttctccagcgtagactcctgggagcagccaactgcagccattgccatccagtggggagatgggttagggaggaggacgggctgactcctctcctgtaataaagctgacaagagttctagaggattctgcttctctagtaactagacaggtgatacgcatttgcttgccacattaagggaaaatggtgtcatttgttgcagaaaaacaatggatacattttcttctggcctaaatgaatatttatgtgcaaacataggcaactgttaaaggctggaattttcaaaagatccaaacagagacttcctgcatcttctgcctttccaacagaagcggtgatcgtctaagtatgagcctgtggcttcctttgtgcatttgagcatgctgtaattaagatgagatcagtttcttagaaaaagctttcctgaatccctctgacgttgcctgggatctttctgttgattcgtcttttctggagattgggacagagcatctgtggtccagggaagttagtcctctggcctcaattctgttgtggatgtgcagtgataagcgggcattgcgtgcctcgggggatgcctagttcgtggcttcctggctgttttgtccttctgtgtcttgtagctgtagggtgccagctcagggagtggggtgttggcggcgtttccgcggttggcctccttgctttgccgcacctccaggttctgggcatgagaggccgtggcctcatttctggtggataacctttttagtttaatagcatctttaattagatcacagcattgaattcaaaatttcttctgcaaagaaagttgtggggcataagacaccgggaatgagggaggaggaagacagttgtgttttctctttaaaccttg

SEQ ID NO: 81791 - DNA, 1080 bp, Homo sapiens
tcaggatggcaggtttcccttgaatagggcatgttattaaattcagaactcttatctgtgtgacttaaacatttagctgtttatttttaatctactgaagaacttttcatgggttttgtgagcagacacttcaacaggaaagcatgaaatgttcagggttaaagaaattctagagggaaaatctgcagtttgatgccatctcacctctagaggccagcctagatcagctcagttctagacataagggctgcaggcaggcccctgatccagccatggttttcaggggtttcatggatcttcaggggtttcagtctgagcatcctgccctgttggcctggagctcagggctggcactcggggttcctatgagaggaggtctccaaagcactgcgggggtggggtggggtggggtccggtggacgtctggttgctcagtgttctgtgatcgtttctgcagggggtaaaggaagtggtatctttgacgaatcaacccccgtgcagactcgacagcacctgaacccacctggagggaagaccagcgacatttttgggtctccggtcactgccacttcacgcttggcacacccaaacaaacccaaggtatggactgcattcagacgtgacagcgcagcagcgggtatgccaggtgctctttccaaaaaggctccaaggcagatgcgacatgtttttagggagaatcatggtgggtgccgtagattatcctggatgcaagcattagtcatcgagtttggaagttcccctgagtcacccaggaaacagtccagccttgtgctgactgaagccgtgggggaagctcttctgtgctggtggcggacgcccactgcagacgggctgtggcggctcctcactgcagtgctgcggggcgcggagaagcggtggggagcggaacgtgccgcagacgagctgggcccttgtccgtcttccactcttcctgtttcaccttgcagaggaaaagtgacagttcttttctgatgggcttttccccgcacagtcaaggtcctcggctggttacctgtggagattgtcagcacttgactgaagcgtagctgacgcctctga

SEQ ID NO: 81792 - DNA, 1069 bp, Homo sapiens
gtgatctccagaatggaagcggttctgctaagaggtcaatatactgttagtgtttctgcttacgcctcctccatcccacagcagcagtggacaggctgttttggtttctttcagtcattcctagacatccaatcagctggcgggctgttgatccaaggaccatgccctgccccacctccccaccctcaccccccttccagttcctctcaaacctggactacacatgagtgatggccaggggtgccccatttcatccccacagaggcatctcccagccatctggaaggcacgggtctccaagcagctgtcatgacggccaggagacgctgagcagccaggctcacataagactaaccctcttcccaccccgctcatttgggcaaaaggaaatgaaaacatggctaccctatctcttgagtttctggtctggctccgggtggagcagtggcttctcttagtagaaggagatgctggatttgcctcccggtgggttcaggaccttgttgtgagagcgaggccgcggccccagccggggctcatggctgtcgactgtgggcatgggctcctgctccttggcggggcctgcttttctggcgctgcctttctcacctggctctgctccagccgggatgctccttgcagctgtgggacacaaagttagaacaacatcccattagaggcaacccatgaccctgacaggcaggctgtggaaataaaaagtgtgtcatagagcaacctgcaagaaattcatgctgtaactgggaaagagaagacaatatagacaggcttttcatctggtaccaaaacaactcactgtaattagcagatgcagttttgaaatgggcataaagttggggcttgctactgtaaatactccttgatttcttcctaagtgaattgtttctttatattgcttgttagacaccactcccatttcttccatctcaagtatagaaagcaagcccctgagagtgaccatgaggcggcgagggaatgcatcctaggtgagggcttagcaaggcaaaggcaggctctgttgctgttaccctgggcttttcaaaggtgaatg

SEQ ID NO: 81793 - DNA, 1042 bp, Homo sapiens
gactctggtctgtttctgacacctttccagaaaaaagtcaattgttcaggtacaccaaagaggaagaagagctgtggaggccaccctctacaaagctttatagaacttctggatctaactcacaaacaagcttccagaagagactagagaccttaggccaggagatgaaggagttcagtagcaaagtcacacctgtccaattccctgagctttgctcactcagctaatgggatggcaaaggtggtggtgctttcatcttcaggcagaagcctctgcccatccccctcaagggctgcaggcccagttctcatgctgcccttgggtgggcatctgttaacagaggagaacgtctgggtggcggcagcagctttgctctgagtgcctacaaagctaatgcttggtgctagaaacatcatcattattaaacttcagaaaagcagcagccatgttcagtcaggctcatgctgcctcactgcttaagtgcctgcaggagccgcctgccaagctccccttcctacacctggcacactggggtctgcacaaggctttgtcaaccaaagacagcttcccccttttgattgcctgtagactttggagccaagaaacactctgtgtgactctacacacacttcaggtggtttgtgcttcaaagtcattgatgcaacttgaaaggaaacagtttaatggtggaaatgaactaccatttataacttctgtttttttattgagaaaatgattcacgaattccaaatcagattgccaggaagaaataggacgtgacggtactgggccctgtgattctcccagcccttgcagtccgctaggtgagaggaaaagctctttacttccgcccctggcagggacttctgggttatgggagaaaccagagatgggaatgaggaaaatatgaactacagcagaagcccctgggcagctgtgatggagcccctgacattactcttcttgcatctgtcctgccttctttccctctgcgaggcagtggggtgggattcagagtgcttagtctgctcactgggagaag

SEQ ID NO: 81794 - DNA, 1062 bp, Homo sapiens
taggctggtctcaaactcctgagctcaagtgatcctcccaccctggcctcccaaagacccaaagactacagacctgagccaccatgcccacctgttttcttgacaggacttgcatatgacaagctctctgcttctcctcacctatgcattgcaagccaggtcagaggcaggttaaacaccttaaggacatgttaggacaagtggcatacaagggaaaaaaacccgttcatttaagttacagaaacagaaaaaaaaaaactggcttattcccacacttactctactcaaagctttgagaagactaattttggcatcctctggctaaatacaaaacaacaaaacaaaacaaggcaaactctttcagcaagagctgtgggggaagggactataagggacacacacaactgacaggcaaaagctctgagcacgtgattgctaagtttaattcaactgttacaccccattctgccttgtaaaaataacaaaacgctcctatcaaaatgacattgtgatgtgagtacaggctttttgttttggtacagctctaaaaaatgttggcaccgaatgcacttaagaaaagtgttaaggcttaatacaaatacagagacgagtcatttctcaatgcagcttagagggtgagaacaggatgctaggtttttaaatcttccaaatacaggcagtccccaacgtacagacatacaggacacctcccaaatgtaaacgacagccacacagcagggcttgcatgcgcaggaactcttcttctcccagtgagcagactaagcactctgaatcccaccccactgcctcgcagagggaaagaaggcaggacagatgcaagaagagtaatgtcaggggctccatcacagctgcccaggggcttctgctgtagttcatattttcctcattcccatctctggtttctcccataacccagaagtccctgccaggggcggaagtaaagagcttttcctctcacctagcggactgcaagggctgggagaatcacagggcccagtaccgtcacgtcctatttcttcctggcaatctgatttggaattc

SEQ ID NO: 81795 - DNA, 1020 bp, Homo sapiens
tcatcagggcggccgggattgaggcgcaggcgctgagccttcacctaagtccgccgaagtgtgcagagcctggagacgggatcgaggtcaccggaagcccacggttgcggggacatgatcaagctacagcgcgctgggggaagcgaccactgccgccccgcggatcccaccggcctggccgggagctccctctgcccggctcacccgcgcttccggcccgaagcccggcttcctctgacgtcacggcccctgcgccccctggcggcgcggctgcggcgggacgcgcgggcaccgccccctccggctggagggcgggacttccggtgagtgagtgacgggcgcagcctcggcagcggcggcggcggagccctgaggcgacagcagctgcgggaggcgacgggctgcggcctgcggaacctgaggcagctggggagggccgggcgcgccggccggatagcgagccgcgctggcggcggcggtggccgcgatgatggagatccagatggacgagggcggcggcgtggtggtgtaccaggacgactactgctccggctcggtgatgtcggagcgggtgtcgggcctggcgggctccatctaccgcgagttcgagcgcctcatccactgctacgacgaggaggtggtcaaggagctcatgccgctggtggtgaacgtgctggagaacctagactcggtgctcagcgagaaccaggagcacgaggtggagctggagctgctgcgcgaggacaacgagcagctgctcacccagtacgagcgtgagaaggcgctgcgcaggcaggcggaggaggtgcgtgggccgcgggacccgcccgcatccccgtcccggacccccagccagccccgggccccggacccaacacccgtcccgaccccagaccccgctccggcaccccggaccgcgggacccctggacccccagaccccgccccgagacccgcctggaccccatatcccccgccccgggacttccccaccccctctgcccgccgtgagacacctccc

SEQ ID NO: 81796 - DNA, 1443 bp, Homo sapiens
cgtgtttataaaaatcataacagtatgttgtatcattcctcctttcctgtggtttctattgcgtttgggcttcgtgtctgtcgcgaggtggttatgcattgattggaatgccccggttccagcaaagctgagttaaagctctcaacctaagggaacgcaaaggttcatggattttggagctcagggtgactataggcattttactgggaaggaaacttgtcctgagaagtggaggggctgaaccaaggtcacccaccccagaagtgcccagccaggatgcagagtgaacccgacaccggcctgggcacttgcttccatgtcaggcagctgcaggcaccggagggctgctccccagaagcctggagtgccagggctgccctcgctcagctgtggagctgtggctgccccctgtgctgggcaccgccctccactgctctcccacactcagtggcctgacctggatttcaggtgggtttctttttttcaccttgtacctgtgtggtcagtatagtggacgagaaggaactgaaaggagaaaatcaagatggacaacgttaaggctaggaattataaccttgccgcttaaaaatgagctgtgcacaggataggcgctgcccagctctgtgcggttcacatgcaagctgctgtgagtgcatctgccctcccccagggctcctgctgaaccaagctggcgggtgtgcgtgtggtttgcaaagctatcacctttagtctgagacccaccattgccccagcgctttagagaagctgcaccgagagcttcgggagccgagccccgaagccagccaatgcttggccagcatggaggctatgattaaacgctaacggggcgcccttggaaagacctcagggctttacaactaaggaagagggctcgatgctgtcaacatttggcatgcctactcctctactgaatcaagcagaccttcatttccaactttgtagaccattgtgccctgtgggtcggcgtcttttctaggcagggacttgtgatcacatagacgtgtgtctgataagaggggagcgggacgtcacacgctgcaggcgtgtcttgttgcagaggagctcctgggtgagctgtcagcagaagctccgtccccagccactctgctcaagaaggcttagtcagagatgggtaacctgagccactgcagcttctgagcagacagaatccgcagggttttataaaaacctgagcagagcagacatccctgttcccatcttcttgccggtcattaccacagtgactcccaatgtgctctgataacaggcagctgagtgtatgagagtgacaggagctagagagggtggggtctcccgagagactgacccaagccgtggagtctgcagaccccagcctgagtgtcagcccggccctcaggagccacacaccctgggtccatcctcttcccctcgctgggctgc

SEQ ID NO: 81797 - DNA, 1034 bp, Homo sapiens
taggcatgactcatggaactgaggaactggatttttagttgtatttacttgtttcggagatgaggtctcgccacgttgcccaggctggtctcaaacttctggaccgaagcaatcctcccatctcagcctcccgaatagctgggactacaggctcgtgccaccatgcccggctgtgttttattttaattaatgtaaacatgtggccagggcttccatactggacagtgtggctgtgggcagtctagctgagctgcctggaagcaagggcagatggtgagttactcagcttcatgcaagaaaggaagatgcttaaagggtgggtttgtttcctgtttaatgaacattttccagaaagaggggagatcccgtagcagtgggtttcagatacaggagaccagacaggagaaaatattgtgagatgggaaagtggatgccagcaacaggaaacagcagagaggggctgaagttctcgaaaggccaagaagagcctggtgggaaaccgctcgcacctcaggactgcctgtgctcagggcacaggatcgactttttcgccttgggctgctttttgttttctttctgtgggtaacaattttattgcagtatcattgacatacactgaactgtacatacttaaagagtacaatttgatgagttttgaaatacgtataaacaccagaagccatccctgcagtccaagcagcgtagacgcccggaccccagagttccctgtgtcctatgtaatccccctccgacccctccttgccccacctgtccccaggtaaccactgacctgccttcagtcactgtaggttaatttgcatcttctagagctttgcataatggcctcctgcagtgcgtacgtggtttcctctgacatcttccactcggtacagtgattcggggactcacccaggctgtgtgtgtccttcccccatggccaagcagggtcccagcagtgccgtttgtccatccgcctgcctgcaggggagctgggcggcttgtttttacgtaaccttcacgcatgagcggtttgt

SEQ ID NO: 81798 - DNA, 1054 bp, Homo sapiens
tgtgaccgtccgtgtaagcgtgtgaccgtccgtgtgagcgtgtgcacacgctgctgcccacaccctctaacacctgtctccttatcgtcacatgctgaccgtccgtgtgagcatctgtgtgaccgtccatatgagcgtgtgcgcacgctgtggcccacgccctctaacacctgtctccttgtctcgccctctgtgccatcaccacatgctgaccatccatgtggcgtgtgcgcattctgctgcccacgccttctaacgcctgtctccttgtcttgccctctgtgctgtcgctgccgtgtgctgccgtgtctgtcgctgccctgcagtcctcgtcagtcgtggaggaaaaggtaaaacccaagaggtgtgtccactgtggtgctgggggacgaccagcaggcacattagggcatcagttaccagcccagggcggctgcttggtctgctgtgaggtgtttcctgtggcagatgtgagaggtcggaagggccatctggccacattcacgagactgacactgagaaggtggcgaccactgggtcccctgcacagccatgcagctgggcagcgccgtccaggtcgcccacactctgccctcgctccacaagcactgccttggtcacagacgaaggcacggcgccgactcctgctaaggaggggtgtgcatcaggtggggctggtgctgactcggggggcgacgggccaaggaagggcccctctctgcatcagtcggacctggactcatagcccagctccctcactcaccagcctgtgtcagagccggtgacacacccatgacccccaagggcagcgtgacccccgagggtggcgtgacccctgggggtggtggtctctgaactagggagcatctgcatcccctgagggagctgcgaggacaaatcgggaggacggggtcagtcggcaaacgctcacgagcctgaggccagggcctgggggccggtggggaggagcaaaggaaagagtgaaggcagctcctgatcctgggtgatttctgtcggaggtggtggcctggctgagccgtggcccagcatggag

SEQ ID NO: 81799 - DNA, 1040 bp, Homo sapiens
gctgctcgagctgggctgctggctggcatggagcggccccatcactcgaggtctgcttgccctgggagggcttgggaaatcttcacggccaccctctaaccatcgcttcctctcctctcgccccccatttcagcaggaaggagcgccccacctccctgaacgtgttccccctggctgacggcacggtacgtgcacagatcgggggcaagctcgtgcctgcgggggaccactggcacctgagtgacctcggccagctgcagtccagctccagctaccaggttttgtagccgtgccgtggagtgagaggctcctccctgttgctggtgttccccgttcactggggcgggagcctcgtctgcaggcagcccttcacggctctctgggccactcgccctctcccttcgtgtgtggcaggatggagaaacccagccagggtgtcaggggctcaggctgcccagcaggccctgtgtggctgtggctgttccacgcggcctcgtgtcggcacctgctagtccaggctagacctccctgcccttggatagaccgctctgtagccaggggtgtacagtgcctgtcagggttgagcttagtgatcctctctcaaaccacacccccacataaagcctcatgctcacccgggctccagccagacacatcctgcccctgagagccacgcctctactctcggaggaacgtcagtgtctagagtgtggggtttgccctccgttggcagaaaggtgaggagaaagctcctcttctctgggcccctccctgcctgtccctggtaacgcctcctgggtcctgagtttgagaaagcagagcctcgccccagcaggtactcacagccagagtgcgggggccccagcaggttctcacagccagccggtgagtgcacctcagagcacaggggcccagagccaggccactccttcagggccccaggtcgcttgctgccagttttggcctgtgagctcactggcctcagtgccaggtaaggacagccaccttcctgggaagaagaggtgaccccgggtctggtg

SEQ ID NO: 81800 - DNA, 1329 bp, Homo sapiens
tgcgctgctctgggagcgagctccctcatggcatctggaacgctctcctgtcctccctgtgctcagggctggagagagggtggcggggctgcgggctccccgggccttctgggcccagccctgccacctgggcccacctcctctcactgtctctggctcacgcttcccgggcctggagctgggacctgcccataggcatctgaagacacgtcagcctcagccggggggagcccttgcttgacgctctctggcctccgggctgcctctcgcgcccgctctgggcccgctcttcttctcatgatgtctttcctttcacctcctgcgttgtctgacatcgtcgctctcttcataaattgtagcgttttatgttttcgttcataggagtgttttatttgatttttctttattttaaattattacatttaagttctttttattttatgctctaggttttgaagtttttctaatttcttaatttttttgttgttttttgttttgttttgtttttgtttttatgtactgtattttcagtgttttaaccaaacagttgtggctactcatggtgaggaatgaccgctaagagtttgggttctttcagtgcatttggaggtcactgctacacgttgatgtttaggaggttgagaggtttgcctttaggtaagttgtggccagggggagtgtcccatgggtaagtggtggccctgtagggtgacggagagctaggggaggcgcaatcagactgcagaattccccgcagccaccatgagggtcaggagcaggccggggacccagcgtggaggaaggtggcccagaagcgtttgtctgatgtgcacagctacaccctgcctggccacatggggttccctgttttctctctgccgggtggtggcagagtcggtgagacaccaggtgcctgtgacacattgggtagacaggttctttgagaacgtcagcacagacttcttgcatgagcggtactcgcttcctccagcgtggggagtgacatgaagagcaagggttttcctttcaaactgggcatagctgcagagccacaggccgtctcagacatttctacaaagccactccgggaggcgggctgcgcccgtgtgagggctctccctcggcactgctcatcttttggggctggacatgcatggcctgggccgctgggacgcggtgggtgtggagcagcatccctggcttccacccacgaaagccaggagcacccccttcatttgtgaccacaaaaatgtctctggactttgcaagcatcccctcggggcagtcagcccaactgagaatagctactatagaggaaggtgtgtcatt

SEQ ID NO: 81801 - DNA, 1011 bp, Homo sapiens
tccgagggcagccgtgagcagggcagaggctgccagaccctctcctgaccccaggtgcccctgtgctctcccctaggcatgggcagcagtgacgagtggtctgatgttcaagacattattgactccacgccagagctggacatgtgtccagagacccgcctggaccgcacaggaagcaggtactggctcagcccaggccctggggtcctgggggctcagtatttatccaagtcggtgtctttggtgaagtcttcctctgccaccactgggagaaccatcaaggctgtggcctaccgcctccatccacgaccggcctgcagggcagtgtgggcattgaatggccacggtgggaggtgttggaagagtctgcagacgcagccactccgggctgcccactgactctgctctctctcccgacctgtggatcccaacagcccaacccagggcatcgtgaacaaagctttcggcatcaacaccgactccctgtaccatgagctgtcgacggcagggtctgaggtcatcggggatgtggacgaaggggccgacctcctaggtaagcgcaagccttcccccgcaccgctgtgcctgcacaatgctggggctttctgctgttggttttgtttgtaatgaaaggaaagtcctctgtcagctgtgagctaggaacctttttttttccagctttgttgagttgcgtttcacatggaattgtccctccatctccacaggggattggtttctggactgccccaaggatgccaaaatctgaggcttctcaagtccctgctctgaagtggtgtagtgtttgcaccctcccgtgtactctaaatcacctctaggttatgttgtagatgctgtgtaagtagttgctgttatgctgtgtcgtttagggaataatgacaggaaaaaagtgtacacgtcagtacagacacggccaccacaggcctgtacattttctgtgaggctggttgaatccacacatgcagaactcgtgggtattgagggtcgactgta

SEQ ID NO: 81802 - DNA, 1060 bp, Homo sapiens
tggccacatgccaggggccgtgacctctccctgcacactgcctgcccctccctgcagcggggagctgggctgctttggctccacggtatttggttcaggatgtcccttggcagaggctgtgcccaccaacagtcagggggctgtgctgggctccacggtggcctctgcagcaaggagccgtttcaggcgtctgtccagcagggagtcgctggtcatgcctgtgccccggcggcactccaggtcccggtctgtggaaccctcagtgactgtggcagcagagcagcctctgggtcgagcaggggccagctgtggcctccaagcccaggggcatagccggtgccaggaaagccacccttcccagctgggcacccagtgccgggaaagccacccttcccagctgggcacccggtggccgggaaaaggcgaggatgggcccaggcgggcctccctgccgtgacctcccccaggacaagcctggggcactgtgggggccgctcaccctggacagagacatcacccatcattcttccactcagcgactgcacgtcctccgcccgtcgagagcagaagcgcgagcagtaccgccaggtgcgtgagcacgtgcgtaacgacgacggccgtctgcaggcctgcggctggagcctgcccgccaagtacaagcaggtgcgggcgggcgctgcggggaccgggcggggccccgcagaggcggggcgggggtaaggggcggggcgctgtggggcggggagagggcggggcagtgctagggggtgggagaggacggcgggtggggcggggcctggcaggttcctagtgagcctcctgggcaggggtctggagggtcggagaaggagccccgcggctcccacgcccccacctgcctccagtcttgaagtggctgtgccgccagaagctggcagccctacctgtctcagatttctggagggatgggtaggagccagggttcgtgcccacggcgcctccctgctccctgcagctgagtcccaacgggggccaggaggacacgcggatgaagaacgtgccggtgccggtgtactgccgc

SEQ ID NO: 81803 - DNA, 1101 bp, Homo sapiens
tcggcctcttctccctacctactcaggaccccacgcttacctggttagagggtgacgggtgggcacggcctgcagcttgaagcatcactcggagaccacaggaaaacatttcctcatgctgaatgtgaaacctccagttgggccgaaggggctatgggggtgtgggtgaggagcttcgtgtcacccctgtgggcagtagccttggtgatgttctgggccagccccaacactgggaggacgaaggggtgccgagggctctgccaggtctctggtgtgaaaccacagggccgtctggggtcctgagggtctgccacaggatcacaggttgtttgctcccagaaccagagtcttactactcagctccccttggcccaggggcctacccaacagagcaggcttgctggagtcccagacctccaggcagagggtcgtgggtgggctgtgggtggagcatgtgtggaagctgggtctgctgggaaagtggaaggccagccccggcttcctctgcccctgtgtaagtgctgggcacgcccttgcagtagtgggttcccccgcacaggctgacgggccgtccctctccccagcggccagcgacagcgactaccctcccggggagatgttcctggacagcgacgtgaacccagaggacccgggcgcagatggcgtgctggccggtatcaccctggtgggctgtgccacccgctgcaacgtgccgcggagcaactgctcctcccgaggggacaccccagtgctagacaaggggcagggtgagtcctgggcgagtttcccccatcccctcattcccacgtttctgcccagcccaagctcacctctcctaacacaggggaggtggccaccatcgccaacgggaaggtcaacccgtcccagtccacagaggaggccacagaggccacggaggtgccagaccctgggcccagcgagccagagacagccacattgcggcccgggcctctcacagagcacgtcttcactgacccagccccgaccccgtcctctggcccccagcctggcaggtgagctcttgggctggggcaggagcagagggaaggcttgcagaggtgggaagggcctcggggtctt

SEQ ID NO: 81804 - DNA, 1102 bp, Homo sapiens
gcccgtcccgggggcatcatccacgtgtatggcgatgacagcagtgacagggcggccagcagcttcatcccctactgctccatggcccaggcccagctatgcttccatgggcaccgcgatgccgtgaagttctttgtctcggtgccaggtgaggctgggcccctcctgccatccacatcccctgcatgccagtggccgccgcctcccccaggaggccgctgtcctgaatcgcttctgccatcccagggaacgtgctggccaccctgaatgggagtgtgctggacagcccagccgagggccctgggccagctgcccctgcctcggaggtcgagggccagaagctgcggaacgtgctggtgctgagcggcggggagggctacatcgacttccgcattggtgagcggggcccagggacagggctgaggttgggcgcggggggagcctggccgtcactctgctgctttgcccgcaggagacggagaggacgacgagacggaggagggcgcaggggacatgagccaggtgaagcccgtgctgtccaaggcagagcgcagtcacatcatcgtgtggcaggtgtcctacacccccgagtgaagctgctgccctgcctggcccgacctgtacataggacccccgaccacctgacccccgcccggcccgcggggtagccagccaggcgccgccgcccctcttctaacctctcaacctgcagctttcacctgagtctggcccctccagcgggcagggagtgcggggatgcggatcagctgggaggaggaggggaggggaacttccacccgaggggaagatgctctcgggacagtttcccgggcagctcctggccagcttccagcccagagtcctcaagtccagggcaccttgggcccagcgcaggcagaatccgaggtggtcctggctctaccctgggcctcctactccccagcacccctggaggaggcaggggctccccgccgccgaggctgcctgccctgggcccacctctgcatgctgctcatggggccaccctgcctcctgggccctcactctgcctaggggagctgggccaggcactagcctttgcccagggaggtgggcctcaggc

SEQ ID NO: 81805 - DNA, 1076 bp, Homo sapiens
ccccgactgggaggcgggcccggccccaggcccctcggcacgcgcgccccgcccagtcggacagagggcgccgcctggcggagaaaggcctttcctaccccgagtatcgcccgtgccctccgccgcacctgtgtccacgcacaccgcgaggcgcttcaggacctgctccggccgcagcagccgcaacgcctcggcagccgccctgcgctcacccgctgggtcccgggctctcgcggcggcctccgagccggcggagtcctcagcgtcggagtctgagatctcccaggttggaggtcgccgctgaccgctcccgccccgtccccggccccggccctggcaagagacccccgccctcccgggtccaacccgcgccatggccggaccgacctcttcctcgcttccggccgcgaccgaacactttagcctgggacaccggcctcttccggtgacttccggccggaccgctgaggacgcggacccgccatggcgcggaagaaggtgcgtccgcggctgatcgcggagctggcccgccgcgtgcgcgccctgcgggagcaactgaacaggccgcgcgactcccagctctacgcggtggactacgagaccttgacgcggccgttctctggacgccggctgccggtccgggcctgggccgacgtgcgccgcgagagccgcctcttgcagctgctcggccgcctcccgctcttcggcctgggccgcctggtcacgcgcaagtcctggctgtggcagcacgacgagccgtgctactggcgcctcacgcgggtgcggcccgactacacggcgcaggtgcgtgcaccccgtccgcaccccgcccctgcagccgcctggtctccccgcctcccctcctccctgcaggtttgcgtggctgaggctcccacctcctgacctcgggggccgagagctttgcgagctgaccccgcttccttctggctttgcagaacttggaccacgggaaggcctggggcatcctgaccttcaaaggtaaggctcgggagagcgggtgcccggcagttcgatgccgaccgccgacggcacagcaagtgtgtgcagacgcctct

SEQ ID NO: 81806 - DNA, 1013 bp, Homo sapiens
taccgctcactctcatgcccacagcagggctggctgggacgggggttcaggggaggtgggcacacttctggggttgctgtggcacagctgatcccacttctccaggtgggctctggcagaggccaagctcgggcagggcaggccccatggggagcggggaggaatggtcacctctgctcaggtctcgccagcacgtttcccgggggacacagcagccagagagcccgaaggtggccggtgccgaggtggccgtcagctggccggaggtggaagaggtgagggcctgtctgagctgggtgagtcaggtggcctgggtcccagtgattgggctgctggctgggtttggttcccagcgtggtacatggggcagctatcagctgtgtgtcccgggtagccttcctctggctcgtgcccatcagcttgcctcctccccaggccctggtactcctgcagctctgggcaaacctggacgtgctactggtggcctcttggcaggagctgagtcggcacgtgtgcgccgttaccaaggctctcgcccagtatcccctcaagtgcgtgatgccaaggctgaaggggggcaggatcacctcaaggtagtggtgcctccccggccttttgggagctgctcacatgaggttctaaaaggcttctctctgtccccaggcagtaccgggaatcccaggccttctccttctgcacagcagggcgctgggcagccggcgagccagtggcaagagacggcgcagggctgcaggcggcctggcggaggcagatcaggcagttcagtcgggtcagcccagccgtggctgatgcagttgtcacagccttcccctccccccgccttctgcagcaggtgggcccctgcctcctccaagccctccaggtgcagaagccccgtccccaggcgccctctcatgcctttgcctgctcctaggcgctggaggcctgcagcacggagcgggagcgcatgggcctcctggccgaccttcctgtgccgcccagtgaaggcgggc

SEQ ID NO: 81807 - DNA, 1063 bp, Homo sapiens
gggtctgggatgacttaaataagtcatcagccaccctgctgagctgtgacaaccgtaaggtcagcttccacatggagtacagctgcggcacagcggccatccggggcaccaaggagctgggggagggccagcacttctgggagatcaagatgacctctcccgtctacggcaccgacatggtaagttgcttcggcccagggtgcttctggggaacctggctccggcagcccagccccgcgccctctgcctggcccctgttcctagatggtgggcatcgggacgtcggatgtggacctggacaaataccgccacacgttctgcagcctgctgggcagggatgaggacagctggggcctctcctacacgggtgcgtgaggcccagggtggggcggggccgagcctggagctcccgggctcactgcgaccctggctgcccccaggcctcctccaccacaagggcgacaagaccagcttctcatcgcggttcggccagggctccatcattggcgtgcacctggacacctggcacggcacactcacctttttcaagaacaggaagtgtataggtgaggccgtcacaggacttgagctcctctcagctgtcaccccgagggaggcagccaccccgccccagcccaggggacactgaggttttctgaaagggttcctcccagaagcctgaggccccagggtcccagggggtgggacagtgaggccaggctggagtggcagggccagcgcgtgcaccctgccttgcctcagctgtgccagctgcccacccgggtgactgtagcgtgaggtctgaggggctgcgcccagtagctggccccttccctgcctggggttcaggctgggcccctcccttccaggtgtggcagccaccaagctgcagaacaagagattctacccgatggtgtgctccacggcggcccggagcagcatgaaggtcacccgctcctgtgccagcgccacttccctccagtacctgtgctgccaccgcctgcgccagctgcggccagactcgggagacacgctggagggtctgccgctgccgccgggcctc

SEQ ID NO: 81808 - DNA, 1039 bp, Homo sapiens
gaagggtgggaggggcagagggcagcggccaccactccaccctgttatcttggggcccagtggtgccaaggcaggcggtttctggtgtggttgctggagtcttcatgggaggcacacgaaggagtctgtgatatcatgtgagacccgggaagggccccttcaaccgcccctttctgaactgcgggtcaggcaggctcccctggggaaacctgggcgcgtaggaggcacctccacctgctggagctggcccaggctggcctcccctgcagacaggccgcgtctagggccagctgctcatcccagacgcacccaggtgattcccatgctgaacagtttgatctcctgccagagtgtcgggccacaaactgggcagcacatcaggatcacctgggggccttcaaaaatcaaaaatccacccccaggccatgccctggacccactgcaccaggacaagaaatccaccccaggcctctccccagacccactgcaccaggacaagaaatccacccccaggccacgccccagacccactgccctaggatgtgggggtgggaaccaggtggtgctttgtaaagacgtgcaggtggtaaccccaggcccccacgctcggaaccctggccacaggatcatccaggtgtctgtgatttgcttcctcggtttcctttgtgagtggaaaataagtgttgcgtttgactagggtttaagagcagcaggcagcccctcagctcagcaggcagccccctcagctcagcaggcagccccctcagctcagcaggcagcccaggtctcctgtttgacttctagggaccatgctggcgggaatgagaaactggtcaagctggagtcgggactgaaggtgtacgggggtgacgaccgtatcggggccctgactcacaagatcactcacctgtccacactgcaggtaaggagtgagccctggaggtgctccagcgtggccctgtcaggagcgtgggggaggggggtccctccccgcattctctctgctcccttaccccagtgacccgggagtgctctcagt

SEQ ID NO: 81809 - DNA, 1024 bp, Homo sapiens
atcgagaccatcctggctaacaccatgaaacccgtctctactaaaaaatacaaaaaattagccgggtatggtggcgggcgtctgtagtcccagctactcaggaggctgagacaggagaacggcgtgaacctgggaggcggagcttgcagtgagccgagatcgcgccactgcactccagcctgggcgacagagcgagactccgtctcaaaaaaaaaagaaaaaaaaaaagacaaggtcttgctatgttgcccaggctggtctcaaactcctgccctcaagcagtcctcccatctcagtctcttaaagcgctgggattcccggcaagaaccaccatacctggccagaatattccttttcaaaggaacctagaaaggctgggaagcactgcagcttgcgcgtcctgtcgtggagggcctggcgcggctgcccgctgagttgtgctctgtgtctgcaggtccagccctgctgggagttttctgccacacagatttgcggaagaacctgaccgtggacgagggcaccatgaaggtagaggtgctgcctgccctgaccgacaactacatgtacctggtcattgatgatgagaccaaggaggctgccattgtggatccggtgcagccccagaaggtgcgcatggctgtgcctggctctccctgccctggtcacccagctcggagtcctcacccccgatgggtttcctaaccgcagtgtccttgcaactttgcctaagctaaatggaaattagtctccggccactctgttaacagggctccaagaagggtggaggcgagaggcagtgacacagaaagcgctgtgcagtacaatcctgggcacttgagtcttcttgggggctttctgcccctgcatgctgcctctgggggtggtgccctcagagctggaggggcttggagcggtcgtaggtggttgcaagagtgtcaggctgagcaggaaggagaaggtgctttcactggctctcctggagcagggcaagctggcagggtcaggacgggccatgtcagcggcc

SEQ ID NO: 81810 - DNA, 1544 bp, Homo sapiens
gcgcggtgttgagcgagcccgtgctgttcctgaagccgtccacggcctacgcgcccgagggctcgcccatcctcatgcccgcgtacactcgcaacctgcaccacgagctggagctgggcgtggtgatgggcaagcgctgccgcgcagtccccgaggctgcggccatggactacgtgggcggctatgccctgtgcctggatatgaccgcccgggacgtgcaggacgagtgcaagaagaaggggctgccctggactctggcgaagagcttcacggcgtcctgcccggtcagcgcgttcgtgcccaaggagaagatccctgaccctcacaagctgaagctctggctcaaggtcaacggcgaactcagacaggagggtgagacatcctccatgattttttccatcccctacatcatcagctatgtttctaagatcataaccttggaagaaggagatattatcttgactgggacgccaaagggagttggaccggttaaagaaaacgatgagatcgaggctggcatacacgggctggtcagtatgacatttaaagtggaaaagccagaatattgagttatttcttaacaagtttcgagagagaagggagcaagacaagagcaagcaacggctattaaatgtcacaatcctttaattagaaaccatttattggccggacgcggtggctcacgcctgtaatcgcagcactttgggaggccgaggcgggcggctcacgacgtcaggagatccagaccatcttggctaacagggtgaaaccccgtctctactaaaaatacaaaaaattagccgggcgtggtggcgggcgcctgtagtcccagctactctggaggctgaggcaggagaatcaattgaacccgggaggcggagcttacagtgagctgagattgcgccactgtactcctgggcaacagcgagactccgtctcaaaaaaaaaaaaaaaaaaagaaaccatttattttaaaaatgattagattgctatgcctcaactcatagaagatgaacccttcaagaaaacgtgaagtagaacgggtgggccagaaatgaaaacaggcaagtaaagtatttcttcggaaaacattttatcaaaccaaatgttaaaaagactttccttttgtaaaactggattagagaagacttttcagtgggttatctctaggatgatcagtagttcagcacttaaaaactgcagagaaaactgaaagttatgttccagataactttccgttgtttaccaaattttcttagatttggtcatcatcaggaagcatttgtaaaaataaaaatctccacaaattactggcccatctcggacttgctgaatcaatttgataggattaatctccagtgaagctgtgtttacagggcattccaagtgattcttatcaggaaatgtgaaaaacactcctgtacataatcggttaatttaaaattttacttaataagtgaacaagtaatgaagatttcacctgtttacttagggtatctacccagacccatcgattctgagttcgggagatgattttgaaatta

SEQ ID NO: 81811 - DNA, 1001 bp, Homo sapiens
gaagcctgtggctatggagaccccatcccaaagacgctgccccttggtgaaccttcctctcccctcctgtaggcagacaggggaggtgctgagcacaggcctcagtctgaagcctgtagtccatttctccaggtatgggttctgggaccatccagctctaccaccagggacaccccaggtctgacctccttccttcctgccccccagtcccaccggaagttttccgcccctcggcacggacacctgggcttcctgccccataagaggagccaccggcaccggggcaaggtgaagacgtggccgcgggatgaccccagccagcccgtgcacctcacggccttcctgggctacaaggcgggcatgacccacaccctgcgggaggtgcaccggccggggctcagtgagtcacagttgggacccttgggggagggggagggctgaaccttccagatgctcggagccagaactcacgcttttggtccagacagggccacagtcccagggagcaccaggcctcgcccccgggaattggggtggacgctgagcacaggcagggcttccgggcgggttctgtcatggccccagctcgcagatgaggacattgaggcacaaagcagtgaggaacctggtccagtcaccggggcggtaagcgcaggagctaggattcaaaggccagcgccccaagccctcggttcaaaccacctgccaggacatctgcactttttggccatttcgggtctatttcatgtaccattatttcatatgtacgcctatgtatatagttagtttttgttgttttaatcgtagattcacaagtagttgtaagaaataatgcaggccgggcatggtggctcacgcctgtaatcccagcactttgggaggccgaggcaggaggatcatttgaggccaggagttgcagaccaacctggacggcatcgtgaaaccctatctctacaaaaaatacaaaaattagctgggcgttgtggcgagtgcctgtagtc

SEQ ID NO: 81812 - DNA, 1034 bp, Homo sapiens
agtccatgaggggcccttgtagagagcggggcccagagaagtctgtagggactaggcaatccaggaaagcttcctggaggagtagggtgtttggaatcgcgtgctatttgttcactttgtcgtgtgcgctctaacggcctgtgttctccatcacagtttatcttattccctgctgcactcagcacagtgcctggcgcgcagtgggaaccgaatgaccccctcctattccttatgtcagttgccttttgtctgtttctttcatcgtaagcaggaatctgtccggttcgcggctgcttcccaggcgcccagaccagcgaccagcaccgcgtaggcgctcggcacagaccgagaacggaggccccacgcgggggcgccctgcggcgaggcgggtcccggccgcgcccggcggagccggggaactacaagtcccatggtgcatcgcggcgccagcgcgcagacgcagccgccctcggcgtcctctgtagcgggcgacctaggccgcgggacccggacggaggtagaggccagggcagcgcgtccgggagcggagtccgcgcccgccgccgccatgccggacagctgggacaaggatgtgtaccctgagcccccgcgccgcacgccggtgcagcccaatcccatcgtctacatgatgaaagcgttcgacctcatcgtggaccgacccgtgaccctcgtgagaggtacgaagccccagcccggggctccctcgccggcctctggggacccctggatcccacaccctgcctggatcctccaatgcctccggggtcccgtctgcctgagaccgccccccgctgcaccccggggacaactccccacccccggagacctccgagctccgtcgcctcctttggcctcccactgcaccccggacctcacctcccaggatcccttactctcccctgcaccccgggatgccccgcttcttcccaggactcttccctccctgccgcacccagcgcccactgccccaggaccccgcactgctctccgccccccgccgccccgggcacccc

SEQ ID NO: 81813 - DNA, 1035 bp, Homo sapiens
gtagcagttgtagagcatgtctgtcctatgtgtctggatgttcgagctctccttttagctcgttcatttcccagtgaggaagctgaggccgtaaggtggtaagttctgcttgctggaggctccctgttggagcctctttgcgcacccagcagggtccctgtgcagctgggggaggtgcactggcagagctgcgtcccagtccttgccatctgtgagaagcagctgcctgtaggcttgtgtgggggacagagtaaggtaatgcatgtggaactctgaggatgatgcctggtactcgggagctctccatcagctgtagcctaggccttcacaggcctgcctggctggccacatcccttagagagacgaattgctgttttctaaacgctggaacactcaggaagttctcctctctcccctccaaagggcttatgagaaataagaaagctaaaagcctgtccaaaccgatgaggcatttgagtctgtggctttgtctttgcagaatttatagagcggcagcacgcaaagaacaggtattactactaccaccggcagtaccgccgcgtgccagacatcactgagtgcaaggaggaggacatcatgtgcatgtatgaagccgaaatgcagtggaagagggactagtacgtgagccatgctgggagtgtggagatctgcaccgtgtgctgctgggacactagtccctgggatgccacagggtggcatgcccagattttaggggtgacatgggaggagccagaccccagggctcttgctttcaattgttctcacagggtacaggaaaaggattccttgtgattagcctctcttgctccttttctccaccagcaaagtcgaccaagaaattatcaacattatgcaggatcggctcaaagcctgtcagcagagggaaggacagaactaccagcagaactgtatcaaggaagtggagcagttcacccaggtggccaaggcctaccaggaccgctgtgcgtgccccacccacccccaaccccccaccatcctcctgaggcctggggg

SEQ ID NO: 81814 - DNA, 1914 bp, Homo sapiens
gcggttacacagtttcgccctatcgcctaggctggcgtgatctcggctcactgcaacctccacctcccaggttcaagcgattctcctgcctcagcctcctgaatagctggggttacaggcgcactccaccatgcccggctaattttttgtgtctttaatagaggtggggtttcaccatgtggccaggctggtatcggactcctgaccttgtgatccgcccacctcagtctcccaaagtgctgggattacaggcttgagccaccgcccccggccgtgactttggttcttgaatatcataatggtattaagtttttttttaatgctctccctacaattttcttgtttgtttcaggaatcagagatcattgatttcttcctgggggcctctctcaaggatgaggttttgaagattatgccagtgcagaagcagacccgtgccggccagcgcaccaggttcaaggtacccggctgtcctggagggggctgcgctgggcttgccgggactctctcggctctgcatagttgcacttggcttcacccgtgtgactttcgtaacggggagagagagaaaagatctcctcaggacctcggatgggccttactgtggcctctctttccttgaggggtgcaacaggccctgggcggtgggcagtgattgggtgtagggccaccagctgcctcacacacatcttttcgcaggcatttgttgctatcggggactacaatggccacgtcggtctgggtgttaagtgctccaaggaggtggccaccgccatccgtggggccatcatcctggccaagctctccatcgtccccgtgcgcagaggctactgggggaacaagatcggcaagccccacactgtcccttgcaaggtaggctggtggcaggtgatgggcctgccgtggggcaggctccctcgggcccccgtctcctgactccttccctcaccaggtgacaggccgctgcggctctgtgctggtacgcctcatccctgcacccaggggcactggcatcgtctccgcacctgtgcctaagaagctgctcatgatggctggtatcgatgactgctacacctcagcccggggctgcactgccaccctgggcaacttcggtaggtggtccacacatggggcatagccatggtctctcagctccgcttaaccacacgggtccagtgtgtgcttggcgtgttttcagggaggcagagaaaggctctcctaatgcacgacagacccgcccagaatggcctctctgttcctaggagtgcgacaatttttgggttgggggacttgcctcaagcacaccactgaccctcctggggttcttttgttttgcagccaaggccacctttgatgccatttctaagacctacagctacctgacccccgacctctggaaggagactgtattcaccaagtctccctatcaggagttcactgaccacctcgtcaagacccacaccagagtctccgtgcagcggactcaggctccagctgtggctacaacatagggtttttatacaagaaaaataaagtgaattaagcgtgttactgtttttttcccgtgtcctgcatggttagtggtggtttgaatctggggcgtggggccaatagatcacaccagacacacaggcaggttgcagggctttatatttcagcaacagtcatacagagccacacagcaggggcacccacagctgcctcaggaggtggcagcggcggcctcttttgcagcttttctctcttgcagcatcctctgcctctgtttggccaggcacttcctggcagaactgtaggcccccaggtcctgatctggggaagcaatggaaacaagctgggaaccgaggcctctgctacatgcaaagggggcaaagtcaagtgagcacaagggaggggagggaagatttgcaatgg

SEQ ID NO: 81815 - DNA, 1096 bp, Homo sapiens
ccgggggctctgggcgccgaatctcacccgcggccacggccaaagccgggggcgattttcaaccaacgccggtctcgaagaccaccagcgagacgccagtggtcaacgcggcaggacctacctaagtgaagaggagagcgcaatggaggcgcggacgtttatagccactcttcgggtggattcccgagccgcggctggggacggaggcgccggcgtttatagtcgcttttcgggtgacgtagattcccgggccgcggctggggccggacgggcaagagcactcagagcccggtgagggcggggcaccgcggagccaatcacaggttgtcttataggagctcggcccgctcccgcttggggcggggctgcggagatctcgcggcgcttggcgtgctataaaagctgcttcccagtaggtctcgttcttcttttccgacaaaacacgtgagtcctgttggtcgctgcagcgggcctctgcgtgggcggcgggaatccgcggacatcgggtcgggtctaggctcccgagtccgcgctcctgggcgggagcccttgtctgggtctcgcggggggctgccagatgcgtaggccacactgactagttccttcttgtcgcttttcccagcaaatggcggatgacgccggtgcagcgggggggcccgggggccctggtggccctgggatggggaaccgcggtggcttccgcggaggtttcggcagtggcatccggggccggggtcgcggccgtggacggggccggggccgaggccgcggagctcgcggaggcaaggccgaggataaggaggtaggtatcagccacgctcggggtcgggcccctgggcggcgccggagagcggtcctggtcactggcgccttttctccctttagtggatgcccgtcaccaagttgggccgcttggtcaaggacatgaagatcaagtccctggaggagatctatctcttctccctgcctattaaggtacgcgtcggtcgttggggcgttgagcaagtgcgaccccggagtcatttgggctggggttggaggattagcatctgccattgactcgcattaaagggcccagcgtctcgcgtgagaggtt

SEQ ID NO: 81816 - DNA, 1060 bp, Homo sapiens
tgtgattggctccgcggtgccccgccctcaccgggctctgagtgctcttgcccgtccggccccagccgcggcccgggaatctacgtcacccgaaaagcgactataaacgccggcgcctccgtccccagccgcggctcgggaatccacccgaagagtggctataaacgtccgcgcctccattgcgctctcctcttcacttaggtaggtcctgccgcgttgaccactggcgtctcgctggtggtcttcgagaccggcgttggttgaaaatcgcccccggctttggccgtggccgcgggtgagattcggcgcccagagcccccgggggcctcagctcaccgcgcgctgccccatgtgcggcggtgaaacccaggccccgacaggcgctgccgcctcccccccgggtgcggtcgctcgcgaggtctggcccctgactcctgaccccgactgcagacccctaaccttgttctttctccgcaggacactggtcctcccacgcctgacaccgacgtcgccaggaccgcggggttgggggaacttggctgtcccacgtctttcaaataaagctgttttgtctaactcactgcatgcgggtgttcttggggccccgactcgcctatcagcctggcggcaagtgcatatgttcacgctgtggcggggagaaccctagcgagatgcctcctcttctttcctggctttggacacaagggtaggatatgggaggttggcaggtgatgtgtaaggtccgacgcctcttaagtggaggagccagactacgaacagtcttgtggccatgcgcatctcaagtgaactacactggcaggtaaaatgccttggtccaaagggctccaggtggagccagcagagcactagcaaggatgggaagctcagaggcttccagtggcttccttgtgagaccaggtgagattctaaaggatttgaccaactaggcctagatgaactcagcgcccccgtggtgctaggctggagtggatcagacacctggtttgggaggctgggccccctgctctggggcggcaggttacccgggagtttagttgtc

SEQ ID NO: 81817 - DNA, 1028 bp, Homo sapiens
tcatttacctacgttatttatcaagagccacactgcgagcccaggggcagggtcaggttgacggctctacgcacggaccgcacccgacagctggtacccccacatcccagaacgccgaaaagcaggagtaaacgctggctacaaatgcctttttatactggtatcaaagagccaggccaccagcgatgccacatccgccggtctacccccaccgacccgcgaagcaccctcacagctcacggccctccctccaggccggaaacgtctccgcccgcttccgcttcccgatgcagccgccactgcccgaagcaaagatggcgccaagtgcgcggcgccggcggggacgtcacagtggtcgcgcgcggtgacgccatcgcagcgcgccgggagtgtggcgttctgtgaagagttcggtgctaacctccctcacgcggcggtggctgccgggaccctagcaggtttcagctggagcggcggcggcggcaacatggcagagaccgcggccggagtgggccgcttcaagaccaagtgagcccggagctctggggccgtgcggggagggagctgggtttgcagccggcatagcggaggcgcgcgtggggtgggcacgcattggggtccgtggaggcgagaggctgtgtgtgcgccggcccgcggggtcgcggaggctgcggtgatactaggcgggagagccggccccggctgctctcggggaggacggcgatcggagcccggccgccgggagcagcagcgtgggctcatcgagaagccggctatggggtggagtggggaccagaagtcccgatgaggggaggagagggctgagcctaggtcggggctggtcccgggaggcggcgggggcgaagaaccacctctgagcagtcggcctggggacctttcatccgcgatccgtcttctccagggagcagggagaatgcaggagaggggcgggtccgcagaagcccaggaggccctgagtgctgtgccccgtcactccccaagcctttgccgaacagcagtgctggtgc

SEQ ID NO: 81818 - DNA, 1537 bp, Homo sapiens
ggggcacgagtgaggtcacagaaatgacagctgctcgtgggacccgggctctgggcaagcctggggatggagagaggagtcagggaggggaagaggtatgccagacctcagggatgaagacactgggaggatgtgctctgggctggctacccaggcctggccacccaccgccggcaggggtgttcccaaggagccccctggctctcactggggaatccctggaagccctgggctgttgggctgactccacctgacacaggcccaccccctactgcctcagggatcaccagccagctgcgggtctctacttctcagtgacgacggtagctacagccccctgcagtactgctggttccaccccatgccctgtccctgctgttgcccagaaactcaagggcaggggccattggggtcacttggagaggagcacctagcacagggcggggccctggggactgagggggtgggtggtgctcattcgcctcccgctctccttccagctatgctgtggagcgcaaaattgagcctttctacaagggcggaaaagcacaggtaccagcctggggaagggcagtggggcgggcagccagaggccgcggggggtgctgaatgttgcctggctgagacctctctgtccccagctggaccagactggccagcacctcttctgcgtctgtggcaccagagtcaacattctggaagtggcctcgggggccgtgctgcggagtctggagcaggtgagggcagcctgggtgggtgaggggcaagtggagagggcagcccactcacaccgtgctcggcacaccactctttctcctaggaggaccaggaggacatcactgcctttgacctcagccctgacaacgaggtatgtggggcggggcctggaggggacccgctccagcgcctccctcccagactgagtccaggaagatgtgagcagggtattgctgcccctctgctgacctgtaccctcccccaggtgctggtgacagccagtcgggcattgctgctggctcagtgggcctggcaagagggcagcgttacccgcctgtggaaggcgatacacacggcccccgtggccaccatggccttcgaccccacctccactctgctagccacaggtagggccctgccgtgcaggtgggtcgtgggcacagatgcaggggctttgggcattccaccccctcaccttgcttccccgcaggtggctgtgatggggccgtgcgcgtctgggacatcgtgcggcactacgggacacaccacttccgaggctcgcccggtgtcgtgcagtgagttggaaggtggagggggagggcagaggcaccacccaggctgcacagctcacccatcctgtcccgtccgcccacagcctagtggccttccacccggaccctacacgcctgctgctcttctcctcggccacggatgccgccatccgcgtgtggtcactgcaggaccggtcatgcctggctgtgctgactgcccactacagcgccgtcacctcactggccttcagcgccgacggccacaccat

SEQ ID NO: 81819 - DNA, 1035 bp, Homo sapiens
gggggtggcggggggacctgcctgacgctgagcctctccccaccccaaacccagcggttcggatggcctcgtgaagctctggaccatcaagaacaacgagtgtgtgcggacgctggatgcccacgaggacaaggtctgggggctgcactgcagccggctggacgaccacgccctcactggggccagtgactcccgagtcatcctctggaaggttgtgggccccaagggcagggaagagtcggggtggagtggaggccccatctgaccctagtctaaccccaggatgtgaccgaggcggagcaggcagaggagcaggccaggcaagaggagcaggtggtcaggtaaggccagggcagtggcgcccctccccgcatcagccctgctctgtgctgtagggaaaacgaggctgagtgccaggctccctgcctgctgactccgatggctctgcctgcagccccagccagcggccctcagtggcctctcctcccctccccacaggcagcaagagctggacaacctgctgcatgagaagcggtacctgcgggcgctgggcctggccatctccctggatcggccccacaccgtgctgactgtcatccagggtcagtgcccaccccggggggcgaggggctgggtcttcggaccactgggctctgctttccccagctcagccttcccttctcccacagccatccggagggaccctgaggcctgcgagaagctggaagccaccatgctccgactgcggcgcgaccagaaaggttggcggccagtcagggtgggtggcccggtgggcaagggccagtcatggcagattggctgggcaagacgatgagggtcctgttgcccacagaggccctgctgcgcttctgcgtcacgtggaacaccaactcgcggcactgccacgaggcccaggccgtgctgggtgtgctcttgaggcgagaggcccccgaggagctgctggcctacgaaggcgtgcgggcagcgcttgaggccctgctgccctacactggtatgtgggcacagcctggggtt

SEQ ID NO: 81820 - DNA, 2490 bp, Homo sapiens
aagcgggacggccgccacggacggcgcaacccctgcgtgcgccgcggatcgacgcctgagggcgccagcagggtccgaccctcctgctccgtccccgcccctgtcctcgggcccggccagcgccgcggcctctggctccgcctccacacgggcccgcaagcaggcaccgcccccgactctgcccccagccccggctcgggcccggcccccgcgagcacggcgcgcgcctccggctcctgtggccgcgcgctggcctggaggctgacctggaggctcatctggaggccgagctgacccggcaggccttgcgcgggcaacatggcggcgcccggcgagcggggccgcttccacggcgggaacctcttcttcctgccggggggcgcgcgctccgagatgatggacgacctggcgaccgacgcgcggggccggggcgcggggcggagagacgcggccgcctcggcctcgacgccagcccaggcgccgacctccgattctcctgtcgccgaggacgcctcccggaggcggccgtgccgggcctgcgtcgacttcaagacgtggatgcggacgcagcagaaggtgcagttccctgcccgatttctcccagccccgcgcagcccctgtccccgcccccgcccaggtaccccggcagagcttcccagggttgcctgtccctgaaccttgccccccgggtaggcccggccttacagccttcatccgcgcgtgggttggatcgtctgcaggactttggccggagtccagtgggccaccggctgggccgtacagtggggagctttgggcgcctttgttcggagaatgaactcactctcggtcggcctgcttccgcagcgggacaccaagtttagggaggactgcccgccggatcgcgaggaactgggccgccacagctgggctgtcctccacaccctggccgcctactaccccgacctgcccaccccagaacagcagcaagacatggcccagttcatacatttattttctaagttttacccctgtgaggagtgtgctgaagacctaagaaaaaggtaagatgtgtttgcacgcagcagagctttgcactggagcctgggcctggggctcctggctgacgttatagcggggaacgtagagaaacggatgcagaggtggcagaagtttgctgaggagcagggacctccaacaggtgaggactggggctatctgagcctcctcctctcgtctcagaagccaagctgtcgggatctgctgctgggtactgctcctgccacagccacagggcttccaggaagggattccctgccttgtctggcactgaaggcggtttcccgcaagttagggaagactccactttgcctgacttctagagtaggacttctggttttaaaatcttggaaatccactgcttttgctcccaagagccatctcttcctcactgagggatccaagagccagcactggcccttgcaggtgtttctaggccagatgtatagggtagagccgccattgttgctataaggctggtcagttagaatgaagtctcttgctgaactgacgcaccagggcctgccctcagatgctaagaaacaagtccagttttcagttacaaggctgtgcccagccccacccaggccacactctgcctgaggccagggacactggatgccgcttcctgggtgttaggagcttataaaattgccaggtctgtgctgtaatgtgttgccttgaggcctcgttggagtttgccaagctgtccaggtgggtgtttgcgcagccctgggagttcatcacacccggggagctgcagggtcagccctgttctgggagtgcctgtaccttggagcataagggcactcccaggtgtagttcacagcagtgccccagctctccttccttgacagcagacagggaactggcaggggcagtggagccgctgcgtcctctcattctttacctgctctccctacacaggctgtgcaggaaccacccagacacccgcacccgggcatgcttcacacagtggctgtgccacctgcacaatgaagtgaaccgcaagctgggcaagcctgacttcgactgctcaaaagtggatgagcgctggcgcgacggctggaaggatggctcctgtgactagagggtggtcagccagagctcatgggacagctagccaggcatggttggataggggcagggcactcattaaagtgcatcacagccagagcctgttgtgtctcagttgggtggtccccaggacactgcctgtggggacctgccctgcccctcttaggtttggagcagaagtggaggtgcccacagcaggtacccactggccccctcctcagtggagaccccaaggagctgcagctgaactgcaggggagggaaggaggagcagcctgggctgccccttgacattcaggatgtagcttcctgcccaccgcataccctggcgcctcactcctcacacgggaagacagcgggcctggctgggcatccc

SEQ ID NO: 81821 - DNA, 1048 bp, Homo sapiens
tagctcccgccagcgtggccagagctgtcgcaccgtgagcgtccttcctccttcctctccgggctgccaggcagccaggtaaggcctggtgaggccacttggcctcttggttggccaggcccaccaggaagtcaccaggacagtccacccgccctgttggcacactcaagcgggagtccacccctgcctcagtggtgggccagtctcggtttgcattcttgtgcttttgggaggtgccaggggagggaagggctgggatgctgggacctgttgttgctggcaaagccagaggtcacagtggcctgatctgggccctcccaaagctgagggctgcagcccgtggggcctcagagctgaaagctgcggcgccactggtgccagagtcagatgtcacagatgtgttgtgtaaacagttggctgtttcatgcttcaagaatgttcaggattaaaagcagacaagaaattgtgctacttgaagttgaatctttttatgagacaagctgaatctgggatctcaaattgcctctgaccttttataagacagtttatcttcaaataaatttattttgcaataccacgcatagctggtgttctgagcttctctgtcttctgagtataccctgaagccaaatttagaaacagggtggaggggacatctgaaatactgcagcgaaataatttgagcgtaattatctggatctggtgtttttggagggagaccagacacatacggtaatcactttctgcttccagcacatagaagtaggaaaaatgctctaaacacagccacattcaaataaggccaagaatatgtcctcagatcagagaaagtggggaaatttctctaaagcaagcagaaaggggctcccatggtgatgaagagccaaggtcagtggctgcagaggggctgggtcagccatgtggcggcattggcactgcccccctgtagctgaggacttggacactgggactcaactgtgtcccctgggtgatggccatgctggggctggctaggagatgagaggctgggtaggggccacctgcattc

SEQ ID NO: 81822 - DNA, 1758 bp, Homo sapiens
gcctgcccccacgcctggcttgtttttctatttttagtagagatggggtttcaccatgttggccaggctggtctcaaactcctgacctcaggtgatccgcccacctcagcctcccagagtgctgggattataggtgtaagccacgatgtccagcttagtggccagctcttgatgggcacggtgcctgggacgctccaggccttcacctgggaggttgaagagcaccctgcactgccagtccccagagggcctgtccccacaccctgacctgacctgggggccttgtgttcttcataggccccaaggaaacctcgacaaatggtcctgtaagccaagaagccttctcggtgacaggcccagccgccccagggtgtgtgggggtgccagggtgagagtatgggcgcccaggggtgaatggtgcatggtgggcgggtgcgggcagccacaggtgggtgccgggagggcaggtatggagccacggggcctgatagctgttgaccagctgtgcttccctgcacccagcgccctcccaccacccagcccgaagctcaaggacgaagacttccccagcctctctgcctccacttcctcctcctgctccactgcagcaaccccgggccctgtggggttggcgctgccgtacgccatccctgccagaggcaggagtgccttccaggaggaggacttccccgccctggtgtcctcggtgcccaagcctggcaccgcccccaccagccttgtctctgcctggaacagcagcagtagcagcaagaaggtagcacagcccccactctcggcgcaggctaccggcagcggccagcccaccaggaaggctgggaaggggagcaggggcggcaggaagggcggcccgcccttcacacaggaggaggaggaggacggcggcccggccctgcaggagcttctgagcacacgccccacgggctccgtctcctccacactggggctggcctccatccaaccctctaaagttgggaagaagaagaaagtgggctcggagaagccaggcaccacattgccacagcccccgcccgctacctgtcccccaggggctttgcaggccccggaagctcctgccagcagagccgaggggccagttgccgtcgtcgttaatggacacatggagggcccggcccctgctcggagtgcccccaaggaaccccctgggctcccaaggcccctggggtccttcccctgccccacgccacaggaggacttcccagcgctcggcggcccctgcccaccccggatgccgccgcccccaggtacgcgtgctggctcaggcctgctccctgggtgtcgggaggggccggggtcaggctggagccgcaggcacagtctgcatctgggtggtggggacccctgtgtgatgccatcggccacccacatgacctccagcctcccgttaaccaccctgtgttccttgcctctgtgagaccggccctcatggcgcctcccaggtctgagggtgcgtgagcttgtgtgggctgggcctgccacaccagcagcagtggtgtgggtgctggccctgcacctgccctgcagggaaggggtggctgtagacagaagctggccctggaggccaggcagcccgcagtcagcgagggtcctctctgggtcttgtcctgccacccctcaggcttcagcgctgtggtgctcctgaagggcacgcctcccccacccccgccgggcctggtgcccccaatcagcaagccgccccctggcttctctggccttctg

SEQ ID NO: 81823 - DNA, 1772 bp, Homo sapiens
ctctcggtgtcttcctaggcagctgctgcagcacgagtgcccgcggtgccccgagctgccacctttcagcctcttcggggacctggagcagcacatgcggaggcagcatgagctcttctgctgccgtctgtgcctccagcacctccaggtgtgcccccccagcgaccccggagagagcctaggcggtgggtggtgcaagggatgtggccacacggctgggaggggcttgtccacctgctgcttctggccccggatggccccctgagggtcaggctgcacgtggcagggaggcctctggctgctggcggggccctctcccgccccttgctgctccgccactggcctgtgggaagaggcaggaggcttggggtcccccagcctgtgcccagcctcctgtgccttgtagatcttcacatatgagcgcaagtggtactcgcgcaaggacctggcccggcatcgcatgcagggtgaccccgatgacacgtcgcaccgtgggcacccgctctgcaagttctgtgacgagcgctacctggacaatgatgagctgcttaagcacctgcgccgcgaccactacttctgccacttctgcgactcggacggggcccaggactactacaggtgggccgggcagcagacagacagatgaccctccctccccgagggcgtggggctaaccgggctgcagccctcctaccgacaccccatctcctgccagcgactatgcctacctgcgtgagcacttccgggagaagcactttctgtgtgaggaaggccgctgcagcacggagcagttcacccacgccttccgcaccgagatcgacctcaaggcccacaggacggcctgccacagtcgcagccgcgccgaggcacgccagaaccgccacatcgacctgcagttcagctacgcgccacggcactcgcgccggaacgagggtgagcaggcacctggcctggatgcccccaggtggggccgcatgaccatgccctgctctggagcctgagatgagaccgagctgtgggtgcaggagctgacctcccaccctccggccaggctggagcgcccgagcaccccttgtgtgccaggagctcttgctccctcagggtctcgggtctgctgccctgggtgcccggggcccttccctggaccaggaggcttttactgagcatctgctgtatgcagatcccacctggggctcggggaccctcctcctctcccttcccactgctcctgtggcttggcacccaggtcgtagaggcccgtggctggcgtggaccctgcgaggctcctgtgccactcccgggctcatgtgcactgtgggtaggaaagcctctgccatccaggcctgagcattggccgggtgtggccttgacggcaggcctgttcctcctattgtcgtcccggggtcccgggaagtgacgggctgtctgctggccgcaggggtcgttggtggcgaagactacgaggaggtggacaggtacagccgccagggccgagtggcccgggctggcactcgcggagcccagcagagccgccgaggaagctggaggtacaaaaggtgggggaccttgcgtgccgctgacattctcctgtggtgaccgtggccagtggccaagctgggagtggggatggggtcagggattgtggccagagttcctggggtcctgagtggcagtagggtctgttgagggtccttggtgggcacaagtttctctctcttttctccagttctagccacagccacagatcccagggttggggtgggtgaaagggg

SEQ ID NO: 81824 - DNA, 1765 bp, Homo sapiens
ttgtttgcttccagcattgtgaaattcccccggtttgttcatagaaggcttcggctggtgacatctgccaggaatctaactttcttctccccagaagtgatgcagagcagtattgaggtgtaggttctttctttttttccttttctttctttaagtagacgtttacatcaaaggagttgaagagatgctgcaattctctgagcaatttgtgggcttatagtctgtgccctttttggaaaaagacatttggagattctatcagtctgtcatgtgacaggaggaggccgacccagaccccggggagatctggggtgcaggaacagtcacagaggaccttggcccgtggcttcctcagggcgcttcctggctttgccagggcctgccttgccagccagtcctgcatagcatgacctcactctccaacagctaggtttcccagcacacctgtagcttccttccggaaagaagacgctaaggagttcttggcacgtgaggtcccgacccaggctgcaggtctgatgcaagacatgagtgaacatctgcgtatgcttactgtggcagcctctgcccgctctcattccttgtaggccccacgccctccaggagctctgtggctgggggctgcggacatgagctgtcagccggggtgtggtttggcactgggtgcccccagccggcttcctctagggcctaccccgccttactgggctgaaggaggggctcctggaaagtttgctgtttgctggtctcctctcctttgcattcgttctattttcttcccatcttgagcttgccgcctcactctagtctcctttttccttactgagttcagcaccatcccctgaatatattctgtgtcccatgcgtgctcaggaattcccactgcaaccctcaactcctgaaccctggcgttgccttggcctcccttatgggactaaggttttgcgaaaattgtgaggaaagtgtccaggatgccgtgtggaatcggctggctccatgtgcttgttagttccacacacctggacccaggccttccctgtggaggctgcagctgctgctcaggccaggagccagatgggcctgacccctggcaggtgctcagggtggaagccgaggcaggctcccctccgtgggaggtgggggcgctggtcttggccatggctgacagaggtcctggggtggtggagccccacgttctgggcctctttcctggctgcgtctttctcaagggccggttcctgctgtttgcatcttgctctccagcttgctctggtccctggtgttactgcaggagtcctgatgaggctgcaagccccccagggcagcccacctgcaccttacaggcaggcagtgggagggggcgcagagggccagcccacagttacccaaggtcccaggtcaggagggtgacatgctggcttgggtcatgctttcctactcctactgctccccctccgccctgctcccgtcccccgtggccctggccctatctgtaaaatgctccctgcttctgctgtccccccaccccgctcccgtcccccatggccctggccctctgtaagatgctccctgctgctgctgtccccatctgggctccttggaggtctagactctctagatggccctgggagccaaccccagggtccccctccccacgtgtgggcaggccctcaccgctgtccttttgtgtgcccatgacatgctggggagtgtagagcagcaaggccccaggcagacaccacacctgtccctgtggggggtcttg

SEQ ID NO: 81825 - DNA, 1680 bp, Homo sapiens
ccctgctcactgcattccatctgtgctggtcttggctgaccctgaacacccaggcctcttggtgttcctgcctcccctggtcggccacttctactccttcatgtcccagctgctcagaagggccgtccactctcacaggctctcctgggtttcccccactcaggccttgtcctcagtctctgagcacaaggctgtctgccctgcaccgagtgcaggggtcgggcaggagctgtgtcatcccctgctctgcgccacccgctgtgccaggtcccgacacacagcagttgctccccatacgccgctctgcggtcggccggtgcatccggccccctgccctgtacaatgctgatgctgcagacctgtctcttgcagggcgcctctgtgggaaggagaggggtccagggctggagtccgggtgcccctgcacttcagggacttcttggcagccgtgtgggcgacgctggcaggctctgctgatcctgtggcttttgtctttagggcgagcgtttgggggtcctcagagccctcttctttaaggtcatcaaggattacccttccaacgaagaccttcacgaaaggctggaggttttcaaggccctcacagacaatgggagacacatcacctacttggaggaagagctgggtgggtgccaccttgggttggaggtttctctggccttgacgatcaagtgtaacctggatgggaaggacctggggctggggaggggctgccgttctcagggatggcctgcagcgggtatgcccaccctgcttcatgcacctgggctcacctgcgtggccggagtgcccctgaggcacgtgttaaaaatgcagagtcctggccttcaccccagacctgctgactgtgagtctctggggcttggggcctccgaacacctctgcaacggcaggagctgggcgagttctgtcactgggaggtggtgctgctgacttggtctcaaccggagcgtactggtcccgtcttcctcctcctttctccactttgtggaccttcctcctgccatcctgtggtgggaggtttccattagtcttgggtctctgtgtcatgattctgggaagtagagaaagaggaggaagagatcggtctgactctggctttgctgttctgtcgcccagaaaagggcctcagtggctgggctgcctgcaggacaggtgccggccaggtgcctaccgtcaggtttcctgtctgaggtgacgtggccggcagccaagtgtgcacacgtctcctccgagccactctctgctgggggtggggaacgcccaggagtctggtgatgtcggcgtctcccagcctcgggttgggccctgagtgtacggcatacacacttctgctgccgcctcggcacagaccctctgtgcagccccaggggcggtagatcctagtgtccgtgcgtagccggcctgccctgggctcccctgagcctcttcgggcccagtgcgtggtctgtctgttgctgccgggggactgatgatggggtttctggcagtgacgggtttggacacactgtcctgcggcgggagggggaggtgagtgggagatgtagattcggcgtcctcgcaaactgccgccgcttctcccccagctgactttgtcctgcagtggatggatgttggcttgtcctcggaattccttctggtgctggtgaacttggtcaaatt

SEQ ID NO: 81826 - DNA, 1050 bp, Homo sapiens
gggtggggcgatcacgtcgtcctggttttatagtgatgagctgcggtgtgggtcacagggctctcctgatcctctgctcttcctgctacccccctccccgtaggggcggtggggggatgttgtctttgtgcacagcttgcagccgaactcagggcagctttcagttgctgctgggctggcccaccgggtgcccaggattcagttgctggtctgtccgagtcagggactttgcaggcaggcatgggggtggggcccgtctgggtcctgactgtgctggagcatgtagaaacccctcctgggcgccccacctgctgtttctgcggcccctgataaacgtgtggtgggcactgcgcgctcaggcgtgctactctcggtcccaagggtgactgggagggcgtcccacagcaagcaagcagctctgaccctgtgtgctggccgggctcgtgttccaggccatggcatgtccgaacgaggtggtgtcctatgagatcgtcctgtccatcaccaggctcatcaagaagtataggaaggagctccaggtggtggcgtgggacattctgctgaacatcatcgaacggctccttcagcagctccaggtggggtgggggcaggagctccggggagcaccgggaacccagacaggcaggctcggcccactcagaagatggtaccttgggccccatctctgggggtcccgcagagactgccagaaccgtgttctctggtgattcgcagtggcgctcatccaccttccaccggagacaggtctgatttttccagacgtggtgcatcgtttaggccccagacaggaatatgcagtaggtgagccggggctgggccagtgctgtccacagtccgcagagtgacctgcaggccgccttcgtggcctgagtgggccccggcacagttcccagagggatgccagtgtggcttccgcatgactttggaggaccgcattagtcgagtctgttaaccacagctttaaggaggactccacggccacacgggctcatcagcataggggccctggggaggcgaggctagtatcca

SEQ ID NO: 81827 - DNA, 1022 bp, Homo sapiens
ctccctgggaagcagagctctgtgccctgtgtgcctggccgcgggaggacccagagtcgggctggcctgcgccaggcagacgggctggtgtggggctgtggccgggcactccccacccgccccagcaggctgccgtcccgcaggagcgagtcccgaggcgccgtgcgcatcaaggtgctggacgtgctgtcctttgtgctgctcatcaacaggcagttctatgaggtgcgtgtccaggcggccgcagctgggggctcagggctatttctccgtgggcgggctgtctctgttgtgcacgtgctcccgcagagccgggctctgcctgggacttcggtcctgccggaccctctgcagcccccagcgtggtctgtttacccctgttcattcactggcttgctcgtcctgggtgcctctgccaggccttgacacgtggccaagtagcaaggaaggcacagtgcctgccctcagggagctccggccggttttcacccaacacaggagcctcttaaaaattctgtgtgagttcgtttcagccagtcttgcatggggacattgtcttccgtttcagtcctgacgttcaccctgtgcacctgcgtgatcgccagccctgcctggtctctcctctgcgggctctccctctccactccctcctctgggagctctgtggccccaggcccaccttccttgagagacatttgtgtgcctgccagtcatacccctttcccaggaggcgcagcttaggctctgaggctgtcccttcccaccgaactcctccctgcagcctcgcagtcctgccctcctgagagctgcccactctgctcctctccccagcgtccactgtccttgaattgccctttgctgggcattgcgatcccgcattctgtctgagggagctaagggcctcctggaagttcctctgggtcctctggcttctcccatcagggctggtcttgtcctggtctctgttcctgtggaactttttacctgcttctgtgaaaactcacgctgtcctcagcacagca

SEQ ID NO: 81828 - DNA, 1014 bp, Homo sapiens
cttctccagaactgacttgcacctggccgtggttccagtgctgacagcattaatctcttaccataactacctggacaaaaccaaacaggtaggaggtcagagcaggacaggcgagcttgatggggcctgggattcgagggcctggcccaggtaggccccacatttttctcataaacgagtttctgccaggccagggatgagtgagttggctctgcttccctgggtggctgccagatgcccagagtggggacatccgattccctggtgcttctagctctctttggggcctgggagccatccagtgttccctgtccaccccggacagcatctctgctctctgtagagcgttgcctggcttgttcctgctgtcccaagggggaggtggccatgccggttggtggagctgggctggttctgaggcgcagggtgggcaggccagagagtctggcttctgcctccctccacgccccatcaggtgccggaaactgtcccttcacctgcgatctgcctcgcccccgtcccagtcgcattcttccacacctctctttgacatggccctccgggacgaggagctggtgtcctagagattctggcctccgctcagggccatgcccgccaggagatgctgactctgaggcttggcccatctgtgccccgggcctcagcttctgatggtggccctgtagggagctgttgttgggttcccatccctcaggctcagccccaccctgttgggccccttcagcccctctgagaggctcactgggtcctcatgggtcttgcctcaaagcatagccagccttgctgggctgcaggttctgaggccttactggcccacagtgtatccgaggggtgaggccggctttgggaaatggaagctgttcccgggacactgcctggcaggccatctggccccgggctctgcctgagctccgctcatcttctgctgtcctcatggaagacactgcccagggttggtgtgggatctggtggcttggccacttcaggcagcac

SEQ ID NO: 81829 - DNA, 1557 bp, Homo sapiens
cttgccccaggccgagcgggctggggtggggtcctcgcctgtgccctagggctggctggaacccctgggagggcggtggagtgggagatggccaggctctgtgttcctccctgtgggctgtggctgccctggccaggccctcacctgggtgcccaccatcccctccctgtgcagtttcgtgttcctgcagctctaccattcccccttctttggcgacgagtcaaacaagccaatcctgctgcccaatgaggtaggcgtggcctccctctcctgcatccgctggagctgtgtggctcgggtgaatggtggggggcccagctctgctgctgggagctcaggcttgcagagggctctggcctaagctccctgtggcagcctgccgtgaccggcctgggtggggcggcctcctgtggacgggcgtctggggctcaggcagggctctgtgtgccacagtcacagtcctttgagcggtcggtgcagctcctcgaccagatcccatcatacgacacccacaagatcgccgtcctgtatgttggagaaggccaggtgaggctgcggggccggcctaggtgcctggacagggccagctgggcctcagcctgcagtgggtagggagtctgggcccccaacgccccacagagctcaacactgccgggtcccctacagcatgaagtgctcattgagctctgtgccaggtgctgctctgagtgctggggaccccggtgcgagtgacaggttagcgtgggagcacccggcacaccaaggagtgggaaggactgggcgggtggcaccggtcgcagggctggggagggcgctgttggtcagtgagctgacagctgagtggtgagggagcgggcagggggagcctgcataaggggtgggggcatcccacacaccagcagcgggggccgggcgcaccctgcccagcttgagcactggtgctgggcgagcacgggagccgacaggatgggcagcctcagcgccctataggctgcaccttcatcccaagggaaagggcagggcctgggctgcttctgagcagagggcacatggcctgactccgcccagtctcagtgagtccctcctgctgtgtggctcgaggaggtgggtggtgatggttcccgtgggagtggggtaggcccctgggggcaggctgctgaggggccagggccccgggtgtgctttgagtgtggagctccctgattttgccggccaggcacacacggggctgagggaagagagggagtcaaggatgacacccgatgtctggcctgggtggctgctggaatggatggtcttgtctgcctcagggatcagagtggggctcccggcagagcctgctgggcacccccaccctctgcggggcagggcccggcccgggagtgatgccaccctgcctctcccctctccccacagagcaacagcgagctcgccatcctgtccaatgagcatggctcctacaggtacacggagttcctgacgggcctgggccggctcatcgagctgaaggactgccagccggacaaggtgtacctgggaggcctggacgtgtgtggt

SEQ ID NO: 81830 - DNA, 1050 bp, Homo sapiens
gcctatctgccctgcctgggccatgccagctctccccgccatgctggggctcacccggaccgtgctgtgacactggccgacccagcccacctccaggaagagggtgacgctggttgctgcctagtggtgcgtggcgataaccaactgagcagcctgacagctgccactggggagatggtgggggcccaagggccgcgccggacagacaggaagcaccaactacactgtgcccacccagcacacccagtctgcacttgccagttactcctgacagacactcagcagcaggcgccacaggcttcagggcacagaggacacaacgcaggctcggggtgaagctcgtgcccacggggccctgagcactgcggcctctcctcctgctcctcgtgaccgaagctcagggaggaggacctgccaccaacccgggacacagcagtgggcacctgcctggggcccagcctcactgacggcccctcactcaccttgatggtgccaagcttgaagtcctcaccggagtcattgtagacaatggacacaaagtcgttgcccaggtggcgcttcttgtcgcagcggtgcttgtccacgtccttggtgggcatcagggtggcgatgtggaagacggctgagggtgagcagggccggatgggtttgtggggccagtgctgaggccctctgtgccttgcactggggcacctcctgattactccaggggctctgggggcctgcggggaccacgtcctctggtgcctggccagtggtcctcggctctccccaggggcagggctttgggacgcaaagccaccagccccatcactgcctccatgcccacgctgttaggctcggaacctgaggcgtggggagctggagcaggtgggggtgccagggccatgccccagggcgtggggtagcaggactggatgggagccgtgccctgaggcctggggcagcaggagcgggtaggcgccaggccgtaccttgcatgatgtcatcgtgccagcagtaggtgaactggccgtcctcaccacacacgtccaggcctcccaggtacac

SEQ ID NO: 81831 - DNA, 1862 bp, Homo sapiens
ctccctctacctccctgtctctgcactgacctcacgcatgtctgcaggagacctcatccacctggccagctcggacgtgcgggcaccacagccctcagagctgggagccgagtcaccatctcggatggtggcgtcccaggcctacaacctgacctctgccctcatgcgcatcctcatgcgctcccgcgtgctcaacgaggagcccctgacgctggcgggcgaggagatcgtggcccagggcaagcgctcggacccgcggagcctgctgtgctatggcggcgccccagggcctggctgccacttctccatccccgaggctttcagcggggccctggccaacctcagtgacgtggtgcagctcatctttctggtggactccaatccctttccctttggctatatcagcaactacaccgtctccaccaaggtggcctcgatggcattccagacacaggccggcgcccagatccccatcgagcggctggcctcagagcgcgccatcaccgtgaaggtgcccaacaactcggactgggctgcccggggccaccgcagctccgccaactccgccaactccgttgtggtccagccccaggcctccgtcggtgctgtggtcaccctggacagcagcaaccctgcggccgggctgcatctgcagctcaactatacgctgctggacggtgcgtgcagcgggtggggcacacgcggccccctggccttgttcttggggggaaggcgtttctcgtagggcttccatgggtgtctctggtgaaatttgctttctgtttcatgggctgctgggggcctggccagagaggagctgggggccacggagaagcaggtgccagctctggtgcagaggctcctatggcctttcaggcccgtggcagagggtgggctcaggagggccatcgtgggtgtcccccgggtggttgagcttcccggcaggcgtgtgacctgcgcgttctgccccaggccactacctgtctgaggaacctgagccctacctggcagtctacctacactcggagccccggcccaatgagcacaactgctcggctagcaggaggatccgcccagagtcactccagggtgctgaccaccggccctacaccttcttcatttccccggggtgagctctgcgggccagcctggcagggcagggcagggcatcatgggtcagcattgcctgggttactggccccatggggacggcaggcagcgaggggactggaccgggtatgggctctgagactgcgacatccaacctggcggagcctgggctcacgtccgctaccccttccctgcccaggagcagagacccagcggggagttaccatctgaacctctccagccacttccgctggtcggcgctgcaggtgtccgtgggcctgtacacgtccctgtgccagtacttcagcgaggaggacatggtgtggcggacagaggggctgctgcccctggaggagacctcgccccgccaggccgtctgcctcacccgccacctcaccgccttcggcgccagcctcttcgtgcccccaagccatgtccgctttgtgtttcctgtgagtgaccctgtgctcctgggagcctctgcagagtcgaggagggcctgggtgggctcggctctatcctgagaaggcacagcttgcacgtgacctcctgggcccggcggctgtgtcctcacaggagccgacagcggatgtaaactacatcgtcatgctgacatgtgctgtgtgcctggtgacctacatggtcatggccgccatcctgcacaagctggaccagttggatgccagccggggccgcgccatccctttctgtgggcagcggggccgcttcaagtacgagatcctcgtcaagac

SEQ ID NO: 81832 - DNA, 1046 bp, Homo sapiens
ttgcagagggctcatcccgggccccagagataaatcccagtgaccctgaagcagcaccccgaccttccgctcccagcagccacacccaccgggccctctccggcgtctgctttccacaatgcagcccccgcccaggagggcccatgtgcttaccctgttttgcccatgaagaaacagctcagtgttgtgggtcagtgcccgcatcacacagcgtctagcacgtaactgcaccccgggagtcgtgggcatctgctggcctcctgccggcctcctgcgctgctgacagcttgctgtgccccctgcctgccccagtacgagcgggccctggacgtggcggcagagcccaagcacgagcggcagcaccgagcccagatacgcaagaacatcacggagactctggtgtccctgagggtccacactgtggatgacatccagcagatcgctgctgcgctggcccagtgcatggtaggatggccccacctgctcaccctgccccgcatgcctgccagggcactgggttcagccccccagggcagacgggcagcttggccgaggagctgagcctccagcctgggctccttcctgccatggcgttcctcggtctctgacctgcttcagtagcctcagccgttctgtcctgtgtgaacgcagggtgcctctcgggggacccagggtgtaaagaggggcccagatgtggggagggactaagaagatgctgctctgtgccctccactctcccctcccctcccctcccccttccctcccctagcccctcccctcctcccctcccctagcccttcccctcctcccctcccctagccctttcccttcttcccccccagcccttcccctcctcccctcccctttttctccactcccctctcctctctcccctcctcctccgctctcatgtgaagaggtgccttgtgtggtcggtgggctgcatcacgtggtccccaggtggaggccctgggtcatgcagagccacagaaaatgcttagtgaggaggctgtgggggtccagtcaagtgggctctccagctgcag

SEQ ID NO: 81833 - DNA, 2473 bp, Homo sapiens
ccacctgggctcactgacgcctgtccctgcagctgacggcctccaaccacgtgagcaacgtcaccgtgaactacaacgtaaccgtggagcggatgaacaggatgcagggtctgcaggtctccacagtgccggccgtgctgtcccccaatgccacgctagcactgacggcgggcgtgctggtggactcggccgtggaggtggccttcctgtgagtgactcgggggccggtttggggtgggcaccaggctcttgtcccagccccagcctcagccgagggacccccacatcacggggttgcttttctgagcctcggtttccctgtctgttgggaggtaactgggtgcacaggagccctgaggctgcacgggagccgggagaggcctcagcacagccgggtgggccctgaatggaggcccggggcgtgactgcagagtggagcctcggctgggtcccaagcaccccctgccccgccaccgcccacccctgtcccggttcactcactgcgtcccaccgccccggcaggtggacctttggggatggggagcaggccctccaccagttccagcctccgtacaacgagtccttcccggttccagacccctcggtggcccaggtgctggtggagcacaatgtcatgcacacctacgctgccccaggtgagggatgagggggtgagggggccactgcctttcaggctctgagcacggggtccccccagctccccagtcaagctgccccccttcctccccaacagccctcactgtgacctcacctgggctgatggcttaggcccctactggggtgagggaggggccaggcgtggggggagtggacagggaagctgggcccctgaactgcgccccccgccctccccgggcctggctcttgctgctctgctgccccgagtgcagctgcacttggaggcggtgccgtcctcgccaggcagccctcagtgctgctacacctgtgctccgtcccgcacgtggcttgggagcctgggacccttaaggctgggccgcaggtgcagccgttcaccccgggctcctcaggcggggggcttctgccgagcgggtggggagcaggtgggggtgccgcggctgccccactcgggcctgtccccacaggtgagtacctcctgaccgtgctggcatctaatgccttcgagaacctgacgcagcaggtgcctgtgagcgtgcgcgcctccctgccctccgtggctgtgggtgtgagtgacggcgtcctggtggccggccggcccgtcaccttctacccgcacccgctgccctcgcctgggggtgttctttacacgtgggacttcggggacggctcccctgtcctgacccagagccagccggctgccaaccacacctatgcctcgaggggcacctaccacgtgcgcctggaggtcaacaacacggtgagcggtgcggcggcccaggcggatgtgcgcgtctttgaggagctccgcggactcagcgtggacatgagcctggccgtggagcagggcgcccccgtggtggtcagcgccgcggtgcagacgggcgacaacatcacgtggaccttcgacatgggggacggcaccgtgctgtcgggcccggaggcaacagtggagcatgtgtacctgcgggcacagaactgcacagtgaccgtgggtgcggccagccccgccggccacctggcccggagcctgcacgtgctggtcttcgtcctggaggtgctgcgcgttgaacccgccgcctgcatccccacgcagcctgacgcgcggctcacggcctacgtcaccgggaacccggcccactacctcttcgactggaccttcggggatggctcctccaacacgaccgtgcgggggtgcccgacggtgacacacaacttcacgcggagcggcacgttccccctggcgctggtgctgtccagccgcgtgaacagggcgcattacttcaccagcatctgcgtggagccagaggtgggcaacgtcaccctgcagccagagaggcagtttgtgcagctcggggacgaggcctggctggtggcatgtgcctggcccccgttcccctaccgctacacctgggactttggcaccgaggaagccgcccccacccgtgccaggggccctgaggtgacgttcatctaccgagacccaggctcctatcttgtgacagtcaccgcgtccaacaacatctctgctgccaatgactcagccctggtggaggtgcaggagcccgtgctggtcaccagcatcaaggtcaatggctcccttgggctggagctgcagcagccgtacctgttctctgctgtgggccgtgggcgccccgccagctacctgtgggatctgggggacggtgggtggctcgagggtccggaggtcacccacgcttacaacagcacaggtgacttcaccgttagggtggccggctggaatgaggtgagccgcagcgaggcctggctcaatgtgacggtgaagcggcgcgtg

SEQ ID NO: 81834 - DNA, 1009 bp, Homo sapiens
acagcgccagccgggccaacctcagcctgcgggtgacggcggaggagcccatctgtggcctccgcgccacgcccagccccgaggcccgtgtactgcagggagtcctagtggtgagtatggccgaggctccaccaccagcccccaggcaggtgcctgcagacagggtgctcacacagggcgtgaggcctggcttcccagtgagggcagcagcccagttactggggacgtcggccccgggcaggtcctgctggctggctcctcgggctacctggtgggctttaaattcctggaaagtcacggctctgacagtggctccgctaactcattccactgtctcatttcacaaaatgaatttaaaactctgctccctgacctcacacgagcccccgtgagtctctcacgccctctgctgtgttctcgcctggctaaagcgagtggcttttgaggtggagtctgaacccctgatgggaaactgcgggctgcccgcggtgccaccatgctgggtacatgggggacagggctgtctccatcttgcgggtacctgcctcttcaccaggggccttgggaggggccatcagaaatggcgtgacctgtgcagcctgtcctgggttctgtaagccagtgtaggtgcctcccctcactgctccgagctctctgggtgaggagctggggcaagagcgccgggagggtctgagaagactcagagagaggtggactctttgtagctggtactaggtttgctttacagatggggaaactgaggcacagagaggttgaggcattagtagtactacatggctggctggagagccggacagtgagtgtcccagcccgggcttggctcccatggcatgcagagccccgggcacctcctctcctctgtgccccgcgtgggactctccagcccgacgggaggtgtgtccaggaggcgacaggctaagggcagagtcctccacagagcccaggctgacaccattccccccgcagaggtacagccccgtggtggagg

SEQ ID NO: 81835 - DNA, 1063 bp, Homo sapiens
gggcctggctccctggctggccagcctctgcttggcatccccttgctggacagtggctgtggtgagtgccggtgggtggggccagctctgtccttcccagccaggtgggacctgggccctgcagacactgggcagggctcaggaaggcctctctggggggggcctccgggccaagggaacagcatgggagcctgtgagtgcggcgggcggatgtgggggcgtggggtggagccaggaggagcagaacccggggtccagtggctgcctcttctaggtgaggagtatgtcgcctgcctccctgacaacagctcaggcaccgtggcagcagtgtccttttcagctgcccacgaaggcctgcttcagccagaggcctgcagcgccttctgcttctccaccggccagggcctcgcagccctctcggagcagggctggtgcctgtgtggggcggcccagccctccagtgcctcctttgcctgcctgtccctctgctccggccccccgccacctcctgcccccacctgtaggggccccaccctcctccagcacgtcttccctgcctccccaggggccaccctggtggggccccacggacctctggcctctggccagctagcagccttccacatcgctgccccgctccctgtcactgccacacgctgggacttcggagacggctccgccgaggtggatgccgctgggccggctgcctcgcatcgctatgtgctgcctgggcgctatcacgtgacggccgtgctggccctgggggccggctcagccctgctggggacagacgtgcaggtggaagcggcacctgccgccctggagctcgtgtgcccgtcctcggtgcagagtgacgagagcctcgacctcagcatccagaaccgcggtggttcaggcctggaggccgcctacagcatcgtggccctgggcgaggagccggcccgaggtgagtgtctgctgcccactccccttcctccccagggccatccagatggggcagagcctggtacccccgtcttgggcccacactgaccgttgacaccctcgttcccaccggtctcca

SEQ ID NO: 81836 - DNA, 1041 bp, Homo sapiens
acacacctgggacttccttctccacccagtggtgccccagcagccgctaaggagcccgctgggtcccacgctaggatggtcctaactcctcccgccttccagatcggacgctcggcgctggggaccccttgtgtcccggggctggggcaccgtcctgccccccatgggggtgtactcctcccgacaagcttggcttcagcttccctgggagcacatcctggccctcgggcacccatcaggctgtccctgtgcacctggctcccacccttccagctcatagcaggaactggggtgaggagtgcgtggggcagcaagggcctgggaccccagaggaccctgcactctgctctgtgctcttgcctgggcttagggccgctcggtggtcctgctgccagatgcctgggccctgctgtgtcccccatccttgcagggaaccagaacgtgggggcagggcatcagacagcggcgatgatgtcacctggcgggtgcagaggaagcccgaggggcggggtgggggggctggcgcgaggctgcctggctaggccttggcgttcccccagaacggcgatggcaaaagcagatggagacgtgaaaaagtacgggagcaagcgaggtgaggactccacggggacccctgtgctgttccctgtccctgaagcccacacctgagtcctgcccagggcagatgcttccacacccagggggcacctgagtcctacccagggcagacgcttccacaccctgggggctgggggactgcacctggctcctgtctgggccccagcttcattccactgccctgggccctgggagctcggccgagcggggtccccaagaccttgctgcatttctgggccttgggctggggtgagggccgggagaaggagccagcctggagcctggcacgcagggagtgcatggccagaaccggtgacaggcagggctgcctgctggcgtggaagaagtgtccatggcacccccaggcctggttcacagtgggatgggcggggagccggggggctctggggtcctcggctgacc

SEQ ID NO: 81837 - DNA, 2606 bp, Homo sapiens
gccgcgggacgggcgggcgtgggcgcgttccctggcccgggacgggaagcaggacgcgggccaggacgctcccagggcgaggctccggcgcggcacggcggccctgctaaataaggaacgcctggagccgcggttggcacggccccggggagccgaaaaaccccgggtctggagacagacgtcccacccgggggctctgcagacgccagcgggggcggggcgcggaggccgcgctcagctgggaggacaaacagtcgctaattggagaggaattgggatgcggcctggggctgcggggtacccggagaggtggggatggctgtagggggcggcagggaagagttccaggaggtgtctggaaaaggatttgatggatgtgcaagaattgggctgatgcttaggaaggggcgatgaggtgggtccagaagaaggggggtgaacggtgtgagcaaagaccgtgaggctggaggctggccacgggaggtgtgaggggtaggggcagggtgggaggtgggctcgcgggtgggctggggtcatgaagggcctcaggcgctctgctattgggttccaaggctatcctgagaacaggggtgaggggggattgccgtggggggttaaagccttgtcatgttcgctttcgggagataaaaacaacaggtggcctttatggagacgctgcccagagccaggtctgtgccaggctcctgttgggggtcgtcatgcggaatcctgactctgaccatccgaggcatagggaccgtggagatttgcatttcacagatgaggaaacaggtttggagaggtgacacgacctgtcccaggcatcacagccgggatgtgcatagcaggggtttggaactatgaggtgcccaggacccagggttggattgaaaagggcggaggggactaagataagcagacagttgtccccagcgctggggagagtcttgggaccagtctgatgccttgtatttcccaggctccaggctcctcgccgggacagtgtctccttgggtgcgtgctggatccctgggggacgtggcacatccccaggcttgctaaacattgggtgggttctggcatttggttttgtaacgtttctgggtcactcccgcctgtggccacccttccttaggggagccgtgtgtccttggggctttgctgggtggtctcgagggtgggagaagaatgggttctcctggaccaatggagcccgtgcccctcggggccacattgctcctgcgctccctgactgcggacgcgtgtgtctcgcggctgtctctgtggagatggcctcctcctgcctggcaacagcacccacagaattgcatcagacctaccccacccgttgtttgtgatgctgtagctgagggctcctctgtctgccaggccggtcactggggactctgtccagggcctggtggttcctgcttcccagcacctgatggtgtccatgagagcagcccctcaggagctgtccgggagagaagggcgctggtggctgctgagcggagagcaaggcccgtgttctccaggcccttggcacagcagtggagcccccgcccctgccttgtgttgtcctcttaggctctggtcctggggtttggaggagggggaccctgggagttggtggcctgtcccagcctgagctggcaagattccgaatgccaggccccccaagtgtgcaacagggcacagggtgacctcatgtgggcaggtgggtgctgttctgtacacacctggggccgccgctgggagagttctggaaggtggggtgaggggacccatggcaaactagggccttaggaaggatgtgaaggccctggctggccccccaggccaccctctgtgctgtggggcagcccagccattttgctgtctaccctgcaaactcctcctcggggagacggctgggttttccccagggaagaggggtcaagctgggagaggtgaaggacacagatcacagctgctggcaggtgttcaagggtccaagagcgttgctgtctgggtgtcaccagtagccttcctggggggctcacgcaggtgcctctccacttgtggctccctggctgctgaagctcagcagggacagctgtgtccagttccaggtggaggacagccggggcttctgaggccacagcctgccttgggttaatgatgctgccgagaggtggtggcttttggaaaagatggcgtactgcaaaacgtgctgctctgcgtggctcgaagcttcgtggggagacgtgggcagagccgtggctgactcacagaccccccaccccagagcctgccctgccctccctgccccgacccttctccctcctgacccatgtgttttttttttttttttttttttttgagacagagttcactcttgttgccaaggctggagtgcaatggcacgatctcggctcatggcaacctccgcctcctgggttcaagcgctttttcctgcctcagcctcccgagtagctgggattacaggcgtgcaccaccatgcctggctaattttgtatttttagtagagacagggtttctccatattggtcaggctggtcttgaactcctgacctcagatgatccgcccgcctcggcctcccaaa

SEQ ID NO: 81838 - DNA, 1050 bp, Homo sapiens
agatccacgagtacgcccagcacgacgtggcgctcatgctgctggggaacaaggtgggaggcccggctgtcctcacctgggccacagggcagggcaggtgagggggcaggggccaaccatgggccagctttcaccaagaccctgtgcctgggccaggtggactctgcccatgagcgtgtggtgaagagggaggacggggagaagctggccaaggtgagtcagggcaggggggtggtgagggggtgcccctggaggctgcgagcctaggctgtccccgccaggccaccacctggctggcagcagctgtttacaggagtatggactgcccttcatggagaccagcgccaagacgggcctcaacgtggacttggccttcacagccatagcaaagtaagtcctgccagtcaccaggactcccccagcccagggcctgaatcctcattagagtccaggccatcgtgtccccttgtcacccccactccgcagggagttgaagcagcgctccatgaaggctcccagcgagccgcgcttccggctgcatgattacgttaagagggagggtcgaggggcctcctgctgccgcccttgaacctggctgagctcagtcctctggaggaagccgtccagtccctagaaggctggacagagggtctccaggcccttctgactttgttgcccagtggccaacgcccgagtgtctgttttcaggagccccaggtcaagccttgtcccttcctcctcccagcaacagtcccaacaagcaggcttctgagagcccgtggccgcacactggccgccacggaaaagcagtcttctgcacgggacggggagcggcaagtggacagactttgccacggtgctctgctgccccctcctgggcacgtccaggtgagggagggctggggctggcaccacgcacagtgcctaaccctagaaaagccatgtcttcagccgcacatgctcaggcagctaagggaggacgcctgcccacgcctgggacagaaggcttcactgctaatcacatcgtgcatctgtgtgtcctgggagctg

SEQ ID NO: 81839 - DNA, 2207 bp, Homo sapiens
ccgggaaagggactagacgcgcgagccggaagcgccaggccgctgcgcccgccgggacgtgtagttccccgcctctccgggcccggacggctgcctcacgcgccgcacttccgaaactacgacttccggcggcctcgtcgtcgcggggcgggaatggcagcttcagaatcactctatgttgcagatcgaagtctgattggctttgttcatccgtcactcaccgttaggcttcacggactctgcataagggaggagcttcgggtctgggtctgagagaccgtctccaaaagaaatgccacggtacgattggtggaaacaacgcggcagggagcggagcgtaccagcggcgggggaaggcgggcacttccgccaggatagcccaatgacagaggtgggacagtttctataaaagcttgagcctcgcccgcccctgtcttttcggggtcgagtccgagggggaagaggtttgttaatacgttcgccatgtgctacgatcttgggacgaactgagccacgagcgtggctttgagggccgtccgaacgctgcaggccggccaggtccctgggcgtccaggcctggcctacgcaccactttgtcccttagcgtttaaaggtttcttcccgaatctcaggccctcagctacctgcaggtaagactgggccgggcttgggttcccttattctcccagtctgtgatgaattgctttgacttctgacacctcgtatgaaaactgcacgtgcagtctgattatttagcaagactgaggcttgagggtgcgcactcctgacggggagctgagagtggaaacaggtgttgcccgaaacgaaggagtggggacttaatgtctgtattttggcgctgactttcaggtttcgtcgcgagccggctgcaagttttgaacctaagtaaacctcaatccggagggcctagcggtaaggtgggcgctgtgtctattgaagtgcttagcaataaagaaaggtagtgagttgattcggttttctctcaagtgtctttattttcctattctggcaccccagaggtctggctgatccacaggcaatcttggaaaagggtacagacatgaaaacggaagctcgttaccagtgacttttcatctcttgggattgccttctccatttctgcccgtgattttttttttttttttttgagacggagttttgctcgtttcccaggcgggagtgcgatggcacaacctccacctcaagcgattttcctgcctgagcctcccaaatggctggaattacaggcgcccaccaccacgcccggctaattttgtatttttagtagagacggggtttctccgtgttaggctggtctcaaactcctgacctcaggtgatctgcccacctcagcctcccaaagtgctgggatcacaggtgtgagccaccacgcccagtcaaatactgtttttcatgccttttgccccagggtgagtccaaaaaggcttttgagatttgtggagggaagttgacaccacctagggttcccatgtgcctccttagggaggcagccatgggccatggaggaatggtagccacacacctgctgagggttctgggccttgctgagtctctcaaactccagcatcctgctctagaagtggatttttttcaacagatgagacagacgctccagaaaacacaactttattcactaggactgaaaacaaaggcttgtgcaatcaaaaggccaagttgagtgcaaggtggagcgtgctcggaaatcacagacctcacctgtggccaggccgggctggcagttgttgtttctggtgttttctgtgatttcccacattttatcacaaggccacaggcatcctccaaggtcagtgaggaagaccctattgctgtttgagccagagcctcctagagggtgggccgggagcaggcagctcccaggacacacagatgcacgatgtgattagcagtgaagccttctgtcccaggcgtgggcaggcgtcctcccttagctgcctgagcatgtgcggctgaagacatggcttttctagggttaggcactgtgcgtggtgccagccccagccctccctcacctggacgtgcccaggagggggcagcagagcaccgtggcaaagtctgtccacttgccgctccccgtcccgtgcagaagactgcttttccgtggcggccagtgtgcggccacgggctctcagaagcctgcttgttgg

SEQ ID NO: 81840 - DNA, 1794 bp, Homo sapiens
gcaggtgaaaggggaaagcgggcactggaggctggggctggtcacgtgtagacccggacaccctcacccggctggaggaagccggctgcctggaaactcggggtggaggtgacccaaccccagaagcacccaggtgggaagtagggggcagcgacgcagagggccaggactgagggccgtgggacggtgtgggaaaggaggtggcagtgcggtggcacgctggcatgagggcgctgggtgactgagggggtcagtggtctctgccctcacattcctgttgcctcttcgggcccatgtatggccagtgtttatgtcagctccctgctgctgcagggcagaaggaaggagggagcccgggagaccgagccacacaggaagcaaatgagaacacagcgtgggactgggaagcgtgggctcggcgggggggggggggacactgccacccttggctcttgggcaaagctcacgacctgtttctgagagtctgaggcccacttgacttgggtgagagccaggaacgcactccccagcccagagctgtgaagctggggtctcttcctgtgccccaggatactctccccactctggatcccagcagcctcatcctccaggaagccctctggacttcccctcgactgggccaggtccccacacaatagacagccatgagatacaggggaaaaaaggactgagagatgttgccagcccccaaggggtcggaggggcagcaaaaggcatccttactgtgaagttggggtaaagccttggccgagctgtggggaccccctccctggagcagagggagatacggacgctggagaggcttggccagggcaagacaggcctggaggctgagtggatgcagtaggagcagagctgggggaggagttcagaggcctctgcagagctggggctgtgggtgttgggggcagggacaggcaagggggttcgccgtgctaggagggaagcggggccaagccggcctcagaccagggcctgctggggttctgaggggatcctaaggaccaaggctggcagaggccggggcaccccaggagccttcgacgtcacaccctgcctatttgggatggaaaaaacgttctaagggacgtcagggaacagcggcggaagtgcgtgtggctttgctatggcaaccaggcctgtttctatagaatttagcggcctgggcttgggccagggggctgaggcaggggctgggctggggcgggcagtctgtgggtgccctgggcaggctctgtgatgccaggggccacgctcggagctctggccgcagtccagccagccggccacacacagccctgtggcaggcggggcggaggcttctggagccgtcccaggctcctcccagggcagttgcaggcctcacaggcacacccacccatggcttgcgccccacacatgttcaggggacccccacaccccacctgctccgggttgctggaggagctgctttaaggccgggcctggcccgagcagggagctgcatctggaagcccccatctcccccactcagcagggccccccaggctgctgccaagtgggcggggacccctgacccagaccccctccaggtgtgtctccagggaaaggggtgggtgtccgcatcccacatgcccccagggcgatgccccagcagagccctctaagcccagcttgtgggagctagggaggggctcctgagggatttgccgaagaggggctggggtggaggcagcgaggcgctgaggaagacttccacttccttattgcacagtgggtgcccccagggccccg

SEQ ID NO: 81841 - DNA, 1049 bp, Homo sapiens
caacctcagcttccccctctgtgagtggaggctgtcagggaactcacctggcagaggtgcctcaagaggcaaataaaatggcacccccagctgctgccaggcggccttcagagtgatggctgcgtgctggccatgagcctcagctggctcaattggggtgctggggagcttgtagaggccctgaaagaagaccctgcctggggtaggcagggctggggcaggggctaccgggctcagcgctgggactgtccagatgtagaccgagcccagcgtccatgctcctggcactggtttgaccttgagagggaacccaagcttcccccgtgccatccctgcatgctttcctgcctgcctggccctggggagggctgtgagctacaggggacccacagggtcgggtatccagcatgggccccacctcccccacatctgctgagggagcccccactgagacgccagccctcttgccttgcagctgacgggaccagcacctacaagcagcactgcaggacaccctcctcctccagcacccttgcctactccccgcgggacgaggaggacagcatggtaggtccctacccccaggagcccgtgtgagcctcagcctccccccatcctccctcctgggggaaccaggtcccaggaggagttgacagtgagctggtgaggcacaggagaagaagagcacctgtggataccctgaggcctcggcagacatggcaagtctgtgagaaaggaggctcctgtggctggactgtgggtggcagggggcagccagtgagggcagctgggtcagagggcctggcacctgcaggccaggatgaggcatatttggctccatcttaagggaggtggaaaccacagaaagttcagtcaggaggatagcacaataaaatacatgctttgaaagcttcctttgctgctgggtagggaatgagcggggttgctgggtccaggcagggtttgaggaggggtcctgatgaggcggggggaaaggtgtgtggacctaagctgtggggacaccagaggcaatggggtgggggttgcgg

SEQ ID NO: 81842 - DNA, 4118 bp, Homo sapiens
tggggctccctctgctgctgtggggccttgtgactcactttctctgactcccttctgttccccatgtgctgcttccatgcagacgggcccttgggacccaaagggaggtgggtacatggcacacaatgccccccgccggccttgggactggtttgcctctgtgctctgtgggtttcatacccaggctgccgggaagggggccagaggctcggcagagcagcagctgggcccctctgcagtcaaagcaccaggagagaagccttgggcagtgtggctcttggaaacttctggaggtttccaggccagaggggaggaagggacagtgtctgcccctcccccaggctcccttgtcggtggctcagccagaggcaggcacctgtggccctcactcctgccctcgggaagctcagccgaggttctctgggggcctggccctgccttccctctgagcctcccagctgggcctggtgtcccccaccagcaaggccagacaagcagccaggcccggggggcacctggagcccagccgtcgctccctgccagcattcctggcccttccatcctgcggtcacggcctcggctgtccaggattggctggtggaggtgccccctcacggcccacattcccccacgggaagcaggaagcagcccgggtatatggaattgaatagcaggaagtctctccatttacacaaagagaggtggcaggcgtgagcgggcagcccagcaccccggcccaggccgcccaggcgggcaggcagggacctgggttgcatcagctccccacgcccacccacggcccccgtggacgaggagagtacccgcagggaccggggtggccccaggggtgctgctgccctcgcgcttccgccgggctgggtcctgtcctccccgaggctctgaccccgtgcggagccccccgacaggcgcctctccctccacacagccccccatcagcactccccgccgctccgactccgccatctctgtccgctccctgcactcagagtccagcatgtctctgcgctccacattctcactgcccgaggaggaggaggagccggtaggtgtgggggactcggcgcagagcggcttccagggctgtcaccgcagccgtggcacggaggcaccttcccctccgccatgcccgcccagctcacagggagagggcggctggggcctgacgggaactgcagtgcttgctggtccgtggtggggactcgagggaccaggccgggtcccctgggcatgttcccccactcccccttctcagggctgcccgggaactggcagcgggaagcacagggctccagcagggccctttctagtctcaccccaggaaggaggcgggcgagggcggccaaggctgggcggctgaactcatcctccggggttgggccctgcctctggggccacagacctcgctctccctcctgggccccgatcaagccccccagctctaagcaggcctctctcaggacgtgaccctgtcctcagaggacagccaggcctggagcaagagcgcctgggtgcctgggtggtggcggggctgagggtggcctcccgccatcgcctgcctttcccgcttggttccaggagccactggtgtttgcggagcagccctcggtgaagctgtgctgtcagctctgctgcagcgtcttcaaagaccccgtgatcaccacgtgtggggtgagcccgccgcccttcccagcccccctgctgccagaggcccccacaggaccccagggctctcgggggccggggctgtggcgccctggccttggtcaaggcctgtcctggctgcactgggcttggggtacagcgaggcctgtggctgccatggccatggactagggaaaaagaggaccctgcgccaccctcaagcccgccctttgcctccacagcacacgttctgtaggagatgcgccttgaagtcaggtaggtttgtgccccggcccaggcctgacgccgaccgtgcccatggctgccgagcagaggcgggcggcttctcccttgtcccctgcacagcgtccggccctgtttggcctctgctggggttgggatggggctgcagccgtcctagggacgctcaggctgaggctcgggacctccatgagcagagtggggacaccccaaattccagtgtgtccagactcagagaccccacagtgggtgtgggccgaggctccccatgccagggttggcaccctctggggaggcctttctcactggcgaggctgtcgtcctcccgcacggcgcccgctcctgcctgcctctccgcactctgccctctgccctcttggccccaccccacacttttccgggcacagctgagtgtcacaggtgacactccctcagcacctgctgctccttcttggtggcccacctgtgcccccgttcccatgttgcgtgcctcagaggcgcagatggacagatctggcccccattagaggctcatgcccacccgggtgagggagcgtgtgccaggcaggccgtgagggtcagcacgccctcctctcccagagaagtgtcccgtggacaacgtcaaactgaccgtggtggtgaacaacatcgcggtggccgagcagatcggggagctcttcatccactgccggcacggctgccgggtagcgggcagcgggaagccccccatctttgaggtggacccccgagggtgccccttcaccatcaagctcagcgcccggaagtaagtgcccctccctgggcacctctgcctccctgggggctgcttctcagggctctggctgaggcctccccgcatcccgccctggcacagggaccacgagggcagctgtgactacaggcctgtgcggtgtcccaacaaccccagctgccccccgctgctcaggatgaacctggaggcccacctcaaggagtgcgagcacatcaaatgcccccactccaagtacgggtgagtggggggcgggcgggggtgggccggggtgggcgcaggccctccacaggctccgctgagagctgcccgcttgctggtcccggggaggtaggccggagctggggccacaccggggtctgtaatcctctctgaggcccaaggccctggaaacccagagggggagccgagggcgtccaggaaggcgggcgtggacgctcccgcagccggcccagcatgggcggatttgagcaaatgctggggttgagagctttggagagggaggtgggggtgggaggagaggcaggagcccagttcttcagggcagggaggtgggcagggaggctgccaagcagcgtgggttttatcctcaggaagggaggaccccttgaagagctctgcgggggtgacgtgatgggatctcacttgtgaagcagactgggggtagctggatggggaggaggggcaggacggcaggtgtgggtgggggcagctggacctggggtgcagcggccacagggctggagcatttgagggggattcttggggatggggaggcaccggcagggacccgccaggcaggcagctgtcctgtccccgcaggtgcacgttcatcgggaaccaggacacttacgagacccacctggagacttgccgcttcgagggcctgaaggagtttctgcagcagacggatgaccgcttccacgagatgcacgtggctctggcccagaaggaccaggagatcgccttcctgcgctccatgctgggaaagctctcggagaagatcgaccagctagagaagagcctggagctcaagtttggtgagggtgggcaccggggcaggcaggggcctggccactgctccgggcaccagtgacaccccctctcctcctgctactcagacgtcctggacgaaaaccagagcaagctcagcgaggacctcatggagttccggcgggacgcatccatgttaaatgtgagcgggcggggctggaggggctgggttgtgagacccggggaggccggcggccccggcagggaggcctcccctggccttgcctacactagtcaagatcaggggtcttgtgtgtggcaggggctgctgtcacccctgcccacccctggcccagggcagcaggggcagagaggctgcactggccccacagcagccctgcccacctgccctctgccctgcccttggccctgc

SEQ ID NO: 81843 - DNA, 1026 bp, Homo sapiens
gagcatctctcacgcacacgcttacttgctcgctcccacaaagcctcacgataggagacaggaggcaggcgggccacctggaggcaagaaagtggccaaggtagttgctccgtagtctctatgccctgggctttggctgcaggcaggggagagctgagctcctgccttcaccccctaaggtcccccctatcttctggttgcgcaaggtgcacctgggccaggacaaggttctgctgggaggctggctgcgccaggtattgggaacacacaactttggagatggtgtaggccacacaagggcccacacactgctacccaggaaacagtgctgctccgggtggagggtgccctataggtggggcacacacatagctacacaggctcgagctcatggctcacggcccacggggtggcagcgccacgtctcctgtcctgggaatcactgatcacacatgtgcctggactcacccctggatgcagagagccagcacgatgccatcatggccctccagtgtcttctgacacttgtaggtggtacatgtgtcccacacctgcagagaccagggccacagtgggtcccagcaaggtcagcccagtgtcaaggggcagcatgacaggaatgagtgagggagccccgcccatgggagagggccctgcccagaaggtcccacccataggcaggctggcagtgccaggcatgtggcagtgcccagcccagccaggctgcagagactgaggtaggaccctgcccaccttgatggtcttgtcagaggagccactgaagagcaggtcacccatggagtagacgcagagacaccacacagggccctggtggcccacaaaggtccctttgcacttgaagatctgctgagggtcgtaggctgcagagatgggagcagtgggtgaaggcccagttggggcccgggggggagggtgggcgggagccacggcgggtccatactcacagcctaggatgcccatgttcagccgcgcgttgatgtgggacagctcgtcctgcagggccaa

SEQ ID NO: 81844 - DNA, 1072 bp, Homo sapiens
ggctcccgcccaccctcccccccgggccccaactgggccttcacccactgctcccatctctgcagcctacgaccctcagcagatcttcaagtgcaaagggacctttgtgggccaccagggccctgtgtggtgtctctgcgtctactccatgggtgacctgctcttcagtggctcctctgacaagaccatcaaggtgggcagggtcctacctcagtctctgcagcctggctgggctgggcactgccacatgcctggcactgccagcctgcctatgggtgggaccttctgggcagggccctctcccatgggcggggctccctcactcattcctgtcatgctgccccttgacactgggctgaccttgctgggacccactgtggccctggtctctgcaggtgtgggacacatgtaccacctacaagtgtcagaagacactggagggccatgatggcatcgtgctggctctctgcatccaggggtgagtccaggcacatgtgtgatcagtgattcccaggacaggagacgtggcgctgccaccccgtgggccgtgagccatgagctcgagcctgtgtagctatgtgtgtgccccacctatagggcaccctccacccggagcagcactgtttcctgggtagcagtgtgtgggcccttgtgtggcctacaccatctccaaagttgtgtgttcccaatacctggcgcagccagcctcccagcagaaccttgtcctggcccaggtgcaccttgcgcaaccagaagataggggggaccttagggggtgaaggcaggagctcagctctcccctgcctgcagccaaagcccagggcatagagactacggagcaactaccttggccactttcttgcctccaggtggcccgcctgcctcctgtctcctatcgtgaggctttgtgggagcgagcaagtaagcgtgtgcgtgagagatgctcgctttcaggaggcggcagcttgactgccagcagccggccctgggactgactcagggctgacgggtgggtaattacctcccagctcgctgtcaaatgctttccaggcaggcatcaggggctggcccg

SEQ ID NO: 81845 - DNA, 1043 bp, Homo sapiens
tgaagcacctggcctgggaccaactggcccacgattactcatagatctgggacatccgaacccttgactgcatccacgtcctgcagacgtctggtggcagcgtctactccattgctgtgacaaatcaccacattgtctgtggcacctacgagaacctcatccacgtaaggcctgggcatctgggtgcaaggccagactgtggccccgtctcccccgccttgctcagtgtctttgacctgcctgtgcccacccctcccaggtgtgggacattgagtccaaggagcaggtgcggaccctcacgggccacgtgggcaccgtgtatgccctggcggtcatctcgacgccagaccagaccaaagtcttcagtgcatcctacgaccggtccctcagggtgcgtgctggcccagcggtggcaggaggctcagagggctggcagctgagctccggcgggccctcacgtcccatgtgcccccaggtctggagtatggacaacatgatctgcacgcagaccctgctgcgtcaccagggcagtgtcaccgcgctggctgtgtcccggggccgactcttctcaggggctgtggatagcactgtgaaggtcagtgcccgtggctcaggccattcaaaggggctgcacaggatggagcgggggtggggacgaggagctggcagccccagcacaaagtggtggagggcaggtacgtgtggcaggtgtggctggggcagggcagccggccgcaggacatcctggtgaagcagccctttctctgcaggtttggacttgctaacaggatccaggccaggctgtggtttcccctgaaccagccctggacctttctgagccaggctggccacatggggtggtctcggggtttctgcctgccccgtgggcataggtggacaggctctggcagccgggcagtgccctccccgtcccatgctcggcgagcctccctctactcggcactgtccttgctgcccagcccctctctgggtgccaggtacgacgcttgccccggcccaccctccatccccaccctccatcc

SEQ ID NO: 81846 - DNA, 1048 bp, Homo sapiens
aaacaaaaaggtataactttaacaaatatatatttaaagaaagaaatattattgattctatagaaaaccatttaccaactgaaaggacacgaagtctagctccggacaaaagctgttagaggcccaggctgtctgcctgcggtccttcctccggccagagtggaggccccaggctgctagcacaggtggaaggctggggcccgggggcgggtgctctgccgggggctcctccgtgcttctctcctaagttctctgcgccccaagaactcgaggttgtgccttgctctcggcggccgtgtcctcctcctggcgtggctgcgtcccagggcgcgggtgggtttggtgaatgtgggtgtgtcagcgtggcagccacgtggaagcagggcatgtagcaggccaggccacgggcttgcagctcctctgagggtgtgcctggccccctctccaggggctgtgcaggcagcccatccaccccagtggagttcccacggacgcttctgctcatggtccaaggctgtgttgtgtggtcattctcgccctcccttttcctctctcctcctgccccctccaagaagtactgactggtctcctctatcgtgtttgctgatccacagtgttgggcacaactttgacgtttcttaaaaaaaaaatttaaaaaatgccgaaaaccagcgattgtggtgtggggcgggtggaggcggctggcggaggtggcgtcccggcgtgcagggccccttcctgctgtctcaccccgtgtttccctgcgagtggacgtgcccagctgtccccccaggcctctcctcagagggcggcacaggctgggctccagcaggtgggcaggggaggtctgggcaaggcgctgccgtcggctgtcaataaacagcaggaaacagaggtgcctggctcactttttgggggcacatgtgttgggggagatgggactggaggccagcagcttgggtgtgacgagttgcctcctagcagggaggggaggccccggagtgggccgaagtcctggggtccaccaaaggaaactgccccatgcccc

SEQ ID NO: 81847 - DNA, 1040 bp, Homo sapiens
ttgtggctgtgtggcatgtgtgtggccctgtgatgtgggtgagaggtcagagtgtgaaacgggatggggtgctggtgcctgtgcacggctgggagcgcagcgtgcaaatcatgtgcgtgttcctgtaccaggtgtggccccatgcgtctgtgtccatgactcgggtgtgtctccccatggtgctgtactcgtggctgcctggccgggtgggaaagtgccttcttctgcccccccgacaagggtgtcctgtggatgtgggcagccgtgcgtgtgtgcgcatgtgtgcgatatgcggcatgcagtgtccggtgcctgagccgaggctctgcctacatttctggtgccaatacctcggcctatccgtttgtcctcctgtctgtctgtgccctgctggcccggtgacccttcctcctccagctccaggtagatgggcagggtgcgggcagccagcccaggtggctcctctgtgtgtctgctctgtaggctaacctggccgtgtggctgtccatgatcggcctggcccagtactacaaggtgttggtggacaatggctacgagaacattgatttcatcaccgacatcacctgggaggacctgcaggagatcggcatcaccaagctgggtgaggccccagccccagccctcgtccccagcccaaccctcagcccaagccccagccaccagccaccagcccagccccagccccgccccagccccaagctgggccccaagcccagcccagccccgcccctagcccggcccctgcccctccgcctcctggtccacctgacctgccccctgcgccccactcagggcaccagaagaagctgatgctcgctgtgaggaagctggcagagctgcagaaggctgaatacgccaagtatgaggggggccccctgcgccggaaggcgccccagtctcttgaagtgatggccatcgagtcgccgcccccgcctgagcccacaccggccgactgccagtcccctaaaatgaccaccttccaggacagcgagctcagtgacgagctgcaggctgccatg

SEQ ID NO: 81848 - DNA, 1053 bp, Homo sapiens
ggcagcgggggtcacgccctacacgcgggctctgaaggcgtcaaggtaggtggggtagtggccagggccagggtggccagggctgggagcaggtgacaagccggggtttctgggttgcagctcctggcaacggtgctttcccagaagtccgtctctgagtccggcccgggggacagccccgccaagcctccggaaggctctgcaggtaagagcaagggtgctgccacgcagcccgatggaggaaagcagcccgacagcccttgtcccccacccactctcgtcctcaggtgtggcccggtcccagcctccagtggcccacgccgggcaggtctatggggagcagccgcccaagaagctggagccagcatcggagggcaaggtacagggcttgggggtgttctcagcgtgggctccggggagaggctgtaaggccgatgggctgatgggtgcttacacggcctgcctggcctggcagcggcggggtcgggggcattgccaggccagaccctctcctctgtctgtcagtctgtgtgttgtgtgtgtgtctgcctgtgtgtacgggtgtcgtcattgtgcaggctgtgcgtgtgggccaacctgtgcctctgtgtgtgcgtgtgtgtgtgtgatggtgggactgcgagctgggcacgcgtgtctgtgtacaggtggaaggggatgggtatgagatggtgcagcgtgtgcatgggcacggcgtatggtgtgtgagtgcactcgtgtgccggagagctgtaagctgctggctgagtcctgcacggtggaggaggcaaggtgcccctgcctgtgggcacagagcccaccttccggtccagcccgaggcccctttcccagagccccctcccaaggggccataccacctgcatccccaagatggcgtggggcgtccctggtgcaggagcaggggacagtcagggaggcgtgtggcggacagtagcagcccccccgcccccctccccccaccggtggagatcccagaagaaggcggaagggtggaggatgctccaggaggcgcctccgggaccgcggactgag

SEQ ID NO: 81849 - DNA, 1016 bp, Homo sapiens
agcctggcccgtccccaatccagtgggctggccaggccacctgcaccagggaggacagctgctggcagggactaataaacccttccacctggccatggtggtggtgttctctatggaccgaggccctgaaacgcgggcagggaggggcagagaacacactagcttgggggtgggcaccagcctcagacccctcagcagctttgggccctcggccgactttcccaggcagtgcaggctagcccagtccaggagtgtgcagcctggcttgggtcgagctctgtcacatctggataagcaactgggggctgagagtcccagggcagcctggcccagcaggtcaaggcgccacagggggccatcaggtccagctggcgcaggccggcaggggagggtctgctctgacctgggtgctgcatgggtccctccagctgccaccacctgcaccaggcagtcccgaggggtcacaggctagcccagcacactgtcattgaaggccaggcagacaacagccttctggtggccgccatactctctcttgatctctccagtctccacacaccagagccgggccaggttgtccgaggaagctggagggggagattgtgcagggctaagagcgcaggtgcaggccaagcaggcggccccagcagaggggaagctgcagccgaggtgggctggctctggaggccagcgccgggggccagggatgggggaggccagggcggggctcaccagtgacgatgtactgggagtcccccgagaaggcgcagccccacatccagccgcgggaggactccccggggttgccgctcttgatgctcagctccgtcatcagggagaagttggacgtcctccagatcttgcacgtctgatcagccgagcaggtggcgaggagcctagtgggtgggcatggggcgtgtccagcagcagccactccatccagcagcccctcccctctccagcccccagcccaggcaggtcccctcccgggccagcaggccctgcacgcacgtgga

SEQ ID NO: 81850 - DNA, 1329 bp, Homo sapiens
actggagagatcaagagagagtatggcggccaccagaaggctgttgtctgcctggccttcaatgacagtgtgctgggctagcctgtgacccctcgggactgcctggtgcaggtggtggcagctggagggacccatgcagcacccaggtcagagcagaccctcccctgccggcctgcgccagctggacctgatggccccctgtggcgccttgacctgctgggccaggctgccctgggactctcagcccccagttgcttatccagatgtgacagagctcgacccaagccaggctgcacactcctggactgggctagcctgcactgcctgggaaagtcggccgagggcccaaagctgctgaggggtctgaggctggtgcccacccccaagctagtgtgttctctgcccctccctgcccgcgtttcagggcctcggtccatagagaacaccaccaccatggccaggtggaagggtttattagtccctgccagcagctgtcctccctggtgcaggtggcctggccagcccactggattggggacgggccaggctgggccaggtcgggggctcagtctgggaggtaataaaagcagaccgacacgcagatgttgctcgggaagcagatgtcgatgcagagataaatcagccgctgtctccggggccctgtggcgagggtgccgtgaatctccaagggctccgcccccagctcctcaaaccatcccgagggcctggccttcccccacagcggtcctgactcaccctctgctcgccgggcccagtagatgggggtcctcatgcacaggcgctgcaccaaagcccccgcctgggcggggtccacttcgaggctcccctgcactgccagcagctcctgggtgtggtgggtgtcctggctggggacccaagcctcttggacctgttgagaaggctctggtgggcggtgggacagggctgctccctgctcctggcttggcagggccgggtaccctccaacccccagtgatgtccccaccctcagctcttgtcagcagcctgggcttagggcggagagagcttcctgttccctgaaaccacagctccagcctgtcccgtactgggctgcacacaggaccctttgtctagcccctggcccgggcctgcgcccagcaggacggctcaccttggaggtatccaccagcagccgcagggtctcccgatcactgtcctccatcaggcggaggaagcagacctggtgctcctcagggcggtaacagatgcagccctggggaggcaggggggtgaggcggggccccccagaccgacacctgccagggtgacccctccctgcccactcac

SEQ ID NO: 81851 - DNA, 1050 bp, Homo sapiens
cgtgctgggcagcccagccctggccgcggagctggaggccgtgggcgtcgccagcgtgggcgtggggcccgagccactgcagggcgagggtcccggcgactggctgcacgcgccgctggagcccgacgtgcgcgcggtggtggtgggctttgacccgcacttcagctacatgaagctcaccaaggccctgcgctacctgcagcagcccggctgcctgctcgtgggcaccaacatggacaaccggcttccgcttgagaacggccgcttcatcgcgggtccgtgcgccctggggcgggaggctggggggcgggcggcgggccccctccctgccctttgacccggtcccctgtgccccgcaggtaccgggtgtctggtccgagccgtggagatggccgcccagcgccaggccgacatcatcgggaagcccagccgcttcattttcgactgcgtgtcccaggaatacggcatcaaccccgagcgcaccgtcatggtgggagaccgcctggacacagacatcctcctaggcgccacctgtggcctgaagaccatcctgaccctcaccggagtctccactctaggggatgtgaagaataatcaggaaagtgactgcgtgtctaagaagaaaatggtccctgacttctatgttgacagcatagccgaccttttgcctgcccttcaaggttaaagattgagtgtctttaatctgcagaataaaaaaaaagaaattgaaaaccagttacccaaattaataggtggggcttaagcatctgctcggctaagtggcttcaaagagtgtaattggagttaagcaaaggcattcattgttaaccttgtaagtacacgtttgggggacgattttgtttacagatgcttgtaatcgaagatgcacttttaggcttggaaggcgttgtgggctgggttctgggccttgggtggggttggcaggggcaggctctgcacctgtccgggattcaggtaaccagggcctgccgatgggactgaggcgggtctaggggtgtgtgtcctgtattttattgaaaaactcattca

SEQ ID NO: 81852 - DNA, 1050 bp, Homo sapiens
tgaaggttctggagctggagctgccggcttggggacagccacatcatcggtgacaggcgagcctatagagacttcacccgtgattcacctggtgacagatgccaagggcaccgtcatccacgaagtccacgtccagatgcaggagctgtccctgggcatgaaagccctggccccagaggtgggggcgacggggggccccggagggctgctctgtcttctgcctgctcggtgccagtctttgttctgggcactggctccaggggtctgagccaggcaggcgagggctgggcttcccacagggagagcagggccagtgggagcgccatgggggtctgagggtttgcacaaggctcctggcgtgcgtctgccccatggggtgggtgctggatgccaggctgcctggccagcctcctctctctgcctcccctgcagccccccgtctcccaggagctcccctgctccagcgagggcagccgtgagaacctgctgcaccaggccatgcagaactccggcatcgtccttgagcgcgctgctggggaggagggtgccctggagccagctcctgctgccgggtccagtccccagcccctggcagtggcagccccgcagctgccggtactggaagtgcagccgctggagacagtaggtgccagcaccacctgcgggctcctcccagggctggatcccaggggctgtccccacgctggccttcgcctccctgaagtggctttctgcagtgactttgtccattgatctgtttactgccttccctggggccacaagggagcctgccagggtggggcccatggttgtgttcttggtactgccagggcacagcctgccccgggtgctggagaccttcctgtggttccccagcaggtggccagcgaggcctcagcggtgcccaggacccacccatgtcctcagtgcagtgagaccttcccgacagcagccaccctggaggcccacaagaggggccacaccggtaggtgatgggtgggtgtgtggcccatggcagtggatgggctataggtggccggggtgcttctg

SEQ ID NO: 81853 - DNA, 1033 bp, Homo sapiens
tcggggtctgggtacaggtaggtgtccacgaccgacaccgcgtctttcctaggagatggggaggacccgctgagcccccgacctgcggccccgcgcgcccctccctgcggcccgcccctcacctgtacacgaacaggtacatctccttgtactggtcccggcccaggggctggctgctcacaaagctgtactcgtgctcggacacgctgcggagacaggggcccgctcagggtcggggcgccgcgccggggcgagatcccggcggggggtcgcgacgaggggccctgcccaccacacctgttgatctgctccatgagcgcggacacggcgctgaggtctgggtctcgcacctcctgcaccagcgcgaggtcatagccagccaggatctggggaggagcggcgggtgcgggggtcagcgcggtcagcacccctaaacgccgccccgccccggcccgggccccaccttcgcgatgatgctgccgcaagcggggtccgacactttgctgtcaccgaagctctgaatgttgaaggctccgatgcgaagcgcggcggtcccggcggcttccagcgcccagagtgcggccagcagagcccggggcccgcccatggcgcggagcgagaggctgggagggacagacgctgccgcctacgcagacccgctgtcagacccaccgacccaccccttccctccgcggccgccccttgacggccagtgcgacgcggaatccgcccctgcgttctgcaggctcccagggcactgctgggctctcagggaccgctgccttctcactgcgcgggaagctgcagccggaatggagggtccggcccatccagccccagctcagggcagccgagagactcaccttggatgtgggtgcagaggcccgaggctcagagatcctagggggatggggatcccgggtccaggctgcgggcgtgtccgacacaggactgcactgactccctctggcagtagctctggcaccaaggcaggggccggtatttgaggtcctgggccagggaggggccgggc

SEQ ID NO: 81854 - DNA, 1068 bp, Homo sapiens
gaacaccttttttttgtagctccagtttaaaggaacactattcttgggggaaaaaaattagcaaatatgcgtagattaacattttagagagtttccaatctgttaaaagcttaaggatcaaattcagttttcttacatagaatacatttggctttttatatgggaatatttcctttaatcatttctgagaaccagaagtttcccagtatttcagcatttttagtttattttgctgagtgactggatttactgaatctatacagtttatttcttaaacacttgtatctcataaccactcatgacgtttatagctatttgtatctggcagaatggttttaaaagcacatggacccttgtgaatagtttcgggtggcattttgtcctcagtgcagcattttgaggcatgtggagtcatctctgctccactccctgctgctgtgactgaggccgctggcactgagaacacagcccacagtgctgtctgggctgccaggcctggtggggagtggagtgtgcgtgccccagaactttccgtcttccgaggccctgttacaaactgtataagtagcttagctggtttttttcagtaattgcccttcaggcattaggaaagtttccttgatatttggctaacttttctttcaagtttcttaagtcctgaaatgggttaggagctctgtgcgctcacatcagctgttggccttgtaagtcacacctttgctgtggagtctgctgattatctgctgtttgacagtctgagtgcttgctgagctaaaaacccaggggacccgggtaccttctgggtgggcgtgattacagacattccaacttttcgtaagattctggtaggattttttttgtgtgtctccccttctgtctttgaatggagtgagtccatgctgtctccataggagatgagaaggggttggcctttactggcagctacacagaagatggatttttcttcattattatagagtcagtgctgtgaaatccctaatttgggctaacttaggctgagtttactgaagttaaacctcttaagtatgttctgaatacatagccaca

SEQ ID NO: 81855 - DNA, 1013 bp, Homo sapiens
caagttagaagtgagagttcagataagtgaggccgccattgctgctttgaacacctcagaaggggagaatggatttatcaggagtgaaaaagaagagcttgctaggagtcaaagaaaataataaaaagtccagcactaggtaatccttctgtaagatttttctagtgctacttgggggtgcttactgctagggacccgcagaaaggggaaagttgagaatgttctgcattctacagtgagtgttctgagccacagaccactttgctctgtggtcacctcgggtctctgtggccctgctgatgctgatcccccgttttgggttgtgctgtttgggtttggtcagaggagcacgcaatctcacactcttcctcaccatccagggctccttcacctaccaaacgcaaagaccgctcagatgagaagtccaaggatcgctcaaaagataaaggggccaccaaggagtcgagtgagaaggatcgcggccgggacaaaacccgaaagaggcgcagcgcttccagtggtagcagcagtaccaggtggggcgggctggcctggagcctggagaggacctgtgccacagctacacccccactccccacagatggctcggttttcttgattatttacaaagaaaacacatcctctgattgttagtagagaccctaatttatggcagactggctaggtgcagtggtggctcatgcctataatcccagcactttgggaggccgaggcaggaggattgcttggggcctggagttcaagaccagcatgggcaacaaaacaagagctcgtctctacaaaaaaaaaaaaaaaagagtaatttgtaaaattagctgagcgtggtggcatgcatctgtagtcccagctacttgggagggctgaggcaagaggatggcttgagcccaggagtttgaggaaaataaacaaaactagccgggtgtggtggtacacgcctgtactcccagctactcgggaggctgagtcaggaggatggcttgattccagggggt

SEQ ID NO: 81856 - DNA, 1795 bp, Homo sapiens
agatgtaagttggggcggaatccgactgcatccgtgtttcgggggctgcccggcaggcccggcaggacgcctcgtgaagccggtccactcctcagccccgcagtgcggcggtggcctggcagcgcggtgcgggctccgagaagaaagagtgtggcccggggcgggcggagtgggaggtgtcgaggccgtggcccggaagtggtcggggccgctgcggacggaagggcgcctgtgcttcgtccgctcggcggtggcccagccaggcccgcgggactcagaccagcggggagcgcggcctccgcccttggggccctcccgccgggccggagacccaagcccccaacgccaggccctgccctggaagcgctcgcggcccggcgcctggacgggggagttgtgagtgaacgcggacgggtagcggcgaggtcggcgtgtcgggccggtgtcggcgggcgcggagtttctttgtgggatgcggtggaaggtcggccgatccccccttcggagtcattaattcaaacgtgtactccgcgaacgtttcccggactcccgtgtgcaattatcggcgctaggccgtggggatacggcccactatggaccgagcacggtggccgagctcagtttgatgggttaccccagaggggcggatacgggaaggttaagtttgttggaggagaaacgtggagtaggctttttgtcttgattccgcatgaactgtgcctgaaatgtacttttaaatggggaaggtgctctgaagatttgtgccgaaacgccctctcctcgagatttaactaattgttctctcctctctctggctgttggacgcgcacctttccggaggatgggggaggtaaccgaggtcctgagccggtacctgaacttgggtgaacagagaacctcaacttttgctttctagcactcgaccgcacccagcaaggcgtccgcttactcagtggttcttagtgtttggagtgcttaagaataactggtggtgtttgatttcaccaagtacattcgggcagatcttagttcttgggggggtggggctggaatctgcgggtgtgacctccactctaggtctgtgctgtccagccaagtagccattggccacatgtggctgctaagcatgtgaaatacagctaatcaagactgaaatattaaaacacacaccagttttagaagactaggaaaaaagcaaacttttattagatgtttatgttgattatatgttggaaagataatattttggatgtgtcaaacgttaaaaattaatttcacccatttttgtgacgtggctactaaggaatttcaggtgatgcttgtggctcctcacacggtttctattggacagtgctgctgcaggtgattcgaaggcgggtgggtgcaggaacccagctgagagttcagaaattagtgtaactttggagacaagtgtctgtgggggaaggagcctccggacgtggagatacaactcttgctcctaacatttatcgagtctttaattaatgccctgggtaactataaggttggaactgtaattgtcaccatattgatgatgagaaacttgagaaaggataagtgacttgtctaaaatcacacagtaaaacctcaaatcaaacccaggccctctggctccagactctaaattatactctgaatgatactcactgattgtccgaggacacaaagagtgtcgaggcactatctgctgggtgtctgcagaaccttactgttctaaagcaaaacattttacccctggacaagagcagcaaaggtggcgttcggccctccttgg

SEQ ID NO: 81857 - DNA, 1029 bp, Homo sapiens
gactcagggaggacagctggaatcccctggcggctgccccctcgcctcctccctgcaccctcagcctttaccctccatgcatgggcagcacccggagcagccatcctggttacagctccgggtgcaaggggacgaggggaaactgggacagagagggtcctggggctgaaagccaccgcgggggccagacgtggcctgtggggctgatggacatgggccagctgaccgggaggggtctgaggacctccaaatgctcctctcaccccttccctacccgtgagctcctctcagcttggcatgcacagcagcgcctccctgtgccgccgcaggtggtgtttaaggccttcgacgtgcgtgccttcacgcgggacggccacatggctgacaccctgctgctgctcctgctctacggctgggccatcatccccctcatgtacctgatgaacttcttcttcttgggggcggccactgcctacacgaggctgaccatcttcaacatcctgtcaggcatcgccaccttcctgatggtcaccatcatgcgcatcccaggtgggcacctggagaccacccgcagcccccatggccatccacggagccactccgcccagacagggaggcaccagccacagccgaggcgggactcaggcaatgggcccagttcatgctcaccagcccctctgccccagctggccctgcccggctagccatgactggtgggcaggcgtctgcggcgtccttgccctgtgcagagccggcaggggcgtccctgggaggtgccccctcactccacacagcacggataaggccctgtgcccgccctgaccaggcccgtcctggaggtgggtgtggtgtgccctccagcgcagactgatcttacctccccaacgcagctgtaaaactggaagaactttccaaaaccctggatcacgtgttcctggtgctgcccaaccactgtctggggatggcagtcagcagtttctacgagaactacgagacgcggaggtactgcacctcctccgaggtcgccgc

SEQ ID NO: 81858 - DNA, 1057 bp, Homo sapiens
cagccccaactccctgtgacagcagatcagctgtgggccatcccatgcactgcggtcctcacggggacccatgaaggctcggcaggcagccctgccttctcctcctaaatctacctggctcctgtcagccactgtcctcgctccacactgctctctccagcagtgtgacctgctgggcacatgagctgaggtgatggagggtgagcagagcaggacttggcaagaactgccgtccctgttcctcagatggccgcacgtcgggagcctgccatgccattgtgtgggcagggctaccccctatgccggccacagagcccccagagctcctggaaccacccagaggaggccaaaaattctgttaatttcagaatagccactcctcctcagggcagtgtcgtctccacccacattccaggctaggcctaggcctggcgatggctgcgtcccagcttctggctccatccctgccccaagagcagaaaagcaacagccctcgatctgctctccttgccatcaactcaggatcctagaatgacacacagaggccaggagaggctttccctttgccacactccaggaggaggtggggctcgggacctccacacctgggcaaggtcgccggcagccgtggggctgagggctgggagcggggtgatgagggagagtgacgctgccattgtcacatggtcagcataggaattccagaggaaccgttctccggtgggggcagatgttcccggtatggaaccatggtgcttgtgctctcccataagcccctttagtggttgggctgctgccctgcatgccttgggcggtcataaccgagaacccgacctctcctgccacccagacgtgctgtgctccgtccctgaccttctctgtcccccgcaggggccggaagggattcgacattgccctcaacctgctcttcgccatggcattcttggccagcacgttctccatcctggcggtcagcgagagggccgtgcaggccaagcatgtgcagtttgtgagtggagtccacgtggccagtttctggctctctgctctgctgtgg

SEQ ID NO: 81859 - DNA, 1020 bp, Homo sapiens
cagcggcgaagcccgaacccatgcggccgggaggggacgcccacaaacccctgcccgccggccgggaagcgctcctacgggaccccagccccgttggggaggcggggcggccacgcgggttccaccaatcagcggccaatgttcgaattcgcgtcctggcgcggccaatggcgggtcccggagcaggcggggagggcgtggagggcggtaaatgaggcgagcacagggcgggacatgggcggggccggcggcggcccccccgggcaggccaatgggagggccgggtgcgtttgaaaactggggtgggcggcggggcggggtctgcgcctgcgcgagggctacgcgcgctccggccggggcgcgggcgcgctctcaggcgggctccggcggcagcgacgcgagcgcggcgatggggagcggcggcggtgagtgcggggcgatgtccgctggtttctgccccacaccccttctgcctgccctgcggggcggacggtgggtcccgcgggaggggaggccctggcggcctgaagagggctggctcgagctctttaacccggggcggatgtcgcgtcccgcgcagggagccccggcggccgggcgcgcggtttaaatgcccggcgggcgcccgagcccctcggagccttcccccgcggcgacgttttccggccctttcctggggcaacgatcgggtcccggggcagcgatccggcgatcgggtcccggggcggcgatcgggtctcggggagccaaacaccagcgcctcctggtcggggaaagggctgcggagcgcgtgggggcgaagcgatcccgcagcccggccgggccctgaccgagcctcagtccagcggggccgtggacctagctctgtggaaagcagcgttcggccccgcgcgcgttgaggcacaggaaacacgaactgtggtttcagctattatcatagtatctgtcctggagccggagaatgaggaatattttatggagaggtctatagaatctttgagaattcgtcgccctggaata

SEQ ID NO: 81860 - DNA, 1014 bp, Homo sapiens
aatcccagcactttatgaggccaaggcaggaggatcacttgggtctggaattcaagactagcctgggcaacatagcaagaccctgtctctagaaaagaaaatatttttttttgactagctgagcatggtggcacatgcctgtagtcctagctacttgggatgccggggtgggagaatggcttaagcccaggaggttgaggctgcagtgagctgtgatcgcaccactgcactccagcctgggcaacagagcaagaccctgtctcagagagagagagatatatatatatatatgcacacacacacacacatatatatgcacacacatatatatatgcacacacacacatatatatatatatatatatatatatatatatatatattcaattcagggaacaagtattctgacttcttcaagtgctgtagtagttcataacgtttgtggcataaaatattgtgatgctttatgttcttaatgtttcagggctgctgaaaaggggaatttcgaagctgctgtgaagctgggcatagcctacctctacaatgaaggccgtaagtcctcaccccacctgcatgttggcgcttcagataagtgtgagcctttggccctatgaagaagtggtccccgtgttagcagttcagttgctgtccttgctctatccgatggcctgcctccccattccctctcaggagctcgtgcccagatgtaccctgctgagggacctgctaatgatactctgactttgcaggttacgaaagtcgcctcttgttttagcaaaccctttaatttcagttggcaaagagtgactgagccagagcctcagcacgggggctgtttgggctccctgccctgtgcgccatgagcacgcagacctgcctgtggatgctggccctctccttggccatcctcttagaactctcgagacagagttcagcgtgccctgtaacacagagccaggcttctaaacgggaagcaggtacaggcaggttagaactggcctggtgcctggatcc

SEQ ID NO: 81861 - DNA, 1917 bp, Homo sapiens
agaagcagcagcaggcccatgacctgtttgaggaggctgctcatcagggatgtctgaccagctcctacctcctctgggaaagcgacaggaggacagatgtgagtggtgcctgctctgggtcggggggagttatgctggacaaaggcgtagttgatgctggtccttggatgcgtttctgtccacaaaagggaggtggctcttgctgctcccggtctctcagcctccgggaaccactggtcagtcggctattcttggtacccccaaaaatgactccaccatttgagagagaagaggtgggaagttagcgtagtgtcggcccttctgggtcttggttctgagttcctcccaagacacagttgtacaaaggctcggtgatctcccattgacaggtgtcagatcctgggcgatgcctccacagcttccgaaaactcagggactacgctgccaaaggctgctgggaagcgcaggtgaggtgcggggctgggatgacgtggggagctggcctttctccctccagccttggggcaggactatctgggctcccacattggggggcaggactatctgggctcccacatgggaggccaggattgagggacaccctaagatcggttcagcactggaactggtcctaaaggacaggtacactgtgagaagagctgggaaatgcgttattcatctctgcctatccactcttgcctctcagccagccaacctcttaattttcaaatgcttgtgagctatagctgctgtcaaaatttgtgccattcttgaaagttgtcccataggtagaactgatcttgacaacaaaacttgaggctacttgagagcagaggggcgtggagagtcccttcctgcttcctcttcctgttagcgccttgcttgtcatgtcacctggtcaccaagtcatccagggctacaggcaggaaatcaagcattggtagactctcccctcacagctataaataagttgttagggccaggtgcggtggctcacgcctgaaatcccagcactctgggaggccaaggtgggcggatgacctgaggtcaggagttcgagaccagcctggccaacatggtgaaaccatcgctactaaaaatacaaaaattagctgggcgtggtggcaggcacctgatactcaggaagttgaggcaggagaatcgcttgaacccgggaggcagaggttgcagtaccactacactccagcctgggcgacagagcaagactctgtctgaaggaaaaaaaaagttgtcaggacgaatcaaagaaagctcctatttgccaaatggatagaagcttgttcttgtcaccccaccaagtgggtggcagagtgatctgcgctcaaatgctagggacaaaattacaaattgataatggcccagcccgaggtgtcatagcacattgtggtgttcacgtccaaaaagccagtctacagatttacaagaaggccagacgtgatggctcacgcctgcaatcccagcgctgtaggaggttgagttgggaggatcgcttgagcccaggagttcaagaccagctctggcaacatagtgagactccatctcgacaaaaaattttaaaattagctggatgggctgggtgcaagtggctcatgcctgtaatgccagcactttgggaggctgaggcgggcggatcacgaggtcaagaggtcgagaccaccctggccaatgtggtgaaaccccgtctttactaaaaatacaaaaaaattagctgggcctggtggcatgtgcctagagtcccagctacgcgggaggctgaggcaggagaattgcttgaacccaggaggaggaagttgcagtgagccgagattgtgccactgcactccagcctggcaacagagcgatactccatctcaaaaaaaaaaaaaattagctggatgtggtggcgtgtgccttgta

SEQ ID NO: 81862 - DNA, 1025 bp, Homo sapiens
atatataatatatatatatttctctgtttttgggtggctagctggtaacttctgaaaatagctgtttttaataatcacagtgtttgctgggatgaagctgtgatgaggcaggtgctcctattcctgggtgtaaacattggcagaagcctttcggagagcactggggcgtatggccagagacttaacacagcttccccaggcattagccatgtaagaaactgagacctgagccacggtggaaaggccactgacatttcattatatatcttttctcatgtcatctattacttatacaaaaaggaataataattaaaacctgagccatccttgttcccgaagcttgtgaaggtttaagttaagtagggcagtgtgtccacatgcatttggtgcctgaatgggcctttgcttcagaaatggaaaactgcaacatggctgctgtctcacgctcatgtttgtcttttcttcctcagctgtctttagccaaagcctgtgcaaatgcaaaccagcttggactggaggtgagagcttccagtgagatcgtctgccagctatttcaggcttcccaggctgtcagtaaacaacaagtcttctccgtgcagaagggactcaatgacacaatgaggtgaggcattcaggccggggcttctaatcagagcggcgcggaagccagcctccaggggaagggagccctttccacttaaccccagttacctgtgacagggcggcatagagttcccttatcaccctttttttttttttgaagtggagtctcgctctgtcgcccaggctggagtgcagtggcgcgatctcagctcactgcaagctccgcctcctgggttcgagcaattctcctgcctcagcctcccgagtagctgggactacaggcacccaccaccatgcccggctaattttttgtatttttagtagagatggggtttcaccatgttagccaggatggtctcaatctcctgacctcgtgatccgcccgctttggcctcccaaagtgctgggattacaggcgtgag

SEQ ID NO: 81863 - DNA, 1058 bp, Homo sapiens
gcctttctcctgcctcagtcccccaagtaggactacaagtgtctccactctattcagaaaggcatttaccatattggggcatcatttaccgtattggggcattcccttgcgactgtccaccttctcccgctccctgcacgccccgagggtcagggttcatccactgtgggcagaccaacggctgtgggctgacttttcactttgcgtcaggtcgaggtctcaaagcgcttgtgtttgggagcaccaggaacacagtcgaaggatgtggggcctgctttggggctgggacccacggagcctcccgggcttcctgtgacatggcctctccagccttggttccagggtaaacccatgattccagagctagccagcttatttggtcgggcccaacaggtggggttgaaatcgcagacagggacacatggagaacgcccccaccagttcccacgtgcttctctttccgcaggtacattctgatcgactggctggtggaagttgccaccatgaaggacttcacaagcctgtgcctgcacctgaccgtggagtgtgtggaccggtacctgcggaggaggctggtgccgcggtacaggctccagctgctgggcatcgcctgcatggtcatctgcacccggtgagaagcccccttggcccagctggcagggacgtgctggcctttcccgggttcagggtcacctgcccttcatgtgctcctcactggtttggttttgttttgtgttgtttttttttttttcccgagaccaagtctcgctctgtcacccaggctggagtgcagtggtgcgatcttggctcaccgcaacctctgcctcccaggttcaagtgattcttctgcctcagcctccagagtagctgggactgcaggcgtgcgccaccatgcccgactaatttttttgtatttttagtagagacggggtttcatcatgttggtcaggctggtctcaaactcttgatttcaaatgatccgcccgcctcaacctcccaaaatgctgggattacaggcacaagccactgcgcctggccctcactggttcttgactcat

SEQ ID NO: 81864 - DNA, 1169 bp, Homo sapiens
ttgggttctaaagtctgttgccagagtttcctacactcttggagttagagagtttttcgtcccccactggtgccctgcagagcccactccagccacgtgggtgtctctcagcagcagcgtgcgtccttacacggcagcctgtccttttcaaatcagaccactgctttcctttaactaatgctggatcccctagttccgcctttggaaataacgtggaaatgattctcacaatacgatttgcatttcctaaaccagctgtccccagcatggtctacatttcccgaggaagtgctttccagaccgactcctctgtagagcctggtgggtgaggataggcttggctgcacacagcatatgtgtaagctacagagacttgtttctttcttgcacaggtaacccagaggcagaggttccaggctcaggtcattggcatgttttttgtttcatgaggaagcagaggagccccatctcccatcttaatctctgccaccaactagggtgctgcccttgtccctgtgacacctgtacctgccacattcacctttgcactgagcttagtcttgtgaccacatctcaccagacgggaactgggaggtgtagtctcttcgggcctgtgtgtgccagctcgatgcagtgtcattcccatggaaggagggagcaaaccctgccacaagcatccagagctgtcttcagatgcgctcttgggcctgaatccagcgtcccaggtcttccgaccagagacgactgaggaggtcgggcggccgcctccctggatctgactgcacatccatcactgcaacctacgacaaagctcctgggccacaaccggctggcagtgagagaataactgctaaaaacgtttcagggagctgagtccaatttcttccccaaccacaagacctgattgcagtggtccatataactatcaccacagctccctcaaatcaactctgccttattatcttttttttttttttttttaaatccggggaccaggcacggtggctcacgcctgtaatcccagcactttgggaggctgatgtgggcggatcgtgaggtcaggagttcaagaccagcctggccaacatggtgaaaccctgtctctactaaagatacaaaaaattagctgggcgtggtggtgcatgcctgtaatcccagctactcaggag

SEQ ID NO: 81865 - DNA, 1071 bp, Homo sapiens
tcatccctctttccagcactttctgacctcccctttgttattattatgatgattattttttgagacagtgtcttgctctgtcacccaggttggaatgcagtggtgtaatcaaagctcactgcagcctcaacttcctgggcttaagcaatcctcccaccttagcgtcccaagtaactgagactataggcacgtgccaccatgctctgctaattttttattttttaactttttgaagagatagggtcttgctttgttgcccagggtggtctcgaactcctggctgagctgtcctcctgcctgggcctccccttttttaaatgccccttgtcagccacaggcagctggctccattatgaagcctctgtttgtcaccaaagcccaacgccatggctccctccctaccttgaggcctcctaaagccttgggtccctccgccccacccctgccccaggaagtgggctccaccctgagaccccttctcggcgttgcaggtttatcagtaaagagatcctgaccatccgggaggccgtatggctcacggacaacacttacaagtacgaggacctggtgagaatgatgggcgagatcgtctccgccttggaagggaagattcgagtaagcagcggttccattttccttattaatcttcgttgtcgctgtgctggagggtgggggtgggcattcagctttcctgctgtgggagggcctcatggactcagagagcagctgtctctgctgtgcccaaagccatggagcaggaggccacggttgcaccacgtcgccatctgcgctggtgcgctacgcgtgcagcatcggcgtgaacatcatccgggccagaccctgcgctgggcctgcatgcggcactgcaccaaggagcccccgagcgctgagagcccacaccccgtcccggctgtctaggtccccactgtggtggattacaaggaggtcctgctgacgctagtccctgtggagctgagaacccagcacctgtgcagcttcctctgcgagctctccctgctgcacaccagcctgtccgcctacgccccagcccgcctggctgccgcagccctg

SEQ ID NO: 81866 - DNA, 1569 bp, Homo sapiens
ttcccattctgtacattccatataaatggcgtcatcggacaagtggccttctgtgtctaggtgatttccctcgcggtaacgtttgctgggtttgtccatgtggtgtgtgtccctgctttgttctttttcatggctgaataatattcccctgcatggaccacatgtgtttatccatcccgcagctggtggacattttgcctattgtgaacagtcctgccatgaacattctagtacaggtttctgtgtggacatagtttttcctttttcctgggtctttacctagagaggaattgctaggtcctgtggtgactgagtttaaccattcggggaactgccaggtcagattccagagtgactgcaccattttgcattctcattgctcacttcagtgaactgaagctaaaaatggggtgggggtgcctcacatgtccactccacgtgactctgtttccagcttccatgatgacgcccccaaggactacaggcaagtctctctgaccgccgtgaagcagcggtttgaggacaagcgctatggagaaatcagccaggaagaggtgcctccctcccgccacctgggcgtctcatggggtgctggggtgtgggcgggcctcaccctcggggcctctgcaccccctaactctagcttcccctcaggtgctgagctacagccagttgtgtgctgcattaggagtgacacaagacagccccgaccccccgactttcctcagcacaggggagatccacgccttcctcagctctccctcggggcggagaaccaaacggttagttaccctgcgttctggctgcgccatacaatgctggcatcctcgtgccggcccagttccctcagcgcttcctcacacagagaggcccccaaggcttgtcaggggagcagcagatcccaggacagtgaccctgggacggagccctgcagtcatgcctcgggcccctgcgtaacctccactgtctccagcccaggtctccttcctcagaggctattgcctctcgctctgactgggctccctgtggaggaagatggtttcgagcacgcgggagcctagcctggctctagccctgcccgtgcctgtcatgcgcgtcctggacttctctgctccatgatgctgctgtcactcccggcactcgagctgtgacctgagtcacatccccagcacttccctcgccacccgtgtggacctgtttacccgcctctcctatctcagcaccttggctgttcctcctggagttaacttcctctttctacctcacccgcctggagaactcctactgattccacaaggccccgatgaacagggccctccctgtgctgctggccctgcgccgtgacccctcagcaccatgtgcaccagtaaccttcccaagggcaggcactgggtggctgggtctttcctgtcaatataggaccaggcagggctgcctccagaagcgttgtgtcgggagtgggctcctggcaggagacctcaactcctggggagccctggggaagcagccaaagcccctgctgctgcttcctccccaagaagcgtgacagcactttccattgtgtggaag

SEQ ID NO: 81867 - DNA, 1106 bp, Homo sapiens
ggggaccagatggttggcccacgccccacagctgagccgggtgggctgggcttcacacccagacctggggcctgagtttgcctgagctgtcctccaggttggccctgcctgaagggcttatacctgttctagcttcaccggcatcttcttcgtagcagaacctttgggagcacgtggtgacaggctggggcacgcgggtgttagaggcaggtgtggagggcctggcctcccagcgccgccgtccatgactgggtctcctgggctctctccaccttgcaggaagcgggagaacagcctccaggaagacagaggcagcttcgttaccacccccactgcggagctgtccagccaggaggagacgctgctgggcagcttcctcgactggagcctggactgctgctctggctatgaaggcgaccaggagagtgagggcgagaaggagggcgacggtgagtgtggggccagggtgcaccagaagggacatcacacagagggtggctctcaccgagggcctctgggcacccggccctgtgcgagcgctgtgggaggaagatgtgcacagagtgcggggtggggccagctcctgccccgccggggagtgtgtccagacatggggagagaggaggggagagcccccaaaagaccacagctgctcccaccacacagggatgagaggacttaggccacacctatccggctcctgctcattccgtgttgggaggacctcactaggatgagggaggcagagaccctgtctggagttcatggagatccttctaggcctgtagtctcatgcctgtaatcccagcaatttgagaggctgaggcaggaggatcacttcaggctagaagttcaagaccagcctgggtgacacagcaagacaaaaaatttaaaaattagctgggcatcgtggcgtgcgcctgtggtcccagctactcaggaggctgaggtgggaggatctcttgagcacaggaggtgggagctgcagtgagccgtgatcatgccactgcactgtagcctgggcgttctttctagaatgttgtttgaggtgtgcccacgtggtatacgtgacactcctcactgccctgctgggatcactgccctgt

SEQ ID NO: 81868 - DNA, 1091 bp, Homo sapiens
cctttgcgcagagagcagagaggatgacttgcggccaccaagtttctgtctccgcgggagtcccgtgcaagccatcagaatgttgaaatgagggtgaagagctcagatccctctctttggaaagtttagcctggaagcagttggccacactgtgtggagggcacctctctgtcccttccgtgtctcactgtctctggaagcttcagcccatgtgtgtcctggtgttcccagccccaccagagccccgtgccgggagctgacagctttcacgcttaaggcacgtgtgacctgggtagtcagacaccacttgagcccctgcccacatctgctggtttggggcttcagtggggagctgacagctgtgagcacaccactgtcccctcatccacctcggcctgcatggggcacccacttccttctgggtggggcttccatggtaagggggcctgcgtccctgcacactgcgaggactgccttggccacaggcccactccctacgacacgtgactcgttttagagctctgtcccagaggcgttcgtatgtgacccacagatggcgtcaatgtgaacacctctctttgtgctgaatttctgggccattcttttcctgtcttatttctaaatttccttcttccaagatgaaaacaaaagaaaaacttaaaacagaaggtattaaaaaaacaagagattcccaccattatttaggttcacctgcaaaacaaaaatcttactccagcccctcaatgccatcctgacacactttatgcaaaaagaattttcccagataggctagccagaaaaaacttcaagtcctctgtaacatctgaggtgaccaagaggcagaagagcagagcagtcgggggccgtgtcctggctgatcccaactgcagctctgctgtgggggcccgtgggagggaggcagacccctgggctttcctgctggccacggagactctgctcctgcatggaaagggagcctgggagccagcagcccacgcctggggagcctgcctggggccatgtgaccatggcctctccctgggaacgggctgaccacaacacaccctgctgccatccacttctgtttactc

SEQ ID NO: 81869 - DNA, 1045 bp, Homo sapiens
ctgatggcagcggccttctggccttcagcatgcaggacagcagccccccaggcctggacctggacagcagcccagtgctccaagactgggtgaccgccaccgacgtccgtgtagtgctcacaaggcctagcacggcaggtgaccccagggacatggaggccgtcgtcccttactcctacgcagccaccgacctccaggtgggcgggcgctgcaagtgcaatggacatgcctcacggtgcctgctggacacacagggccacctgatctgcgactgtcggcatggcaccgagggccctgactgcggccgctgcaagcccttctactgcgacaggccatggcagcgggccactgcccgggaatcccacgcctgcctcggtgaggccttggagggtggcctggggaccttggacacaaccagcctgcccctgacccatccctccctgcagcttgctcctgcaacggccatgcccgccgctgccgcttcaacatggagctgtaccgactgtccggccgccgcagcgggggtgtctgtctcaactgccggcacaacaccgccggccgccactgccactactgccgggagggcttctatcgagaccctggccgtgccctgagtgaccgtcgggcttgcaggggtgagccaccaccggccacctgcaggccctcaccctctgacttcccagatccccagacaggcttctgaccaggcccttcccacctctgtcctcagcctgcgactgtcacccggttggtgctgctggcaagacctgcaaccagaccacaggccagtgtccctgcaaggatggcgtcactggcctcacctgcaaccgctgcgcgcctggcttccagcaaagccgctccccagtggcgccctgtgttagtgagtgaccctgccccgcctcagccaccaagccaaggccaccccagctccctgctgttgtcccgtctattccccgagccctgcagatctctctgcccctccatcgcaggccattctccctccctctctgcagagacccctatccctggacccactgaggacagc

SEQ ID NO: 81870 - DNA, 1529 bp, Homo sapiens
gggaaccccaacttgaagttggttgctgagaagttccagaggcctggacttctgactggtgtctggagacgtggggggcttgtgggatctgagctatctccaggtagatgtctcccggtgtcgggattgaattggaggacaccctgcgggcgcccgctgcagaatggattgcttgctgccgggagaaacccccgcatcttctgggtcgcagatcctgtgccgattgcggtgctggcgtcagagcagaggaaaacgtggtatgagagtttttccaaagagtccagacacgcttccaggccctctcagccacccccacaccgtccctaccattcccacctggcccgctgctgcctgtgccccagggtttccgggcactccgagcttccctggcaggcaacaaagctctcatccctggatcttgcggatctcgcgcccgggctggaatgcctgtgctgccctcccctgcctggcgggtggggtcggtgctcaggagcgggtggggcctgccggtctccctagcccaccaccaggtttcctctgtatccccgcagcacttggcaaggtccaggggcttccgtggggagcgagattgttttggatcccgccaggggagcccactgagaggagcctgcatctcctatcacgtgaagcccgcaggggccacagcacctccttcctgtggtccctagctgcgggcgttggcgttccccacccatggggcccggcctcatttcctcttcctcttcattcccggtcccactcccaggaaatggtgagggattgctcagaccagatgggaagaagtgagacgagcggcagctgacgcccatgccctgttctgtggcccgtgactgaggtccagccacacagaaccccgcgtccttgatagcttgtcagctgctgggacgggggctgttcttgtggccaggatgtgtgtggtggtcaggccagggcaggatggggcccaggcctgcaaccccagctcttcaacctggagtcctagcgaacactgacctacgttgggacagggctgcctcttgcccagggggctgcagttggccccttggtggcatctgggagtgtgtgggagtgccttctgtgctgtgggcctcatccccagggctctacctccagcctgagctgctctggcatttgcctaagaagcatctgtatcgaaactggctttgaaaacttcacagtggagcttccctgggctggaattctctgtttgtcgctcgcccccgcctccagcatccccaagtggcctgggctctgactgccactgtcaggccacggtcctgtgggatccaaccctgagccatctctgggggtcccctcatcttctccaccctcccggtctagactctgccttcctttctccctggcttctctgtcccaacccttcctcctccagggccaccagggggatttttgtaaacgcagatctgatcgggtcacctgcctagactttcctcctaccccgtgtggggacacccgcctcttagcgcatcccagcccctcagcactgc

SEQ ID NO: 81871 - DNA, 1081 bp, Homo sapiens
gtggctctcgtctgtaatcccacactttgggaggccaaggcaggcacatcacaaggtcaggagtttgagaccagcctgaccaacatggtgaaaccctgtctctagtaaaaatacaaaaaattagccaggcatggtggtgcatgcctttagtcccagctactcagaaggctgagtctggagaatcgcttgaaccaggggcgaggaggttgccgtgagtggagatcgtgacactgtactccagcctgggcgacagggtgagactccatctcaaaaaaaaaaattaactgggcatggtggtggacacctgtcgtcccagctactcaggaggctgaggcaggaagatggttcaagccattcaaggctgcagagagcagggtcacgccactgcaccgcactccaacctgggcaacagagcgagaccctgtctcaaaagaaaagaaaactacaccacatttgaaaaaatacgttctttaaaatgtgaaccttgaaacacagatgctaaaagtgtttttttaatcctgcagggtgtgagatggcagacaggtttgcaggaaaccctcagaaagggggctggaggatttagccactctgtcctccccttccggcagtccagggcctcctcccgagcacagcggcgctatggactctccaggatacaactgcttcgtggacaaagacaagatggacgctgccatccaggacctggggcccaaggagctgagctgcactgaactgcaggaactgaagcagctggcgcgccagggctactgggcccaaagccacgccctgcggggaaaggtgtaccagcgcctgatccgggacattccctgccgcacggtcacgcctgacgccagcgtgtacagcgacatcgtgggcaagatcgtgggcaagcacagcagcagctgcctgccgctgcccgagttcgtggacaacacgcaggtgcccagctactgcctgaatgcacgcggcgagggggccgtgcgcaagatcctcctgtgcctggccaaccagttccccgacatctccttctgccccgccctgccggccgtggtggccctgctgctgcactacagcatcgacg

SEQ ID NO: 81872 - DNA, 1022 bp, Homo sapiens
ccccactcagccactccgcctcctcagaccccgctgaccgcctctcgcccttcctggccgctcgccacttcaacctgccctccaagaccgagtccatgttcatggcggggggcagcgactgcctcatcgtcggtgagcgccagcagacggggctctgggatgagggtgtggggtccgggcagctgaagctgctgcacccagccctccctgaccggggtggcagagaagaggccctgggtgtcagggtggaccaggcatgatgggtgggagggggctggaagggagagaccagcctggacagctggtcctgggggctatggagggtcaacggtctgtgcggtttcagagaggcccgtgcagggcaggacagctgggacagcaggtgaggtgcctgggtcagtgctgatagggcagtcaggccgccactgacctgagcatcctgcagggggaggaggcggccaggcgctctacatcgatggggacctgaaccggggccgcacaagccactgcgacaccttcaacaaccagcccctctgctccgagaacttcctcattgctgccgtggaggcctggggcttccaggaccctgacacccagtgacggcctgtgccacggtgactgagccgtggtggggcggtgggccgaggctgggctgccgcctcgggcagcagagagcagatgaaacccccatgtggtaggcagggttgggggacggcaggaccccatggccaagcctggcgttgcctggacctgctgctgcctctacctggggtttgggctgggcttccccagtccacctgcatctgggtcagagctggagggcctgctgtgcccccagccccacccagagctggcataggaagtaccttcctcctccgtggaggcttccatagcccaaggccttgggagtgtctgggtcttgctgcccctgagcctctctaggcagcctgagcccctggggtgggagtacaacggcagtgggaacgtgcagctaagggtgggcctgtggtgccccctgctgg

SEQ ID NO: 81873 - DNA, 1390 bp, Homo sapiens
cccaaatggccactaattaggcaatacagcacctgcctcaaatttgggttcatatagatttttttcctccctttttgtggagaacatagtcttgctgtgttgcccaggctagtcttgaactcctggactcaagcaatcctcccgcctctgcctccctaaattctgggattacaggcgtgagctgctgtgcccagctcatccagattcttgctggttctctttctcagcctaaatgtcttgtttgcgtggagaaattatcaaatgaagcaggagtgccaaacaagcctcataggctcttcaccctacaacatctatgttaggtagaaaagtatgtggatttttaaaaatcatctggtataaagagtttttaagaactatcttcatcatcttagtatcagattgtgcttgagaagttaggtacaatgtaatgtgattcattgctaaaaacaaaatgcctcccacaattgcagactcactcattttaccaaactatggaatttgtcaacaccttttcttgggaccaaggaagcaaagtcagtggataccgtgtcctgtagacatgtcacttgtgataaggcacggacaacatgaactggcaaaaacattggcatttggtcaaatgcttatgagctaaggatagaagggaaaaaatagttgtgtgaatgattttacctcttagttcttacgaaggatggttatcgggctggaaaaatgtttattggactgatgctttggagcctctcaatgaatgtaataaaaaaaatgtgtagtgagcacaaatgtatggatttgcagcacaatccaactttgaaaatgtgaaaataagtgagttagtgatatgtttggttggtgttaatttgagtcctaaataaaatcgagaactggtaaaagaaggtcactgtgaaataacttgctatgagaaggcttagagggatgggaagtcctggacgcctcttctccagggtgttggaggagagagggaggcgctaggttgacaagaccgcatctgcgcattgtggtcaccagcgagtctctccactgaggcgacaggtacatgtctgtcgcatttgcagccgtggccggtgagaacggcagcattccctgatccgtcttgttttcttttgttcctagtgcctgctgtgtggacagctacactcagcaaagtcttagggagacttagaggagtcaccatgaagaatcagtgtcagacgtttcatcaggaatccctgtcaaggccgggtgtggtggctcacacccgtaatcccaagactttaggaggctgaggtgggtggattgtttgaggccaggagtttgagagcagcctgggcagcacagggagactccatctccacaaaaaaatagtgaagaacccctgtcgtgtgtaaaacac

SEQ ID NO: 81874 - DNA, 3623 bp, Homo sapiens
gggaacccaacacctgcagacgacgcgcagccgcagaggaggcggggcgtccgaggccccgccccgtatgctaatgaagcacacaccacaccgccccgccccggcgcgagaccggtccaacgctgcggagatccagaggccggcggcgcccggaaacacccgcggaggccgaggcagggcggggccgggcgccggggccgggtcgctgggcgggcggcacagcccgggggaggtcaacgggccggccgggcgtcccggggacgcgtctcccccacggtgcgaagtggtacggctcgcaggggcggggcccaggtcatgtgacgcggccgcggccgccattttgttctgcggtgctggtatttagagcgcagcggctgacgggccggatcgccttcgccgccgcccgcccgcaaaccttcgtgcccggcccgtcctcgcccccgcctccgccaccgcctcggcccgcagagcttgccccctccccacccgcagacatgtccgagtccaagagcggccccgagtatgcttcgtttttcgccgtcatgggcgcctcggccgccatggtcttcagcggtgagcgcggcggcgggagggactcgggggcgggggcgcgcgcgttgctcatgcccgcagctcgccggggtccggtgtgtgacgtcactctgacgtaatcccgagctgtcgggggcgcccgggcctcgtgtgacagcgggcgggggtcggcgccccgagggctgcggggagccgccgggggtccggggcgcagggcgtgcgggcctggccggggtgtgagtctcgggggtccgggccggcggccctgccagccgggtcgtgcggttgcgggggtggggcggcggcgccgctgccatattagccccgggagcggcgagagggaggctggggtgggggcgcgaggggggcggcgcgaggggggccgattctgcgggcaggtgacatcacacctcgaaggccccagtgcgcgggcggcggcgcgggtccggcccaggaacgcccagccggtcgctggagctttccggctggtggggagcccatgtcccccacgggaggtcctcagccctcgcccttatggcggccggccccgagggtcaggtgggtctcacccacaggcaggtacttccggttggagctggttacagttgcccaatacccgtgtcgctgtgtgggctgtttgggaaagctgggctgagggcttggttcggagagcccgcggagacccgggtgggagtgtgtggaagtggagggagcggggagacagcagcatcggcgctggcggggctgtgtagcttgcagagggtctgtgctctgaggtgggtgagagggtggcatgggtgtccgagtttatgggatccagtcgttgccctcaggactgaggcttccagttgtggtcctaatgaatggaggggtgaatgaatgaccttcctttccctccctgaggcctgaagttgggaggggcttccctgggcttggagaaggggccttctagggttcttggtggcaccctgcttttgaaattgggccttgacaggtcctgggcgtccaatttagtgacaattggtctccctgggagaatggcacttgggctagggctaggcccaggaatgtgggtccgacgagttaagttctggcccagtctcagcctccgtggactggcctggcctggtctgatttccgcctccgtggttaggtctggttttagctttgatgaccgtgccctgccccaccctgcctggtggcctggggaggctcctagtgcagatatgtggagggtttgaactccaaacagtctctgctgactgtaaacacctgtggggtgggggcttggagctctctgttctcttgcgggcctccttctgcctgggcctgtctgccattcgtgagtgagccctggccttcccgtcgtgtgcaagtaaggggtcatttgtggtggaagaagtggtctagacttctccttccccctaggcaccgcctgctctttccacagactcaaggcttctcccaacaggctgccgagcccttccccccagcctcctctgttctttgccctcagaatgccttcagagattccattttgcctggccacctgtggggtattagcttgtggctgtcactcattcatccaaacaatcttgattgagcgcttactatgtgccaggtactggtaggacagcagtgaacaaaatgggatccccgcccatgtggaacttaaattctagctgttgctgcttgcccttgaagccctgagtttgtccaccaagccctttttctgcacccagctcctttcctctctctccgtcaagacctacacaggtctttgggcagcctgaccagcaggtgtctggaaattgagaacacggtattgctggcctaggcctttcctgcttatccctggctcttcgggataaacgtggcttactgtggctctccaggagctgacctctgacttcacttggccaattcagacaactgcttttttttttttttttttttttctcccctcctcaagacagggtcttgctctgtttcccaggctggagtgcagtggtgtggtcatggctcactacagcctcaacctcccaggctcaagcaatcctcctgcctcagcctcctgaataactaggactacaggcacaggctaccatgcccagctaattttttttttttagagacagggtctcgccatgtggctcaggctggtctcaaactccttgttgcctcaaacgatccacctgcttctgcctcgtaaagggctgggattataggcatgagccaccatgactggctcaacttctgacttcatttctgccttctcagcatgctttcctccaggacctggcttcacctgctgtgccgacctaaacaagccccctgccctccagtggcctctgctgttgccacaacgccaacctccagctgtgtccccagctcctggcccttggcctgcctggcactgacggattggtcttaaaccgaatgaggtccacaaacctcttgcaggcccccgtcccagcttccccttttttttctcatgacaaatgtcctgttctttcttcatcatgtccttcaagaagttgtcatttgctccttttctgtatttcctgtgacttcctccctgctggcgagtgccttgtattttatgcttgtgtttctgcaactgctttctggccccccactctttctgtggctgctgagcctagtgccgctcacaggtctgccttctgcagtctggtcaggcttggcctccggactggagtccagggtgctcatggtattccgctcctggtggccatccctttcttccctgtgctcctcttggtgcctcctccccctgccagccacatgattcttcctgctgccctctgtagaaaagggcctggctcacttcctgcctctggtggactactggcctcacagggtccactacttgggttgctgagttccctgtattcagtctcctgccaacgtgtctgccatgctctggtctcttgtgcatacatgatgcagttggatgtggtcctgggcctgcagtgggagccccctaaaatgcactgtaattgctctatatgcttgccagggaaaaaatgcactgtaaccaggagttcagg

SEQ ID NO: 81875 - DNA, 1011 bp, Homo sapiens
tttgtgtgtgtgtgtgtgtgtgtgtgtgtgtgtgtgtgtgtgtctgtcagagattcactcttgttgtttgtttgagacggagtctctctgtgtcgcccaggctggagtgcagtggcgtgatcttgactcactgcaacctccactcctgggttcaggcgattctcctgcctcagcctccctagtaactgggatgacaggcatgcgccaccactcctggctaatttttgtatttttagtagagacgaggtttcaccatgttacccaggctaatctcgaacttctgacaccaggtgatccgcccgccttggcctcctaaagtgctgggattacaggcgtgagccactgcgcctggccaagtcaggctggttattgatctgctcccctaaaagaccatggcatgagttctgtgggcagagagggggcagggagttgccagtgcagtccccacaagcagctcagtaggcccctgtggtggccctggagggcagctggcagaagtcagaaaggcaaatgagcccccgtgacactgctgtgtccacagaattctccactttgagaatagggcccaggagaggggaactgaaaagaaaggcaacattctcttgggagaggaaggagggacagctctggaggagacaggccaccctggagcccagcccaccagcactgttgcggtgggaggcttgggccctctggccaggctcctgtgtgcttggagccaccccgtgtgcaggggagacctctctgggaggtcagctgaggcctcgtagttggactgttgatgatccccgtcgtcttctctgcccccatcctcttcttggctcaccctgtctcctgtctggtagagaagattctccaatctgtcaagggttcaggcctgctgtgtggctgagggtgctgagagctgccctttctggcagaatgtttggccctcctaggttaatatttggggctgggagcgttggggagcttggcctgggcagtgagtcaagggagctctggcctgggtga

SEQ ID NO: 81876 - DNA, 1003 bp, Homo sapiens
catgaagtccatcatcccagtggtcatggctggcatcatcgccatctacggcctggtggtggcagtcctcatcgccaactccctgaatgacgacatcagcctctacaagtgagcactggggtcaggcccctgcccagggctggaggactgcagggaggggggcggttcacctgtgggtggtgacccggacccttgtctccccctggttggcaggctgctgatgtcagtcctctcttctcgcccccaggagcttcctccagctgggcgccggcctgagcgtgggcctgagcggcctggcagccggctttgccatcggcatcgtgggggacgctggcgtgcggggcaccgcccagcagccccgactattcgtgggcatgatcctgattctcatcttcgccgaggtgctcggcctctacggtctcatcgtcgccctcatcctctccacaaagtagaccctctccgagcccaccagccacagaatattatgtaaagaccacccctcctcattccagaacgaacagcctgacacatacgcacggggccgccgcccccagtagttggtcttgtacatgcgcagtgtcctagtgcccatcgtctgtttccccggccttgcccccgcccgccccgtgccgtggacatctgggcccactcatcgcccctccaggcccccggcgccccaccccctagagtgctctgtgtatgcggatgatttagaattgtcatttctctttactggatgtttatttataaagatctggcctgttcctgcgtctgcggagcggcccttgtctcccagctatctataaccttagctagagtgtcgccttgtgggttcctgttgctgagacttcctggatggagccgccctcaccgccgggcccgtggccctgcgcggagctgtgtccaataaagttcttggatgtgacgggcctgtgtctgctcagcttgttgggggcgggggcgggcgggcgggcgggcgggcgccgggcgctgccggtcacgt

SEQ ID NO: 81877 - DNA, 1044 bp, Homo sapiens
agataatgaatattttcttatggagccacaagagttagtgagtttagaaaatgaaccctgttaacagtactttaattgagccgtctgtgttctagttctgtccagagcccccgccgttttcccctccagcacaggattcatttcaggatcatcacttgcgttatatgcccaaggggtccctctcttggtgtgtgggcagagccagagctgggaacaatgggggtggtgtgtgggttctgggctcaggcttcctggatttggcattggcctcctgatgtcatgtatcggctggaagactcaggacaaccttctgcctttctgagcctccgtttcctcaaacctgaagtgaggatgaaggcagcgtgcatggcttaggggcgttgggtgctcagcatcgtgcgtgagatgctgagtgttcaccactcagtattagccatggatgtctttttggaaatttcccacagccctccccacacagagtcaaatgtcaaaaacctgctgccaactggcacctggttctcacagctgctctctggggctctggggcctgtcagagccacctgtccaagattcaggattcagcacatcacctctgccccacccctaccggcagcattcctttcctacctgtccagcctcttctctgtccccagccacattccccactcctgcccccaaactcttggcctagaaggccctggcctgctccccaggcctcctctgctaagccttgcctacctgtccccactgtgccccccactgcctgcgcatctctggccagcacaggcgtgggaggaactatggctcttcttccttaggaagagtctctgacaagtaggactttgttttcttcccagcatgcactgcagtgcaggtgtcttaacccttggcgcacacacaggatgaaggcagagagccaactattgagggtgggaattgggaagcctcctgcctggatcatcttagaaactggaggccccttttcactcgggtctcccctgtgccgtgcacgccacctcttccagggcccactcaccctgggtg

SEQ ID NO: 81878 - DNA, 1105 bp, Homo sapiens
ttgttagcctgctgcagagtccctgagacagggagtgctggtgtggttgggggctgttggcaaagccatgtgggcttggggactgtcacctagctgtgtcccccaagcaggctgcagcatggagtcggccctggaggctgcatccctgcaccccgcccagttgctggggctggagaagagtaaggggaccctggactttggtgctgacgcaggtgagggcctgtcgcagggtcaccgggcagcctggccctgcctgtagactctgttgttcctggggcggcctggacagggccagggagggtgggtcctccctagctccctcctctcaggtgggctgccggctgccagcctcagttgtagccccgtgttgccatcaggccgggctttctggtgttgcagacaaggccaggcaaggggttgcagggagcattgtccagtacctctgtccatctgtgatgggtcagggtgtcttgcactagtcgtgtccctgggcctcagtttccccaccagcgtcgggttgttggggagcagctctggggtaggtgggcggccccactcctgccccctactcattgcccggctctgtcccagacttcgtggtgctcgacgactcccttcacgtccaggccacctacatctcgggtgagctggtgtggcaggcggacgcagctaggcagtgacaaggacctcggctgagaggacacctggccgcagcgggatgccatcagggccgggtggttggggagctggtctccagggagtgagtcgggagccctgctggattgatgcccagggcctgtgcggccgccctggaggcggtggctgggataaacgtgcacccagcaggactcgccttggctccgggttttgcttgtgctcacatgtggcaccatccttggttgccctcctggagaaggcattcacggcctggggtgggatggctgggctgtagtttagcctgggccttgggccccagtgggggacagggcctgtctgcatgaagtggaccggagacctgcagaccccaggaaagtgtcactatgggagggaggggcaggcagtcagtggctggtgccatggggtgaagccaccatgggctgggggt

SEQ ID NO: 81879 - DNA, 1038 bp, Homo sapiens
actagcttgaaggggggcccccaggaatggccccttctggatttcatacccttgtgtaaccttgtttcactttttaaaagattttatttaaaaagttttttttttgttagagacagggtctcactttgttgcccaggctgctctcaaacacctagcctcaagcagtgctcctgcctcagcctcccaaaacacgcccgttcactttctaccagggttgtgtgtgaccagcagatgtgttggaagtgatggtgtgtcacttctgaggttaggtcattaaagacgcagcggcttctatcttgtgtgtgttctctttttcttgggccactcgctctggggaaagccagctgctggggcttgaaaacacacacgcctgggaagaggccgcactggtgagggacggaggcctccagcccacagctgtgggaacgtgggaatgaaccttttaggaagtgaatctttcggccctgctctagcctttagatgactcagtcctggcagcatcttgatggcaacttcacaagagagcctgagccagaccacccagcctggcctctcctggattccagacccgcaggagccatgagtttctttgttgttttacacatcaaagttttgaggcaatttgttacacagcagtatataactaatacaccagctgtagggctttgggcacgttccttagcctctgcacccccgtttcctccctcgtgccatgagcattgtagaggcgagtgaggaacacgtagacgcagcacagtgccacgcacatgaggcagctttccagcccctcccgggatggttgtggtcattttcttgcccctccctggatggaccgtgacctcacaacgtcaggccaagttattgcattcttggcctgaggtcatccattggccatagacagaggttctcggcaggaaagggtgagataaagagaggggtcagtctctttcctccagcccgggtcgggagaaccgtgctgggccaggtgagacatccgctgtctgtgcggtgtcctgggatgagccactggacctgacc

SEQ ID NO: 81880 - DNA, 1113 bp, Homo sapiens
ccgtgctggagagggctgaggagaggctgtgtgtctcagcaggatgccagtcaggattcttctggctatgggcttattttttgcaataaattcatcgttaaagtcccattctttaacctgttttttcccttttggaattaattcgactgcagtaggaaggggttgtagctgaaagtgaccgctgtgcattgaatgccatcagaaaaggctgatgagatttgcagggaagacttgaagcctcactgaaatgcgcctggcgtgtgttgacctttgcagtggaacatgtgggaaaggggcccgcactcacttttcagttctgcctcggtgattccaggagccccggggttgggagcggggacaggaccttgctcctgagtcttaggtgtggtgtctctcgccccttgctgcattggcgggaccctcggtgccgcggcctcagttgcagggcggccagggctgctccgtgaaggaggcgctcactccatggagctgcaggacgctgcattctcctcactctggccattgccgctgtccttcctgcttccccttttctggtgagggagggctccaaggacttgctggctggtccccagatgccagcactcctgcatcttcccctcctctcctggcctgtcactttgttcctcctctgtgaggggcccaggctcggatgcccggccacggcctctctttccagcctgtgcggcccaggtgggtccaggatgttccctgctgccctgttctcagcagttcttgtcttcttcaggcttttcctccttgcctagagaaatttccctacatggaaacccctgtggctgtacagtcttttctgaccagtctgctgggttttttgttatttgttttttgtttttgagacagaatcttgctctgtcgcccaggctggagtgcagtggcacgatctcggctcaccgcaacctccgtctttcaggttgaagcaattctcctacttcagcctcctgagtagctgggattacaggcacgtgccaccgcacccggctaattttttttttttttttttgtaattttagtagagaccgggttttgccatgttggccaggctggtctcgagctcctgacctcaggtgatccgcc

SEQ ID NO: 81881 - DNA, 1148 bp, Homo sapiens
gggaggttctgagtgggacgcgctcttcgtgtgggcctggaggacctctaggcggcctgcactcgcctgatacagctggcttctgctgggaggctgggtttgcatccaaactctgagaccttttggacaaaacatgccaaagaagttggtggtagtaagaaattcatactaaacttgttctgttagggtttttttccttccaggtatattatttcccttcagtagccctacattttaaaagttaacgttcagcgttgagtcagggtcaggttttgaatgacacaggatgttttcagatcctgagtttacctgaagctctcaaagtagcctcctaacaaaaattattgaaaacatcaactattttggaatacttttaggtatgtagaaaaattgcagacgacacagaatttccataatttcccccagccagcttcccctaatgccatgacatgaccgtgatacctctgtcactctgtcgaaactgaggtgttcgcgctggcaccacactactcaccgagcgacaggcctgttttggattttatcagttttcctcctgatgtccttgctgtcccaggaccccgccccggtgccacatcgcatcgcgttgtcctgtctcattcgccccctctggtgtaggatagctgccgtccttccttgtttgtcatcagcttggtacttttgaggagtcctggtcaggtattttgcagaatgtgccttcatttgggtttgtttgatgtcttgtggttggacaggttgtggggttaggaagaatcccacagagatgaggtgcccttagtgcgtcgtattggggtacaggacatccacgtgactcatcgctggtgacgttcaacaaaattacttacaaaacttttaaaaaattattattgtttgctttagagatgagctctcgctctgtcatccaggctggagtgcagtggtgggatcatagctcactgcagtctccaactcctgggctcaagcgacccccccacctcagcctcctgagtagctggggctacaggtacgtgccactgtgtctggcaaaattagttttactttaccaaaaggaagcacataggcctgctctgctctctgctacttgggggttttgtgtcatagattgtaggacactggtggtaatttaattt

SEQ ID NO: 81882 - DNA, 1142 bp, Homo sapiens
gcgcgcctgagctcgcctcgcattgttcttctgtagtgcggggggccactgccaccaccgtgaggacacgttggggtctggggagggattgttatggctgtgggtgcaccttgcacgtcttgccgacctagctttgcacgctgatcttccctccgtgcccgcttacattgttaactgggtttctgccctccctcctctccttcgtatttctgtgtctcattgacaactgttctgtagtcgctttgttgacagttgccaaactgctttccaaaaacatttccactgcaatcccggtttttggtgccagccgcagtggtgtgagtgcgctcgctttattatagtcttgccagcactgggcgtctctgtgtattgtaaacacatgcgatcatcactcttatctctccatcccccccacaattaaagatgtgccgtgctatctctgctcaggttaccttggccttgggatgagttggctggaggctcaggcagcgcgagggacaggaggagggcgaggcgctgcctggtggattagcggggagccatggcacgggcaggactcaggagaggaggccggcagctcacagcagaccgcggggctcagctggcctgccctgtgcttggggtttgtttttgagcgttgaaatgaggtccttaaaccttagtccgtgcattgagagcaaggcagctgccttgagccttacttccttttcctctttgtcgcctagtatgacgccgtgcccatccagtccagcgtggtgttatgttcctgcccatccccatcaatggtgaggacccagactgagtccagcacgccccctggcattcctggtggcagcaggcagggccccgccatggacggcactgcagccgagcctcggcccggcgccggctccctgcagcatgcccagcctccgccgcagcctcggaagaagcggcctgaggacttcaagtttgggaaaatccttggggaaggctctttttccacggtgagtatttgctgctgctgtgtgtcaaacgtacgtgatttccttggggaggctcaccttcctcggggcttgccggagactccaagcaaggctggtgtccttccaggcaggaggtctcaggccccttgaggggtgtcacctgttgtgaaggccact

SEQ ID NO: 81883 - DNA, 1010 bp, Homo sapiens
cttgttacctgtcttcggggtgttttttcctctgaaagcaaagaaatgaaggtcgaaagcagctgacatgggacgttttgctgacgtgggacccatgaagccgtgtgtggttgtggatttagtgaaggttgtaacaggttcaggggaggcctgagcaactcggggtgtactgtctccatctgggcctctaaagagacagagtcccgtgccgccactgtggtcgccaaggtggccgccgtgtgcgtgctagggccattccagggagccctgggggcacctcactctggagggcctgggtgagttcctgaataattctttcttgcctgacctttgtgaagaaaccgtaggtgaggtttattttccttttttctcttttttacacataggaaatatttcacaatgcaaagaaaaacatgaaatatagcttacccatattcccaacatattgttttaattaatgttaacttttgctgcccttacactttagattttttaaattgcaggttttatgaaataatttttttataaaaggattatgccctcatgaaaaatgccttcaaccatgagactagtccccaaagttttggggactcagatcctttcagaaagaagaaactctttggaaaaccttgggcattctgcatggctgcttacaaccacccagtgaaagaacaggcctcctcttttctcagctttacctgttttttgagacagagtcttgctctgtcacccaggcttgagtgcagtggcatgatcatagctcactgcagcctcgacttcctgggctcaagtgatcctcttacctcagcctcccaagtagctgcagttacaggaatgcaccaccgtgcccagctaattgtaaaattttttgtagagacagggtctcactttgttgcccagactggtcttgaactcctaggctcgagtgattctctcctcagccttgcaaagtgttgggattacaggcgtgagccactgtgcttggcctcagttttacttccttgtatgtc

SEQ ID NO: 81884 - DNA, 1631 bp, Homo sapiens
gccaggggccagaggggcagtcggggctgagaggctctgttcctgtttcctcgagaccgtgtaatggcgttcttaatgagaaagccctcatcatgctggtgcctcgtcttggagctggggcctgggatgcccggcagatccagtgacatgactgtcttgggccacaggtactttcagtttgcactgaattaaaaattcttatcagacttttaaggttagttttccaaaaatgacttttacaaaataaaacacatgagccaggcgtggtagcgcgtacctacgttcccagccacttgggttggttaaggtgggaggatcgcttgagccagggaggttgaggctgcagtgagctatgattgtgcccctgcactccagtctgggcaacggagtaaacctgctccaaaacgaaacaagagatttttacacttccttaactgcacgatattcagatttcggccttagttatgccaaaaatggagaactacttaaatatattcgcaaaatcggttcattcgatgagacctgtacccgattttacacggctgagattgtgtctgctttagagtacttgcacggcaagggcatcattcacaggtaaccgcgggggtggctgggtgggtttgcaggacgtcagtttgatgatcagggccagtgaccgtttggctcacaggccacggctgatgcccagatggcccccgcccttgaggtcagccaggttggagtgctccctggatgggtgggactgagatgcctgcctgtgccacagcctgagtgccaaggcgaggccacacgtccacggagcgctgacgtggagaggctctcctgccaataccacatgcaatggttgcgtgtctttcctggcgagctaatgattcttttcaccatcttgactgatgctttttatctttttcagttgtagcttctgtgtgtacttctttctggtctcgtttttcatgactttctgataaagtcagctcagaagtgtgcatagctttcattttgtgcgttaaaaatgatagattttacttcgttaaaaaacgacttagaatgacatggagatgtgaggtggtgaatccctactgtgtccagccaacacttgttgcttgtgagctttaggcctgtagccctggttgtcagcctgtaaggatcatatacattcattcgttcattttgttttcagcaaaatttagagtacgtaataatgttgctgttttaagtatttcttctcaaatgtgaaaatctgcttttacagggaccttaaaccggaaaacattttgttaaatgaagatatgcacatccagatcacagattttggaacagcaaaagtcttatccccagagagcaaacaaggtgtgtgagttttatttctagcagagcctggctctgtgcttcagatggaaagcgacttctgaggagtgtttgcattgtgtcatcttcatcaacgactgaggtggggataccttggccgttctcaaacagatcttgaactttctctgggcaagaccctgccacgccagcaggtcttcctgggggggccccaggcagtgtgtgttggtgtagagtgggaggtcgctggttctcctcggcgcctgctctggttcatcctccctactcgtcttctggacagtgtg

SEQ ID NO: 81885 - DNA, 2070 bp, Homo sapiens
tgatgtggccacctgcagctttcatgtatgcagaggcctgggagcctcgaggcccttgcccccaccctgtgtgccactcagctgctcctgcgtggtgtttggttacggctggcaggtgccacggggctgcagtgctctccctgctgggcctgctgttgctgcagaggttttgctcgcgactggctggtggccgttctcccgtgggctctgtgctccattgctcccagggaggtagctgggctctgaaggagcagcacaggcttcagttgtctccagtctcaatgcctggggagcttctctgagtgtgggggtgtgtgtgcttgcacttgccgcatacctgtgcaggcccctgtgcctgggcctactgagagctggggctgcttgatacgtggcttctgttgccgtctgtgaagccaggctccatttgttggcagccgcctgttagatggcccatccttagctctgcacagctgtgtggtttgaaagccttggagtgggtccaggcagggagctcccaggccagacctcacacggggacagtgagtgagtcttggcaaacggtgtcaagcatggaaggagacttcagggctgtacctcctccctccctgcagggccgcaccccctccttcatggggaatgggcactgggcgtccccttcagccagggaggttggccatggtacctgcccttgggccaaggcaggagagcaggtgcttcgttggctcctgctctcctgaggtcctgtaagtgccggggcagtgtgaccattgggcagtgttggagacaagcaggctgggcaggcccacaccccgtggaggggtcggcgtggaggggccggcgtggaggggccggcagcgtcgggcgtttccaccatgcccgttggcgagcaccttgctccagcccagctgggtgcgaggctttagggctgtgaggcggggctgtggtgcagctgtaggagtgtgaacacatgggggacgctgcatgtgtggatggttgcgtggggcagcagccagggcctgcgtctggaggcacggaggacgtggaagggcatgccgcactcttatcctagccattgctcgtggcaccttttctttccccttgtccttggcctccacagagctcagatgtggggcctgcagccggggaggtggcttcccttgcccagggactctctggccttggcagtgccaggagcgtgttagtgcacaggctgtgtccgcttggcacgtttatgagtgagtttccgttgtcgacactagcttgtctttttcctagagtaacaggcagcgttatctacagtaagtttagtttatctttgctgggattaagaggaatgtcttttaaacaattgaatgtgtttagtcaaatcaaaatatttagcatctaccacagactcagactcctaagacacctggggcccaacaaggtcttgcacggaggccctgtctgccagcctgtgtgatggatctgccaccaggcctccttgggccccttctcttcccagcaggcatcccagcccccacctccggggggcagcactggcattcacggggcccgcagggtaagggcccaggtcccctcttcctggagaggaaatctgaggcttcgcccctctctggccctgattcccatgggaagaggagcccgaccaggcaggatccagtgaggcctcggttctgtggccaggtgtcccatggaggagaatcagggctgcccaccctgtcgccttgcgccttgctgtgtgcgagctcccaaggcctgacagcggcagtgcgggaggggctggggttttaggaccttagaggcaagtgaaggtgcggttctcactttcccttcttctctgcagtatgacaatctcctgagccagtttggctgcatgcaggtgtcttcgtcctcctcctcacactccctgtcagcctccgacacgggcctgccccagaggtcaggcagcaacatagagcagtacattcacgatctggactcgaactcctttgaactggacttacagttttccgaagatgagaagaggttgttgttggagaagcaggctggcggaaacccttggtaaga

SEQ ID NO: 81886 - DNA, 1055 bp, Homo sapiens
tgcgtgtatggtgagtttttcagtggtcacatgctgtagaatggaatctgcgtgcttttggtcttttctaaggtcataggtttttggtatcaatatgttttgttttttaaatgagagagagtcttgctctgtcgcccaggctggagtgcagtggcgtgatctctgctcacacaacctccgcctcctgggttaaagtgattctcctgtctcagcctcctgagtagctgggattacaggcacatgccaccacgtccagctaatttttgtatttttagtagagaaggggtttcaccatgttggccagtctggtttcgaactcctgacctcgagtgatctgcccacctcggcttctcaaagtgctgggatttcaggtgtgagccaccgcgccagccaatgtatgcattttttgagattaatattcaatatttctactgagctcttactatctcttcatttatacctgctatagcctctgtaattttatcatccactgaatcattattttgaaatcctgaagttttccttgtgcctacatgagaatacggtaagttaagttcaggatcacacctgtaatcccagcactttggaggccaaggtgggtggatcacttgagccaggaattcgagagcagcctgggcaagaaactgaaaccctgtctctacaaaaaatacaaaaatcaaccaggcatggtgctgcacacctgtagtcctagctgcttggggaggttgaggtaggaggattacctgagccttggaagttgaagctgcagtgagcagagagcttgccactgccccccagcctgggtgacagagtgagaccctgtctcaaaattggaaaaaaaaaaaaaaaaaaggtaaaaggaatttttaaatttacatggaatagtttacacttaaaaggaacatttcaaaaatatgtgtgatgagctctttaaaatccaatgttgtttgtaacagcttttcagacaataaattaaagagtcactgaagctcttagaagctgcattgtagaggctggagaggccacacggtagctgagagacaaagcctccggct

SEQ ID NO: 81887 - DNA, 6077 bp, Homo sapiens
cccacactagtggctcagtcctgagggggcaggggacaccctgtgcttgtttttcagtttggtggtgactgggggtggtggtcatcagcctgtgtagttgcttactgcttgtgtgaataaccgtcacacccacgtgctttcaggactcggaatggctggtcgcaggcagctcaccaggttggggtgggggttttggtgggactccctggagaacactaaacggcttctgtcttcgcagcctaacaggacgtattatctgatggaccccagcgggaacgcacacaagtggtgcaggaagatccaggaggtttggaggcagcgataccagagccacccggacgccgctgtgcagtgacgtggcctgcggccgggctgcccttcgctgccaggacacctgccccagcgcggcttggccgccatccgggacgcttccagaccacctgccagccatcacaaggggaacgcagaggcggaaaccttgcagcatttttatttaaaagaaaagaagaaaaaaaacacccaaccacacaaagaacaaaaccagtaacaaacacaaaggaattcagggtcgctttgcttgctctctgtgctccgtggaggcctccgtgtgccctcgttgccgtggggacccagctccatgcacgtcaacccagtcccgcccagactagtggacagacctggtgtcaccagtttttcctagcatcagtccgaaccatgcgcccgccctgccccaactgtgtgctggtcctgctgtggccgaggggaccgggtgtgtttggctctttatgcccctcccgctgtggtcctggaactcttcaccagggagggagccctgcgggggccgcagctttgtggagggagccgccgtgcttctgtcacctgctccctttcttgcgtctccctgtgatgggcccttaggcctggctgggcccattacatatccctgtggtggctctggtggcagctttctgtggcccctgctgtgttggcaggcaggtttgcgtggtgaggagcgggaggggttggagtggtgcgggagcaggctgccgagtggagggtgccatcgagggctccggatcccttatcctacttagcagtgttggtctctggggctggaagccgagcgcatgctgggagcggtactgtcagaagtgagcccagttagtaccccgctggctcactgcacgagagagtcctgccccgagccctaggtggggccaggaggtgccttggagaagccagccagagcagagagggctgctgacttccgtgtggagcagagaggcctgagggcctcctaaaaggtttaaatgtccacgcctctccagttgctgaagtagggtctgagagaaccctggcatcagcagacccagggtgcttctgtctcctgcagaccacgccagggagtgcagacaccaccgtcacacacgccccttttgtgttttggttcaagtttctcagagcccctcagagcttctacatctgtgcatcagaaatctcacagccttctcatgctgccggctcatctgggcccatagagtgggctttgccagttgctgttgcacaggaggcgagaacagcacacttcaaccccagcttgctggtcggctttcctctagagagagccggttttggggccatttccctttgatgctttggtggccttgccccgctctgcagcacagacaggccagatgcatttgtcctttgcctagctactccccaggtagagagtgctcctggtggcctggcaggtctgggcccttctctccctgcccaggttgtccctggagggcagccctcactccctttgggggagaggcagacattgctgcccacagacctgcctctgactcaactgtgtccaccctccctggtccctacccccaagtcacaggtgactcagcagtgaccctgtgtgccaggccagatccaaactgagagggaaggtgtcgtttttacactgctaatgacgagagtggctctttttagctaggcgagtacagacggggcctgggagggggcagagatgttccccaggccctgcctgtggttcctgcctgggccttggctgctgctgtgtgagagctgcatgtgagcctgtgaccgtgagctggggtgagctgggccgcacctaccctggggccccagggagcaggacgctccggggcccagcacgttgccctgggcctgtggccggagtcggagtcctctctcctcctcctggcttttggaaaggcttggctgtgttggggagtctctcttagccctttcaggaatttctgttcaggcttcctcctcctcatcagctattttacccatctcagaacgtcctgtgtctccatgtaggagagtggctctctcagatctctcagggcgtctggttatagggaaacaagtggagcagggacgtggctttaattggagcactcggctgggctgcttggggagactcttccgtgcgttcttcctctggatagaaccaccacctcctgggcgtcactgacaagctccatcttaacctccaaagccacagaactaggggctcagagccagagctggcagccgccagccaaaatgatgccattgcctgagctgacagccaagcccttctgtgggtcacctttctcctcacccagccccttgctcttcccttttgaaaggcccgtgtgttttctttccttaccctgtgcttgctcatgtctactccggttttctctaccacatccttagagccatcacctggcacgcaggcgccttacattctacggtagaacgtggggtactgtgtgtgcacatagacacacttacgtggaattacagttgtgggtttatccaagatgaggaagatttcacctgctgtttaatagacttggggccatgtgcctccccacacatgggcaaggacaggtggaatgtcgggaccacactgtgcggcttctcggcacaaagcggagggaggctgtggtcgctgccggcctaggtgtcccaggtgccccgcctttctctgggacacagttgggggctggcttctgagggattcctttctcccctctttgtgtggccccagccagggcggtgggcagtcctggtgtagagcacaagcctctccaccctagagaaatgcctctgtaccacggctaccatgtggaaccttaacttgcagaaggcttgttaacaattgttttgagagagatggctggtcatgccacagctgctggggactccgcctactccagccctcttgggacacactgtgggatttgtggcccttccccagaggaattgtggagactgtcccatggaacaaaccctcaggcaccagcacagggctctgggtgactcagtaaaactaacgtttgtctctgacaagatcagctgtaggctcaccggccagagaagaccactgtgagcattttgccgtatatcctgccctgccatttgttcactttttaaactaaaataggaacatccgacacacaccgtttgcatcgtcttctcccttgatattttaagcattttcccatgtcatgagtttctcagaaacatgtttttaacaattgtactatttagtcattgtccatttactataatttatctgaccatttccctactgtaaaatacttaagacggtttctgatttttccactatttaaataatgctgtgatgaatatctttaaaatcttctgatttcttacttttttcccccttagatgcctggaagtggtattttgaggtgaaagagtttgttcattttgaagatatttctgtctctctctcgacctgatgtgtagacgctcacttccagtagcagaaccaccttagttgtgtcttacagattctgaacaaatcggtttctgataagccatgtgttccaaagaatgtctgaataagaccgctctttatttaaatgctaagaggatgtcactactgcaatccatctgtggccgattttttccaagagccaatttccttgttttggttgcaagaacctggctctgcctgcatgtcagctctctgccctccctgctgccgtggctttcaagcgcttggcagaatcttgtacttcgtgtccacaatggtactgaatttgcatctgcacagtcagcagagataacaagtgttgaactgaccttgccacatgcttagtgagtgatttgtaattaagtttatagactcagaaggtatattaggacatttggaatcagtagcagagcaaagcctctttgaaaaaaaccacgtagctgattgggttttacaagagtgcatttgtctcccccttccacccgtggggccccaccttcaggtcttagtggttcacaagagcccagcagccaggctggctttttcattgtagggcgtggttgtcccagctggtgtagatttcaggccgccccccccaactccctgcccacagtgttgcagattgcctggctggcagcaagtccagaccacccaaatttggttggattcttcatttctccactgtagttggggtccattgattgtgcaggggaacgtgcaggaggtttttctaggcaccgtgttcagtgctgcttcactctaccagagattatggccaaattgcacggaatttggtttcttgccctctgaagcctgagggcccccccttgcctggctggttgacagacccggggtggtcactgctgagacttcagagatcgcagctgctgtgagaatacggtgaaggtactttgttctggaagatgttgtcatacacttttccccagttattttcaaacttgacatgagcctatgttgactcactgggtgggggtcccttcttacgcagcacacgtggcaagtgcctgaatcggggctggaggcacttcagagcctctgaggggccaccacttctggcccaaaattgcagggttgtagatgaggctgcctgtggagaactggtgtgaggaggaagctgtttccaacaaagagcactttcatctgttgagatggctgtggtgagcaactgaacgagcctacgtgtgtacctgaattttccccgtaactcatttcttccatatgaagaaacaccaaactatgtacagagaactttttacaaaaggcagaccttttttaagctgtgtaacccacatagcctaaccacctggcagaatgactacgaataggggtcattgtgctggtaaaagcctctattacgactgtaagtaagttggatgttggcaaaattaaattgttacagtatttagagctgctgtagctgttccttcacaacataaaataggataaatgactagtacgtctttcaggtgggtggcaagcagaacatgcgtaatattctctacctggtctgtagctgtaactgtgatgtacagacaaagcaaaaattaaaagaacttatgaaaacaaatgcaatgatactaggatatacacttttgtatttttattcttatataaggttatttgctggctattgttggcctctagttcagtctgtgttatttaaattctaatatatgaattatttgaattgaattcatgttcggggccacgttgttgtatgtattgatgtacagccttgaatgtgaataattattgtaaactatattttacaactttttttctggctttattatataaattttctattgggtcagtgatttaatcatataatttaatgaatctgtttatcctttttttttttccaaatacttgtgctttaggtgtagttaccagatgatgaattttcctcgtatggtcagtagtcttgtaataaaaagcatgtagagtgtagaggtttgctggcgtggctcttcctttgaccccgccacggagtgggggcgcggttgggggcgggtgtctgccattgcccgctagcgttggcgccccaagctcggtttcactccctccggaagtgggaccagccggctgcttttcccggatggaacttccgcctgccatgtgaccggcgggtgttctacaagggctgaccagtgggcgggacagaacgcaaagggcgatattaaaagccggactcttccggtgaagcggaggtgtggtggggcttgctgggatcatggcggggaatcactgc

SEQ ID NO: 81888 - DNA, 1076 bp, Homo sapiens
aaagtgctgggattacaggcgtgagccaccaggccccgcccttattatataaattttctattgggtcaatgatttaatcatataatttaatgaatctgttctttttttccccccaaatatttgtgctttaggtgtagttaccagatgatgaattttcctcctatgctccgtagtcttgtaataaaaagcatgtacagtgtagacgtttgctggcatggctcttcctttgaccagttcatgaactggagtcagggtgggggtgaaggctagggtcgaggtctgggtcaggcgctcgtgcaccgctcgtgggaggtcgaggctgatgtccgctgctccccatcagcgttagtgcccagatcaccccgtgctccgctcccgccggaagcgggcccagcctcctgcttttcgggaccggaacttccgcctaccgcgtgacgccggggcgggcgctctaccagggcggacctgtgggcgggacagaactcagaggacgctattaaaagccggacgcttccggtggaagggagctgttgcggggcttgctgggatcatggcggagaatcactgcgagctcctgtcgccggcccggggcggcatcggggcggggctggggggcggcctgtgccgccgctgcagcgctgggctcggcgccctggcccagcgccctggcagcgtgtccaagtgggtccgactcaacgtcggcggcacctacttcctcaccactcggcagaccctgtgccgggacccgaaatccttcctgtaccgcttatgccaggccgatcccgacctggactcagacaaggtgagggcctcacgggccagcccggagggtcctggccttcccggcctgcggctcctgcacacgccctgcttcgtgcggaggagacttcagcgggagcgggcgactctcctcgggcttcgagccccgcgctcccttgtcgccagctcctccccagcttgccccgatcccctaccctgggaggggagggtgaggatggcgccctggcgtccactgcctttgaggatcctgagtcgattcaccttgggggtgtctcttcctcgccctctttgctctt

SEQ ID NO: 81889 - DNA, 1041 bp, Homo sapiens
tgtcgacctctggccacactcagccctgtcagcctcgggtgatgcaccggaggtccctgaaggcagcatgtatggccaggagtggctcgccctgccagtccccctgctgccacccagagctctggctgaccctagcagcacaggcccccgctgagtgggtctccacctctggggactggaccctgcactgtggggagggcagggcttcctgggcagcccccgagttttcttgcaagaaacctgacacccctgctcctgagagggctccagttcctgccgagcagagcaggactctctgcagcgacctcggcttggcaagaccccccgtggttcacctgaagcatgtttcttccccgagaagccgcaggacctcttgtgaggggccaggtcgtgagtccacacacgtctgcttctcactaagctttgagtcatgtgtggggcagggacctcccaaattccagtttctatgctgggtgaggccgagaagcaatggaagggaagggtggtggggaggcagcaggcctggcgaccagggcacaggggccccaccctgctctccgaatctggctgccttggacaagcctccttggtctctggcctcagtttccccattagtaattggtgacatcaaagtcctcttgtgggccaaagatatgccacagctgcataaaacaaaacagaagagagagtagaggtgaaggttttgtgtgcgaaattgaaacagagtcacttgaaatggataatttcagagtaaaaactaagtatttctaattaggttgattgcagatgttggtgcacaggaaattctatgccttcgcgtctagatttctgtggggcaatttgacagagtttatctcctggattggctcagggcactgcaccctcttgatttcgttcccctctggtggcacgtgtctccgagcaccgggaatgactgagagccgcagggccgaccctctttgcagagctctgggagctgcgggagggttgggcagcagcagggttatgttgggttcagaatctggcgtgagagcctggcag

SEQ ID NO: 81890 - DNA, 1064 bp, Homo sapiens
gggggcttgggcaggcgccgctgatggccttacgggcagcacaggggccctgcctaggttggcccagacgctgttctaaacctccccgaggtgaccttgctgcctttgtctccatgagcctcggagtatatcctgaattttgtatgattttgtgtttcccattttcccatgttccatatttttttgttgtttctgcatcagggtggaggctgatccacatccccaacaccagcagtgagctgccgaggccctcgcgcctgggctgggcactgtctgggcctgggctggcaccacgagtagcccccgcacacattaggccgatctggaacatgtgggctcacccgagctgggagcaccaagaccctgcctacatgcttggaagcgagtcaggccacagcgagacccgaaccctggtgggatttgggggtcctggtttaagaccctggcacttcctatggatgtggaaatctctcattgaaagcttcaaagagagcagtggtgagagcagcacctccacacgccactgcctccccgccctggtgcggatgtccctgaccttccgctctgcccagacagggcctgtttctcgaggaaacccaccagttagaaggaacccatgggaagaaacggccggagagctgtgaggccagccacagaagagccagttttggaatttcccaccaagggttcagcctactgctcgcccttcagcctctggtgcccggcggctcagctgggttctagggccacgcagggctctgcagtgtcactccgggagagggctgtgggggcagctgcaggcccggcgcgccgagtccacgcagcctgggtaggtcctgcatgggcccagaggtcgtggggctcagagaattgaaccacgtgggaggagtgtactgtggcgggggccccataggaagcccactgtcctggaggcactggggcggcgggggtgtggagcggctggcaggttcttggtagacgcagctggggttctctgctcctctgccctgcagccttggctcccagcgaggttggcaacaagcatctggactcctggaagtctt

SEQ ID NO: 81891 - DNA, 1038 bp, Homo sapiens
aagcatcagccacaaaagctgcctcctaaagggggtgtttaatggaaaagccagccccgcccagtggtaggagtggccaagacacggcagcggcctacccctgcctgcccgtcttgaggccgagcccagtgccagcacgctcagtgccctgccggctccttggacctgtctgtgttcctctgtcctgctgtgcagtttccgccgatggccgtccccaccctgccctccttccctcctgccttcatccttccagttgcagggctggggttgcctcgtgtgtctgggggcgcccagcacgcttccttctcctcttgcaccggcccagggcctgagaagcacatggtgggttgtcttggcctagaggtcacggctcagtgcccaggtcctgccacaggttgggtgccctggcactcatggcggccccgagctacacgagctggtctcccccaccttttgctcgtaaagaaactgaggcttggggtggcctggctgtgagcctgcagtctgaccactgaggccaggcctggaggcctccatggctgacaaaggggttctctggggttgtcctgggcagaggcgagcctccgccctatctgatctttcctgacctcctgccagcggtctgtcgaggtagcagtgagccgtgaataattcctgagctgagcggtgtgcggacgtcacgcggccagcattctctctgtatgggggtggggcagggaggaaccctggactcgggtggcagcactggccgccttgccagacttgggcccctttgtgggaaatggtgtccattttttagcagttgcgcaggaccgcccagcgtcctcttcccgggagctggccctgtggccccggcccttgcttgagagctgtggagtctggagggctggggaaaggcagggccaagcccaggaggcagggcctgtggggtgggcagctctggctggagtgttccgggggagggtggggaaggaggatagggtcaggtctgtgtggagctggggtcaccctaaggagtaggggggccgccgaggctcc

SEQ ID NO: 81892 - DNA, 1046 bp, Homo sapiens
cgcaggcctgagccccacacagcaccccacccagtggcgtggccatgagcaggttcccagcaggaagcgtcggcctccaggcttggagggaaaatgccagatccaacccccagcataccatggcctcggcgtagacatacgctgagctgcatgtaagcagcggctccatacctggcgggtcactggaggtcactcaaggttacctggggtgacctgagctggaggtgttcagtccacacatcggccctctcaccacggcccctccgcccattatcccaggagccctgctgggctgacacgtctgcaggaagcctgttaggtcggggcctgagcagctcccgctgggccgagccatgggccctcattgcaggggcaggggcaagggcaggggtgggtgtaaagcgtggattctttggtttagtttggtctggtaaagacaatttatttttccttattccaggagtgttggaggaagcagaattttacaatatcacctcattaataaaacttgtaaaggacaaaattagagaacgagacagcaaaacatcgcaggtgagacaaatgactgaggctggaagcttgtatggctggtgtgaaggaagggctcccctttactcccccgaccggctgcctcccaaataagtcctgcggtctggggctctcctaccctgagacccttgtcctctgtcactgccccagtgcctgccagctccgtctacccggctctccccagggtcccttgaaggatccattcatcctgcccggcccagactctgggagcccccaaaggatggctctgaggaagttgggcacgggagacgtgtgtagggaaggagggccccatgagggccggtcggggagaccctgaggtggatggcatctggtagggagcagagggtgccaagggcctgcagccagcatggctggagggagacagcagatgggtcgtgtgggtctgcgcaggcgccagaaggaccttggttttattgggaagaggggcggctcgccacagacacacctctcacagctggcacggcccttctgca

SEQ ID NO: 81893 - DNA, 1017 bp, Homo sapiens
caagagcctttttctggtagctgggagcgagcttcgtctggcactggctctcagggccctgcttgccagagcctttcccgaccgatgaattcagggctgcacggttgctgcgtgcggagcagacgtggacgctctcgtgtcgtcatgtcgagccacaggtgctcttgggatttcaggaacatgactcattttattttggaacttagaaatagaaatatttttggaggcgaacgaggaagcagaaaacagcagctgttcgggccgcgtgttttgcttttgtggatgtgctcaggattgctttgggcctcgtgccctgtgctgagaactgcagagtggacctcagcctccctgggtcacctgggctggggccacaggcagcagtgggacatgggtggcccgcccttacctgtgcccattgtccttgcaggtgcctgtgaagcatgtgtaccgtgtgctgcagtgccaggaggaggagctcacgcagatggtgtccaccatgtccgacggctggaagttcgagcaggtgaggggccctggccagcctggtggcagccatgctgcagctgaacttgtgctcacaatggctcagggctcagtgctcctggaaatgcagactttgctgctggcgtcttcctgcagttctgggggtgctcacggcagcgacctgtgccctgtttccactggaggagccttgggagttcgggtggggtgggcagaggtgtctcaggctctgccccgcaccttcccctcctccctggcctgcctcttcttcccagcgctgcgctttcttcgcatcatctggcacctctgtgtgagggaggggactggcgtccccagagcctcctggccagcccactatccagcgcaatccccgtcccccacagctcactccatcggagcatatggaggccctgacgcctttcccaggctgcctccccttcccgcccatgctggaaggtgctgccaggccctcgttgccttctctctggttttggcaagctgcggcgggtggggtct

SEQ ID NO: 81894 - DNA, 1057 bp, Homo sapiens
gctgtccccatgtggcacctgtgctcttctgccaccgtcttgtgacttctggctgggagggaacaatgtctcctgcccgtggtgggcacctgcctcccggggcagcttcaggtcttcgaccttagcacttctgggtggattccaaacccattgcaaagaacgggtgtcctcccccttccttgattacgacctgcttggcacgcttcatcccttggggaccccttctcccagttcatgtagggaagccgctgggctgaccagctgtcccggctgtggggtgggaccctgcggggtgctgggaggtggccagaccggacccagggtccccagtggtcagcaggggattgcaagcagggcttggaagtggctgtgaggacacaggggctccggggggcatggccgtgagtgctcccaggggtacccttagctgcttgggcccatgccggcacccctgtggccgcctcactgggctgggtccactgctgcccactgggtcagccgccagctatacaggagcagcaggtagctgcgggctgctctcccggccgttggtccaactgcgcaggtcttagagaggccaaagtgtgagcctcgtccagctgctttttggcttggtcatctgctgctgtcatgcttattgtgatttgcgtattgccttttaattttccctttaaaagcacagaagtgcctggtggcccagggtagccagccatgggccagatgcctggccagagagacaggttggccctggacctgcattggcctggcctgcctggtgacccggagggaggcaggttggagtggcctaagggtgtggccagcaggctgcagcagacccgccctggccgaactcctggacagcacagctcctccagcggctttcggtccagtcagctggtcccaggctcttccctccaggttttcagagccgccctccactctcctcccgctgcccccctccctccgccccagctcagggacccgtctgtgctccgtccccctggggcagcagccccttttggcccagctggaagcgccaaggaaagctcagggtcct

SEQ ID NO: 81895 - DNA, 1087 bp, Homo sapiens
cctagtctcggtcagggagtctgctctgcctcccaggcgggatcgctggtttctctcgacctcgcagagctcctgacaaaggcggcttctgcgtcgtcactgcttcccggcgccattccgaggccgggccttcttctgacacgggctccaaccccacctgaccaagcccgggacagtcaaggcttctcaatttgtattttccaggcaagagaactttgtaccccttctctgtgtggatagactccccagcgtttttcctctggaaatgcccacagggcttgccgcgtggagactgatctgttccatccgttagcgcgaggtagcagtgtcgcctcgcccctcccactgcgggctcacggggagctggcgtctgtcagtgccttgtcacgcctggcatagaggttgggctggaggcctgtccactggcttctggagctgaaggtctgcgtcacggtgaaaattcgggatgtttacagagcatcacaaatgcctctctctcgccgctctctcattttctttgtataactatgcagccttccctctctttctgggatgtttgggacttcactcgacctgcacgggctctgcccgacatgccgtgggagctgctgggattcctttagaaaccgctgcccgcatgctttgaaaacagacctttctcagctggctgtggggacctgtcagagtctggggactcggcgtgcagggcgggctccaagcgctttgcttccggaactccggcttcccaaggggtactgtgcagactgaccaccggcctcccgcctgcaggtcagaggctctgacactgtctggtttccaatgcttctggagacttcctgcctaggcctcatcctcctctttgccagtcacctgattaaccaattctccagcattaggacttacctccttctttttgtaaggtctcttgtatgttgttaaatgtttggcttaaacaatttataaaagcctttctagaaggcagacttagccccagcagagcctgggaggaaggcggccgctggggctcctgggcatcctctctggggagctgctggccgcttagcgttgtttgatttttgaccttgac

SEQ ID NO: 81896 - DNA, 19301 bp, Homo sapiens
ccaacatggggagacaaaatggccgccacgccccgagccgaaattacatccgggctccgcgacacgcccgaaccacaactcccagaatgctctgcatcgacagcgggagacgagacgcgctcgggcgtcgctttgctgccgctaggccctgtgctcctccccgcagcggaaggcctacgaatacgcggtgtcttacgtcgcttcctccgttcttcgttgcactggccaacgggacgcttagtctttcggcaacggggtgaaaccttccttgtgcctgaaaaaacggtacttcgcggtgtggcttcggcgcctgcgcaaaaggccgcggggcgcactccagttcccggcaggccccgcgacgcgcgtttgcgtgctgacgcacgcagttagtcgtgctgacgtgcagcgcggcccaggcggggtgcgagtggcgcagttggagcccgttgcggcccctgaggaagcgaggaggcgtcggcgtcggctgaggcgggcggaccggcgaggcgaggcggcggccccaggcccgagggactcgggagctcgagcagcggcggcggcaagacctctccccctcggaggcggcgggcggaggcggcgggtgagagggtgagggagccagcgagccgggtgggggaggggcggcggccccggcgcgaggccaaagcgcgcggagaactgcccaggccgccgagctcctccgcgcgcacgcgcgctcgacgcccttcgctggcgcggacgccctcgcctcccttcccccttcccgccgttcctgtcgcgcgcgggcttcacccccccccgcccctcccccatgacaacggcgttcgcagccgcctgtactcgggttcgcgagcgcccttggtgaggggggagggcgcgcgcctcggcttcactcctccccccaacatgtgccgccgaggtggccttcctgcagctgccgttttcggcccttaagtggcggggaaggggcggcggcggggggcttgctcctggacccttgcccccggttccagatctcctttcctcgggcttctcttcggcgttgggctgcccgtgtcgggggcctcccagactgcgggacgccgcgcagccccctcccccattccgcaaggccgaaaataggcccccggcgctgcggggagggccttgaacttcgtgggccggatttaaatggtttaggattcccggctatcagcctttgagttgttagtggcggggagaaaccccaaatcttaaaaactgtgaagaaagtgaacgtgttcagtttacatttgtaaggtagaccgtgcgttccctttttacactttttcaacgtctcccgagaattcgtgttcaaactaaggaggcttttggagaccttcgttgggaagaaaacgccagactcatatataagttttctggttggtttcaggcgttctttggcacacagctcttctgaagcttggtttccactcggcttcagttaggacgaatctggatcagaatttcagagtgttgtgttgtctttcatcctaagtgcgtgggcttagggctcttctaaagctactattttagctttctgggttctttgtgtccactcagccgctctggagcgccccggtgctgagctggctgtgcttgctgatgtccatttttttcgacaacccttgtctcccctttttctccccttttggtaccgttttcttttttgcatattttactgttgaattcaaatatatctttctacttcattgttagcttaccactcggataatttcccaacagaaaagggtgtttttgtcttcctttgtactttttactttctgcttttaacttgggtaacttttgcatatccactgtctatggcccccactttaagagttttgtaatatcgtttggtttggtgatttgtgtgtggtgttgatcttcctactttctgtgtcttaacacaccccttagatgccgtggggtcgtcgtctttttttgtggggtggactaggtggctcattccctaaaagttctccgaaacattgtgacctaatatcctttgcttagcacctactggtttttcttttttttttttttccgagacggagtctagctctgttggcaggccggagtgcagtggcgcgatctcggctcactgcaaccttccgcctcccgggttcaagcgattctcctgcttcagcctctggagttgctgagattacaggcaatcgccgccgcccagctaatttttgtatttttggtagagatggagtttcaccgtgttggccaggctggtgtcaatctcctgatctggtgatccgcccacctcggcctcccaaagtgcaggtgttacaggcgtgagccaccgtacccggcctggttttcctttcttaaggagtggggggatttttgtgtgaggtggtatggaagtgtgggtgaatggttaagctgaagaattaagtgcaggtcaaaaacatgctgcaggggaagcagaaattaagtggggtaggggagaggcgaagaaggacctagttttaaaccgtgaggaggattggtactagaagatgaaaatgaggattggggtgtagagaaattgattttttgagccatacagtttttcattttttcctggatttctgcttgccttatccaggtttagcctcttctgtcaccttctgctttcaatattgggtctgctactgggcttgggtagggacccatccttaggcgcatgcgctagtatatttttccaaacatttgtatgatgcttcttcattctggaattttctaaatgcatccttcccttctatccagttcttttacatctttgattactctctccgctttacgtattccttagggttttttcttagtagtattttctcatatatgcatgttctaggaaactatcttggagaggatgagggtgagaaagagagtatatgtaataggagaaaggaatagagtatgtgtagccaaggaatctaaccaggaaagctgggacttgagaatttttcagaatcacgttagggttgggacaagttgaaaggctagaacctgggaggaggcatggggttaacacaggagagaaggaagaggcagggctgagagagaaaaactaggaagtgctatccaggggattggtggggaaagccaacggttggacattaatgaaagtggggtgtagagagggtttctacatagatttagggcaaggtatatggagaaggtatgggaacggttggaacagaggaggctggtttgatgtgtttaaatagagcagagttgaaaacaggtaatatttgacagctggcaagacagggaggaactgcaaattgttgtaaatcctattgagaggaaggaaattgaaggaataaaatatcaggatagttgataggatctttaaatatttggaatcaaggaaatggcccttacctgggaggtgaagtatatgacgattatccaaggttcatgtgtgtttctgatgtgcatgctggcctttagttggggtgtgaggctgcacattctgaaccaactagtctgctgttcagatacctaggggctgtgtagtttatttcatattcgtatagggtggtctgaaatccttaggtaagtttttgggagagtctttggacatggactagaggccgttgggtgccacagatctgtgtctggtgtttgttgtgaccaggaggctttggttggttaccagaggttaggaattagagtagttggtaaacacaccacttgtgcattttggggccaaaggagaacaaaaagggacagtgtggagagattttagaggaacaagatccttgtttgcctagggtggaaaaagaagaaaatttaggtgtagggagggattatttagaattctgtgcaagggcattgagagaaaggctgtaagaactgggctgtgatttggtagaaaggaaatttggaagggcaaagaagtggttttcttgggagaccaggaggatggtggagcattatacagcgaagacttagtgtgaagatcaatgttgaattagggatgaaggagagcagggacttgggtgtggggcggtaagtggttagtttggggccaggggcctgacccgtgtctccccgctccccctcaggagcggtggtgccccccccgggcacggggccatgtacaacgggatcgggctgccgacgccccggggcagcggcaccaacggctacgtccagcgcaacctgtccctggtgcggggccgccggggtgagcggcctgactacaagggagaggaggaactgcggcgcctggaggctgccctggtgaagcggcctaatcctgacatcctggaccacgagcgcaagcggcgcgtcgagctgcgatgcctcgagctggaggagatgatggaagagcaggggtgagggagagctgggggagagtcaagcactgaatgagtgcagagctgggggtgttaggtgggatgtatagggagcttagggtggttgaaagaggcctggcaaagagttgtggtaggggaggaggcagatgagctctagagaagtgaaaacagttaagggacagtgcagagtgggaaatgagaaggctgtgtgtctggggcatagatgggagcctgaggtactaaatggaggcacgtgggagaagggaggggccattgaggaacaaaaatgtgttttaaggaagagatgggaaagcagagaccaggtagaggagctaggtaagctgataggtgttgtcattggtagaaaagaagaagataaatggatgtaaggattgaggccttggaaagtagcataggcaggaaaagaggaattagaagaatacgtgaagaagtgggaatcatgggctgggaagggaaattttggaaaaggagcccattaaggcagaaaactcttttagagcagtggttttaaacttcagcaatggtgatccttttatacagtatcccttactttggaatcccaggaagtaaaaggcacattcttgttgaagttggggaggagcacttggaaccctgcttgcttaacttttttcttttggtccctgaggtgtagcatatttaaaatccactgttctagagggagtagtaagtagagggaagaaagatgatgggaaaagatcagacagaagggacttttgggtgagcgaaaagttctgtgtgcgcatggagagggaggggccccttttgggaatgagggaaatggaaacctgggactggggaaagtgtcctgtcgagcttaaccctgaagggatttgttcttcaggtacgaggaacagcaaattcaggaaaaagtggcgacctttcgactcatgttgctggagaaggatgtgaaccctgggggcaaggaggagaccccagggcagaggccagcgtgagtgttgcgctctccctcgatgactctggactctactctggctgctggctgctgctgctgtccttttccttacgtgggacttcctccctgctttcgtctgcctttcccatgccttatttggctcctgcttatacttgtgttctgaatatggctctgtcctttatatttccttcagacttttgcccttcttttctctagggtcacggagactcaccagttggcagaattaaatgagaagaagaatgaaagactccgtgctgcctttggcatcagtgattcttacgtagatggcagctcttttgatcctcagcgtcgtgcccgagaagctaaacaaccagctcctgagcctcccaaaccttacaggtatacaaggccaagaaaccactgtcagcttcttttcttgattgtaagctccatgctctatttttgtctttttgcgggctggtttcttcccaaactcttcagattttgttcttctgaagttgaggtgtccaaaaaaatgtgtccaagggttagtcacagtgggtcacgcgcgtaatcccagcattttgggaagctcaggcaggagatcacttgaggccaggagtttgagaccagcctgggcgatgtagtgagaccccatctctacaaaaagaaaaaaagctggttggtggcacatgcctgtagtccaggctgcttggagaggtggaggcaggagggtcttttgagcccacaagttggaggttacggtgtgagctgtgttgctgccactgcaccccacctgaggcaacagagcgagactcttatttttttatttttattactatttttttagactctgtcttttaaagaaaagaaaggaatgtttgttctaccacccatctctgctgcttttcatttttccctagccttgttcgggagtctagcagttctcgctcaccaaccccaaagcagaagaagaagaaaaagaagaaagatagaggacggtaagttagttggaaagtgactctgatagccagaggaccaatcctgtggtgtacctttctctctggaagtggacagttctggcttccacaaagcaggagatagttgtcagggaggagggagttaccattgaggcctcaactagaagaaatacctgagtttctcagtggggaagtgttgagtttgcagttctgctaattaagattggccagcagcattttggattctggaattttctttttcattttgaggtttgttgacttaaggagttacttgtgcttgttggagaaagaagaaataagtcctgggcttaggtctggggcattagtgctattaggacattcaagtgttttagaaacctttttaggagagagattgtaagtgggagggccaggaaagaagccaagcaggatgagcttgcttttgaatccatctttagcaggtcagagagcagctctcctcgacgggagagaaagaaaagctcaaagaagaagaagcacaggtatgaggtgggaatacttgaatgactggagaaggtttgctgaattcaggcagaggtgtttcttatgttttttcttctcttttttccaacaggtcagaatctgagtccaagaaacgtaagcataggtaagagctctttaactcatagggggcgcagtggcatgtggagtggtgatttttttttcttggagtgaagctcaattccttgatcttccttgtgtcaacactccctctttccatttcacttttggttttatttccttttttaaagaagttacttttaacaacctttccttatttcccaggtctcccactccaaagagcaaacgtaaatctaaggacaaaaagcgaaagcggtgagtgaatttgtggggaatttgcttaggaagtaagtgaacgccaccttagtgggagggagttgaatgagttatgtccctgactggtaaagggttgagggatacgtgaggagaatccagggcaggtacagcagtaccctgagctgtggtggtggtcttccttcaggtctcgaagtacaacaccagcccccaagagccgccgggcccaccgttcaacttctgctgactctgcttcctcctccgatacttcccgcagtcggtaaggggtagtccaggaggaagggagggagagggaatgatgggttaattaatttaatatttattgagcgcccacggtgtgctaggcgctgcacagaccattcggaagacacggtccctgccctctaggagctgacaggctaaagcaacaggatggacagacatatacatttccccttctctttttttttttgtttttgtttatttgttatttttgtttcgttctgatgtatatggactgccagaatagggggggtggtggtttgttcgtggtgtctgggggaggaaggaatccttaccctggcttccttaatcggggaaggcttcctgaaggaggtgggctcagaggtgagttgtgaatgaagcgggtagggagtgggctgggtggatggtttggggatgtttgggggaggtgagtaaaggggtagagggagaacgctctttgggattgtgttgggaaaagaagaaccaaagtggactgtacttgcatttcagtgaatgatttgagttgtgcgactaaaggctttttggaagagggttgtccagttaggaaaggtggatgggagttggggagggggttttctgttctccctttgagctgatttccttcctctcccacgtcctcaattaactcctgcaggtctcgaagtgctgcagctaaaactcatacaactgccttggctgggcgaagtccttcccctgcttcagggcgacgcggggagggagatgcgcctttcagtgaaccaggtactaccagcacacaacggcctagtagcccggagactgctacgaaacagcctagcagcccttatgaagacaaagataaagacaagaaggaggtatgttcctgagttggtgatgttcattggattgcaaatgtatagatttaggatagacatgtgatgtgaaagggagaggtaataacttattaaaataaataaattcagttttttttcctgcatttctctcctagttctcttactgcatctgcagaacttttagtgttgttactagactgaattgtgaaccctttagaatcaaatctcactggatgttaggttttatattgtgtcttgtttatacatagatagaactggaacaaacgttgtatcttatctgtgtactccgtatgatgcctctagtttcttctcttttttcattaaatgctggtcatgtctcaccaaaactttttaatccattgcgttgccaccaatagtttgaatgaaacactgaaatagtcttcagtagtcttctgttccaattttaagcattaatcatttcctcttgctttagtgattacagtctgaattcttggcctctatcatcaattttccatgtcatccagggttacctttccaaattacaagttggttgacctcagaaacttaactacttccttattgcttttgaattatatttaaggcttttaatagtctggtctttttctcatttcctgtactctacccatcctgggctgcttttttactcttcacacaaatcatgttctcacatctttattcatgctgtttcttttcgtttaatagagttattcttcaaaggtgaagttgccattcgctttaggaaactgcttatttttccatttaaagatagtttttttccattcttataacattttgtagtggtatttgttaaatgtagtagtgcattagttatttgcattttgtgtttcttttagttttaagattctggctatccatatattcatatgttttcaccactgtgctttatatgattccttgttattgaatgaaagtgatcgcttgtggtcagagggtgtgtaaaagaaaagttatcattggaaagggtgttgggatcttaggggtgatgtgaagttttggcgtttatgaatccctatccctgctctctcttccactcttagaaatctgcaactcgacctagcccctctccggaaaggagcagcacaggcccagaaccacctgctcccactccgctccttgctgagcgacatggcggctccccacaaccccttgcaaccacccccttaagccaggagccagtgaaccccccatctgaggcctctccaactcgggaccgttcaccacctaagtctcccgagaaacttccccagtcttcttcctcagagagcagcccaccatcccctcaacctaccaaagtttctcggcatgccagctcttccccagaaagtcctaaacctgctccagctccagggtcccaccgagagatttcttcttctcccacatctaagaatcgctcacatggccgagcaaaacgggataaatcacattctcataccccctcccgtaggatggggaggtcccgtagccctgccaccgctaagagagggcgatctcggtctcgaacccctaccaagagaggtcattctcgatcccgatctccccagtggcgtaggtccaggtctgcacagaggtggggaagatctagaagcccccagcgacgtggccgctctaggtctcctcagcgaccaggctggtctaggagcagaaatacccagagaagaggcaggtctaggtcagcaaggcgagggaggtcccactctagatccccagccactaggggtagatctcgttctagaacaccagcccgccggggcaggtcccgctctagaacacctgccaggcggagatcacgatccagaactcccaccaggcgtaggtctcggtctagaacaccagcccggaggggcaggtctcggtctagaacacctgctaggcgcagatctaggacccgatcaccagtacgacgcaggtctcgtagtagatcaccagccaggagaagtggcaggtcacgctctagaaccccagctagacgtggccgctcacgctccagaaccccagccagacgtggccgctcacgctctagaaccccagctagacgcagtggtcgctcacgctccagaacaccagccaggagagggaggtctcggtctaggacaccaagacgaggaagatcccgcagtagaagcttagttagacgtggaagatctcactctagaacacctcaaagaagaggcagatctggctcatcttcagagcggaaaaacaaatccagaacatctcaaagaagaagcaggtccaattcaagcccagaaatgaagaaatctcgcatttcttcaaggcggagcaggtctctctcttcaccacggtccaaagcaaaatctcgcttgtctttgaggcgcagcctttcagggtcttccccatgccctaaacaaaagtcacagacaccacccaggcgcagtcgctctggatcctcccaacctaaagctaaatctagaacgccacccagacgcagtcgctccagttcttctccgccacctaaacagaaatctaagacaccatcaagacaaagtcattccagttcatctcctcatcctaaagtgaaatctggaacaccaccgaggcaagggtccataacaagtccccaggccaatgagcaatctgtaacgccacagagacggagctgttttgaatcatcacctgaccctgagttgaaatctaggaccccttctagacatagctgctcagggtcctctcctcctagagtgaaatctagcacacctcccagacagagcccatctaggtcatcatctccacaacccaaagtgaaggcaataatatcaccaagacaaagaagccattctggctcctcttctccaagtcctagtagggtgacgtcgagaacaactccacggcgaagcagatcagtatctccctgctccaatgtggaatccagattgttgccaagatacagtcattctgggtcctcctcaccagataccaaagtgaaacctgaaacaccgccaagacaaagtcactcagggtctatttcaccataccccaaagtaaaggcccaaactccaccggggccaagtctttctggatcaaagtcaccatgtccccaagagaagtctaaagactcactagttcaaagttgccctggatccctctctctctgtgcaggagtaaaatctagcacaccaccaggcgagagctattttggtgtctcatctctgcaactgaaaggacaatctcaaacttcaccagaccacagatctgatacttcaagtccagaagtgagacagagtcattcagaatcaccatctctgcagagcaaatctcaaacatcacctaagggaggtcggtccaggtcttcatctccagtcactgagctggcatccagatctccaataagacaagatagaggtgagttctcagcgagtcctatgttgaaatctggaatgtctcctgagcagagcaggttccagtctgactcttcttcatatcctacagtggactcgaattctctcttggggcagagtagattggagactgctgaatcaaaagagaaaatggccttaccccctcaggaggatgctactgcatcacctcctagacagaaagacaaatttagtccctttccagtacaggataggcctgagtcttcactggtattcaaagacacacttagaaccccgccaagggaaagaagtggtgctgggtcatctccagaaacaaaagagcaaaatagtgcattgcctacgtcaagccaagatgaagagttaatggaggtggtagagaagtctgaagaacccgcaggccaaatcctgtctcatttgtcttcagaacttaaagaaatgtccacaagtaactttgaatcatctcctgaagtagaagaaaggcctgctgtgtctttgactcttgatcagagccagtcacaggcttctttggaagcagtagaagtcccttcaatggcctcatcttggggtgggccacatttttctccagaacataaagaactgtctaactccccactcagggagaacagctttggatcacctttagaatttagaaactcaggcccacttggtacagaaatgaatactggattttcttctgaggttaaagaagatttgaatggaccgtttcttaatcagctggaaacagatccatctctagacatgaaagaacaatcgacaagatcctctggacacagcagttctgagttatccccagatgcagtggaaaaggcagggatgtcttcaaatcagagcatctcttcacctgtgcttgatgctgtacccagaacaccctcgagagaaagaagtagttctgcatcttctcctgaaatgaaagatggtttacccagaactccatcaaggagaagcaggtctgggtcttctccaggacttagagatgggtctgggactccctcgaggcacagcctgtctgggtcctctcctggaatgaaagatatacctagaacgccatctagagggagaagcgaatgtgattcttccccagaaccgaaagctttgcctcagactcctaggccgaggagtcgttctccatcatccccagagctcaacaacaagtgtcttaccccccagagagaaagaagcgggtcagaatcatcagttgatcagaaaactgtggctcggactcccctggggcagagaagtcgttcgggatcctctcaagaacttgatgtgaaacccagtgcatcccctcaggaaagaagtgagtcagactcttctccagattctaaagccaagacaagaaccccacttcggcagaggagtcggtctggatcatctccagaggttgacagcaaatctcgactatcccctcggcgcagtaggtctggttcctcccctgaagtgaaagataagccaagagcagcacccagggcacagagtggttctgattcctctcctgaacctaaagctccagcccctcgggcccttcccagacgaagcagatcaggttcatcaagcaaaggcagaggcccttctcctgaaggaagcagcagtaccgagtcctctcctgaacatccgcccaaatccagaactgctcgcagaggttccaggtcatcaccagagcccaagaccaagtctcgtacaccacctcgacgtcgcagctctcgatcatctccggagctaacaaggaaggccagactgtcccgtagaagccgctctgcctcatcctcaccagaaactcgctctagaactcccccaaggcaccggagaagtccctcagtgtcttccccggagccagccgaaaaatcgaggtcttcacgccgacggcgctcagcttcatctccacgcactaagacaacctcaaggagaggccgctctccttcgccaaagcctcgtggactccagaggtcccgttcccgctcaaggagagagaaaacaagaacaacccgacgtcgagataggtctggatcttctcagtcaacctctcggcgaagacagcggagccggtcaaggtcgcgggttactcggcggcggaggggaggctctggttatcactcaaggtcacctgcccggcaggaaagttcccggacctcctctcgacgccgaagaggccgctctcggacacccccaaccagtcggaagcgttctcgctcacgcacatcaccagccccgtggaaacgctctagatctcgagcctctccagccactcaccggcgatccaggtccagaacccccctgataagccgacgtaggtccagatctcgaacttcaccagtcagccggagacggtcaaggtccaggacttcagtgactcgacgaagatcccggtcaagagcatccccagtgagcagaaggcgatccagatccagaacgccaccagtaacccgccgtcgttcaaggtctagaacgccaacaacacgccgccgctcccgttctagaactccaccagtgactcgcagaaggtccagatccaggactccaccagtaaccaggaggcgatctcgaagcagaacttcgcctatcactcgcagaagatcaagatccagaacatctccggtcacccgaaggagatctcgatctcgcacatctccagtaactcgaagaaggtcccgctctcgaacctcaccagtgacacgccgccgctctaggtcccggacacctccagctattcggcgccgctctagatctcgaacgccactgttaccacgcaaacgttctcgaagtcgctcaccacttgctatccgccgccgctccagatcccgtactccacgaacagctcggggtaaacggtccttaacaagatctcctccagccatccgcaggcgttctgcatctggaagtagttctgatcgttcacgatctgctactcctccagcaacaagaaatcattctggttcacggacacctccagtagcactcaacagttccagaatgagctgcttcagtcgtcctagcatgtccccaacacctcttgatcgctgcagatcacctggaatgcttgaaccccttggcagctctagaacacccatgtctgtcctgcagcaagccggcggctccatgatggatggtccaggtccccgaatacctgaccaccagagaacatctgtgccagaaaatcatgctcagtccaggattgcacttgccctgacagctatcagtcttggcaccgctcggcctcctccgtccatgtctgctgctggccttgctgcaagaatgtcccaggttccagccccggtgcctctcatgagtctcagaaccgcaccagcagccaaccttgccagcaggattcctgcagcctctgcggcagccatgaacctagccagcgccaggacacctgccattccaacagcagtgaacctggctgactctcgaacgccagctgcagcagcggccatgaacttggccagccccagaacagcggtggcaccttcggctgtgaacctggctgaccctcgcactcccacagccccagctgtgaacctagcaggggccagaaccccagctgccttggcagctctgagtctcacaggctctggcacaccaccaactgctgcaaactatccctccagctccagaacaccacaggctccagcctctgcaaacctggtgggtcctcggtctgcacatgccacagctcctgtgaatattgccggctccagaaccgccgcagccttggcccccgcgagcctcaccagtgctaggatggctccagcattgtctggtgcaaacctcaccagccccagggtgcccctttctgcctacgagcgtgtcagtggcagaacctcaccaccgctccttgaccgagctaggtccagaacaccaccgtctgccccaagccaatctaggatgacctctgaacgggctccctccccttcctctagaatgggccaggctccttcacagtctcttctccctccagcacaggatcagccgaggtctcctgtgccttctgctttttcagaccaatcccgttgtttgattgcccagaccacccctgtagcagggtctcagtccctttcctctggggcagtggcaacgaccacgtcctctgctggtgatcacaatggcatgctctctgtccctgcccctggggtgccccactctgatgtgggggagccacctgcctctactggggcccagcagccttctgcattagccgccctgcagccagcaaaggagcggcggagttcctcctcgtcgtcgtcgtcctctagctcctcctcttcttcatcatcgtcgtcgtcgtcctcctcctcctctggctccagttctagtgactcagagggctctagccttcctgtgcaacctgaggtggcactgaagaggtgagggagcttgacttttagaaatcttcagtgggggaggtattggggatgggttggggagtggggagggagaaaccatgtcacaggtgcttggctcttggaggaggtatggggaccttgaccctcaagctgggggtagaagagaatgctggggcagggggcggagggaggaggaatgggacagataaaagtctccgaaggttcattctctagaggataatgataagttttccgtctctacagaggacagaactagaggaaatggacttaattttacagcaggagggatggcagttagacctcaagaggaactccctgggctggaaggatcttcagaggtcatcccatccctctccctgcctccaggcaggacggccccttccccagccaacctgcactcacaggggcctccccaagctgcggctctccgaggaaggagactacccagcttcagcttccacacctgagcccagaggccttattcctccatcagggacattcttgaggtttaaccttgatcccttatgctgcgggccccagcctgttgcttctgttagcagaggttgggtcagctcgcaccactgctctccagagaattgctggctcacgtggctcggagagctcccagcgcctttctcaggcacccctccccccactgccgttcctccaggccaaggaaggtagggttggggctggggcagcttgtctccttgtgacactcctctcctcccacagggtccccagccccaccccagccccaaaggaggctgttcgagagggacgtcctccggagccaaccccagccaaacggaagaggcgctctagcagttccagttccagctcctcctcttcatcttcctcctcctcctcctcctcctcttcttcctcctcctcttcctcttcttcttcttcctcctcatcttcctcctcctcgtcgtcttcctccccttcccctgctaagcctggccctcaggccttgcccaaacctgcaagccccaagaagccaccccctggcgagcggaggtgagtgctgtcttgcctgagttgaaaggtgggtgggggagtgacttgtccagagaaggggccctggggtgtgagctccccgctgggtgtctcacgtggccttgggcatctggttgtgggggaggaggcacttgctctcctctccccatgctcgttgcaccctgttctggcgaagggctgcgccatccacagcggcgctcaggccaggaccagggggtccttggtttcttcctctccctccctcaacacatagcctgttcccagggttctagctttgtctccctgttgctactgccagggctctggtctggccaccatcatcttctcccgactctgtccacagcctcctccctgtctccccgtctccacgccattctcttccacatgtagccagagggacctttctaaaacgcacatctggctacttccctccactccacaaatccttcgggacgccctgtggcctgcaggacaaagccccacctctgcgggagtggcgtgtgaggctcttcaccaacgggccttgcccgccctgtgttctcctcctgcccgcccccacacatgccctgtgctccagccacacccagcgccttgcagtctaaggagagcccatgcctttggacatgctgttccttctgcctggaatttccttgtccgcctggtgaactcctcgttctgcaagactccgctcaaaacagcaccttcgagaagactgccctgccccttccctgccttgccccatgtccccctcccttgggtccccagagccacgcacatccagccctgcttcccacacacggggccgtgcgtgcctttcttcaccactgagctccttcaagggcagggactgtctttatctttgcatcccccgctgcaccctgtgcctgcccactgggcactcggtggatggtgtgcgggcggatgggtgagtgagcggacaaaggtgggtctgaggctggccctgtgtggtgtgaggtttggtggtcaggacctgggcgggtggtcctgagtgctggcccgtgtgcttgaaagggtgtggtgctattgggtcctactgtgttccccaggtcccgcagcccccggaagccaatagactccctcagggactctcggtccctcagctactcgcctgtggagcgtcgccgtccctcgccccagccctcaccacgggaccagcagaggtaaggccaactgcaggtgtcagcacccagcctgtctggccgccactgctttctacaaagaagaaagctttgcggttgtggctatgtggtgcctgaggtggtgccaccctgtggcctgatgtctgtcctgtgttgcagcagcagcagtgagcggggttcccggagaggccagcgtggggacagccgctcccccagccacaagcgcaggagggagacacctagccctcggcccatgagacaccgctcctccaggtgcgtgtcctggaaggctgatgcccccttccgggagccagttgtggtggtgggtggcggccccattttgggagtggcccagaaactggccttgagggctggggtgggaactccctgttgacccatatcttctcttgcaggtctccataaattgtctttgggggattccaccacacccaatgctctggagccacaaggagtgtcccttcttccccagcagagccgtgggagggtccttgtctgctctcctttgaaccttggcagcccttggatggagggctccctttccctccccttttttttttctttgttcctgtgaaatgttaatctccgtgagttcttcctggttcatgtgttctggggggtttggggtgggagggaatgcagatgggagttgggggaggggaggatacagttcaggataccccagcctggagtcagggccagggaggcatggccccacttgtatccagaagttcccaggggtgattgtgatggtggttgggactggaggttgtataaggtgttcttggaaggaaggggcaggagttggaattagttggtccctactgtcccccatgaggttgtgaacccctccccccaacttttcatgtttcttaaaggcattttggttttttaaaatctgtacagcaagagcaactttttctgtcaaataaaaatgagaaatgcaggaactgggtctgtagactgtttattaaaggtgtgttaagggggcagccacttccctccgtgattacagcccccagcgtgggtggacctgtgtgggtccgtcttggggttccctcgttgaacatgctgtcaaaccagg

SEQ ID NO: 81897 - DNA, 1035 bp, Homo sapiens
agccagccgtggtggcatggtcctgtagtcccagctactctgaaggctgaggcaggagaattgcttgagcccaggagttccaagctggagggggctatgatagcgcttatgttgggtctgtgccactgcatgcctgggcaacatagcgagaccctgtctctaaaataaaaaaatgttcaaatgcctagtccagggtgacagagctgggattgaaagccaggtctgcctatctccagatagctcagtggctcctcaaattagatttgcctggagaatttggataaaaccggattctaaagtcccaccctgggaggttttgatttagaagttcttggatataaccctggaatctgtgtatttgtcaagcagcgtggtggtcctgggccacactgagggaactctctcttccctcctctgacttcccgtgtagttgctggtcagaagtctttgggacttgccccatgtagggcctctcccaagatcctgcttctctcctcaggatgaccaactcttggatgatggcaagacactgggcgagtgtggcttcaccagtcaaacagcacggccacaggccccagccacagtggggctggccttccgggcaggtgagaggcccaccacccactgggctgggtggtagccaagcaggttgggaacactgttccaaagaaggtcatcagggagcctggagttgaagccttcagggcagtgtcttcctcgtgcctaaagggctggcaatatcctttcacaatgtgtttgtttcctcatttttttttttttaaaaaagaagcaaccaaatgagatgcttacagaaaccaaagcttattttgtgaagccagctcacatttacaggaggctgagtgagtgcctggctccgtgctctgcatgttactctgtgtgtggcttccactgccctgtctcatcctctcagtagccctgggaagtccacataccatcatccgtgttctgcagatgaggacacaggcttaccagcagtcacgtagggagccacggttaggatgctgactgccgggc

SEQ ID NO: 81898 - DNA, 1076 bp, Homo sapiens
gcggccacgactacgccgcgacaagacggccccgagctcggtgtgcccgagcttggagcccgccggaccgcaccaacacggggacctcccctctgccagtcccaagacggcgccaccgcctccaaaggccatgcccgccgtcgggatggcggccgcacgcccctcgataccgcccgcttccagatcacttaaaatggcggcggctgcggggcggcacggggcggggctgcgccgggggaagggacgcggcgcggggcatgctgggccacgcgcgggctgccgggaacggggcggagcgcggctgcgccggcgcgtcgaggggagaggcagcagccgcgatggtgagcgggcgtgggggaggggcggccgggccgggccgggggcggcggggggcggctgggccgcgcggggggcccgggcttcgtgctcacgccggcccgccgcccccaggacgtgttcctcatgatccggcgccacaagaccaccatcttcacggacgccaaggagtccagcacggtgttcgaactgaagcgcatcgtcgagggcatcctcaagcggcctcctgacgagcagcggctgtacaaggtgggtcccgcgggcgggccgaggggagcgggtacccggcgccgggcacggggctgacgcctacgctgtccgcgatgtaaacagtagcggccggcgacgcctgcgggcgcccgagccgcgggactgggacatccgttgtgcgggtgaagcgcgagctgcgctcgccgcggggatctccggtccgggggcgatgtttagacctcgtgccgggccccgggcgccgagggcaccgtggcatgcaacccctgcaacggtatcgcccgcgccgtgcagttgacgaaattgaggttcggcttggtcgcttaaccagccaaaggtcattggcagcgccagggttcgaaccacgaccccttaatccccacccttcttcgcaggcccatcggaatcacgctgtccccccggacactccttcgggtggagggtggggaactcagtgaatgcaaagaaagtcaggtcccactcgttcttcaccaagcaaccgtttgttatta

SEQ ID NO: 81899 - DNA, 1002 bp, Homo sapiens
cactttgggaggtcgaggtgggcggatcacgaggtcaggagattgagaccatcctggctaacacagtgaaaccctgtctctactaaaaaaatacaaaaaaagattagccaggcgtggtagcgggcgcctgtagtcccagctactcgggaggctgaggcaggagaatggcgtgaacccgggaggcggagcttgccgtgggccaagatcgtgccaccgcactccagcctgggcaaaagagcaagactctgtctcaaaaaaaaaaaaaaaaaattagctgggcgtggaggcgcctgcaatcccagttactcgggaggctaaggcagaattgcttggaggcggaggttgcagtgagccaagatcgagccattgtactccagcctgggcgacgtggcaggaccctgtctcaaaaaaaaaaaaaaaaaaaaaaaaaagatggctggtgggagagtcttgggttttgggtcctaggttcaactttcagccctccctgatggtagctctgtagcctcagaaaattggcttaatttctggagtttcaggagctttatcctaaggtggctgtgataacctggattgttgtgtaaattgcacatttggggcttggcaagtggcagatgggagttctggctgttttattaccagtaactgggacatgggcttgggttcgaggaggccacgtggctcctgacacagccttaaggatctgaggtggcccctgccctgggcacctggggtgggaagggaggtgcagggaacagggagacttatttttcactgtgatcttttcgaaccatttgaatgtattataccttgtgtgttttattcaaaaatgggtagatttgttaaacaaaacctaaaaaaaatatgagcaggagtgacagaaaacagagaccactgagtctgagtccaggttggcccctcccggtgtaaccttgatgcaacattgagcaggcctgagctggggtgacctcactgacagctaggagaggaatgagactctcc

SEQ ID NO: 81900 - DNA, 1112 bp, Homo sapiens
gtacggtggatcctggacactcttggtctacccccacgccacccacactgcttctagtctcacggggttctctctggccaccccaacatcatgtgaccttttagttcagcttgttaaaagtcagctgccagctggctgaggggtaggtggacagggagccaggaggccctggtgcccagcccagaaaggctcagcccctgccctgggggatgcacctgcaagcatgaggtctgaggggttgggagagtccttcaggagcattcagggtccagtgcttgccaggccacgtgcccagtcatccccagagcccttggaaagggccagccagcgtgggagtctgggctgcagggcccagaggggaggagggcagggaccaccgtgcagcgtgctaggggatcgcagattcctggtggggcctggctgggggatacaaatcagacccccagccctgccacccaggcccctgtggccccactcacagtgtcactttccctttcagatcctctccggcccctggagttcctgaggacttccctggggggcaggttcctggtgcacgagtccttcctctacaggaaggagaaggcggctggggagaaggtgtactggatgtgccgggaccaggctcggctgggctgccgcagccgcgccataacccagggccaccgcatcatggtcatgcgcagccactgccatcagcctgacctggcaggcctggaggccttgaggcaacgggagcggctccccaccacggcccagcaggaggacccaggtacaggcaggctgtggggcagaggcagggctgtgggcatcctcatctcttccagctcagaactgatgccccaggccaggcacccactgagcagactgcttttgtgcacacacaaattattcatataaacagaatgtgaaaccagtctttgtttttttttttttttttttttttgagactgagtcttgctctgttgcccaggctggagtgcactggcgcgatctcggctcactgcaagctccgcctcccgggttcacaccattctcctgcctcagcctcccgagtagctgggactacaggtgcctgccaccaagcccagctaattttttgtatttttagt

SEQ ID NO: 81901 - DNA, 1021 bp, Homo sapiens
gcggggggtgcagtgagccgagatcgcaccactgcactccagcctgggtgacagagcaagattccgtctcaaaaataaatgttctagactgtggcatccccaggaaaaaggattccaggaatcctgaactttctgtgttatctatttccaccatgttttgatgtgtgcaatgaacatgtgtctctttgtaattagggacatcaaagacgtcagactggatggcgagtcccagtgaggcgatgtgggcagaggagctccgagccgcccacccaaggtggcttcacatccacacaggcacttcccatccacctaggtttggcttagcagaaacttcttttcattcttccaaagcatcgatggtcttcgcgtctcctcaggaggtctcccaggaggaattcttggatggtgtcctcatgtcggcggagaacagtgctcagagctggcgcttgcagacgcagctgtcgtggggcagggcggtggcgccttcctgacctttggaagacatgacaaagctgcctggacacggacgcccctgctgtacggccacagcacccctgggtttgcagagcacgcagccttcctagggctttccacctggcgaggccccgctctgctcagcacggtgcaaagtgaatgctgctgtcttggagcctgggcacgtttggggaagttcctgcttcaaactgagctgccccgcataggccaggtcaacccacaccaatctcttctggacaggtgctgggtaggccttcctggtctctggccgcctgctgccagggtgtggccatccccagcaaccggagctggccaaaccagaggcctcgctccgcactccacactttcctttctgtgctccttccaagttaaattaaaccccctctccacgattcccacggcaggcgtcattcccgagatgggagccagtccaggggtcagcaggagccagcgctgggcacacgtgccctggctgaggccagcggcatcctgggtggcccaggtccatcctgggcagcaaaggcgt

SEQ ID NO: 81902 - DNA, 1172 bp, Homo sapiens
agcagacaagaagttccagaaaggcttacatttactaaaagtttatttcaaatctgcctccaagtccatgtgttctgaaaaggacagagggggccttggagtgcagccagatggaaggactttgaaggctgtccaagtgctgctttcagagtgcaccaagtttttattgtccctgactgtggctccctgcctgtttgtcaggcgggagcctggagcctgcacagggacagagctggtttcatccggcactccctagccctggacaccctccttgtctcgcctgccctcctgcaggccttcactctcccctgaggctgtcctggcccggactgtggggagcacctccaccccccggagcaggtgcacacccaggtaagcaggtccaggggctggggtgggcagggctagcttttggatcctgagtgtcactactctctcctcccagggatgccctggacctaagtgacatcaactcagagcctcctcggggctccttcccctcctttgagcctcggaacctcctcagcctgtttgaggacaccctagacccaacctgagccccagactctgcctctgcacttttaaccttttatcctgtgtctctcccgtcgcccttgaaagctggggcccctcgggaactcccatggtcttctctgcctggccgtgtctaataaaaagtatttgaaccttgggagcacccaagcttgctcatgtggcaacatggcccttcctgtccctttattgatgtcatccagggtcttaacgcccctgaggctgagccctgctgcagaacccagcgctcctggccttgggccagcagctgaagccccatgctgtgtggagcaaagaggtttcctgagcaggcacatcccccggtgggtacctggagctgttgggagtatggcactcaaggtggagggcaggcacggcccaggggtcccaggatctgaggccgctgagctccctgtgtcagtttcctggaagaagcagctgcagcccttgtgcctgtggccagctggtacaagacgggtccacgcccccttggtccttttgtcctgaatgccttactccatagtctctgggcagagggagccagggcgggcaagcttgtggctgctgggagggctggtatgcagggcagaaagatggagatcaggaagactggccacagg

SEQ ID NO: 81903 - DNA, 3832 bp, Homo sapiens
ttccgggttttcactttggaattggagataagggatcgtgggcccgtgtagtctcggaagaggttgtgtagtttaggatcaaagagctggccgtgatgagggcagggatgcaggcgcagcccgtctgactccaaactgccttgctcttaacccgactgcaagaccctcaagaacacgggccccatggttttcctcttatgtttctatcatctctaaaatacaacagcctggtgggcaggtgagtatgaatctgtcctctgccttttcttggtaggtgcttattgctcccattgccgtttaaagtagaataagtgtgtggtatagacatagctctcttctgtggcctctttggagccacagggccaggtggtatcagagtggacatgctgccctgtactcagcctctgtctctgcccccagggcctcctgcactggccatgcccatgcccacggagggcaccccgccacctctgagtggcacccccatcccagtcccagcctacttccgccacgcagaacctggattctccctcaagaggcccagggggctcagccggagcctcccacctccgccccctgccaagggcagcattcccatcagccgcctcttccctcctcggaccccaggctggcaccagctgcagccccggcgggtgtcattccggggcgaggcctcagagactctgcagagccctgggtatgacccaagccggccagagtccttcttccagcagagcttccagaggctcagccgcctgggccatggctcctacggagaggtcttcaaggtgagtgaggggacggcttctaggcccatctgggggacctcctttgtgtttctgcacctcccttggcaggacagtgtcctgggcagcctgatccccttccgttccctacagcctgtccctgctgggctcacaggctccctccacatttgacttggctgctcccatcatccccaatgcaggcccctccaggggttgctctgtgcatactggccccttgtccagagtctggcacgccctgcagcagcccctgtgccatctcctccggccctggcgccagctgtgcagcgtccttggcgagtcggcccagcctctggcactggccctgagtgcagtgcctggccagccctccccaggctggcaggctttgagctaccccctgcctgccatcttgcttttcttaaacacagtttccagtcatttatattttcttttagagaggagttttcccttgtatgagtcctgtatgaagacaattttgttaaaaagtacaaacaacattggcccccaggtcagctttctcacaggggagcccacttttcacaccacagcctgggctgcctgtgttgctctgcagctgctttttccacctcgtgacacatccaagaggtcccctggggtcagtgcaggtcggccctggctcctccgtcgctgggtctccacagacccagcccgagggatggaggtttgtctggttttgttattaccctgggcaggggtctgagacagatgccagctacaccaccgtgccccgtgtgtgaacccttaatggggtctgccaggttgtccccctatgtgattgtgccacttgtggctcaccctcactgtgtgcgtgggtaccacctcccttccaggtgcgctccaaggaggacggccggctctatgcggtaaagcgttccatgtcaccattccggggccccaaggaccgggcccgcaagttggccgaggtgggcagccacgagaaggtggggcagcacccatgctgcgtgcggctggagcaggcctgggaggagggcggcatcctgtacctgcagacggagctgtgcgggcccagcctgcagcaacactgtgaggcctggggtgccagcctgcctgaggcccaggtctggggctacctgcgggacacgctgcttgccctggcccatctgcacagccagggcctggtgcaccttgatgtcaagcctgccaacatcttcctggggccccggggccgctgcaagctgggtgacttcggactgctggtggagctgggtacagcaggagctggtgaggtccaggagggagacccccgctacatggcccccgagctgctgcagggctcctatgggacagcagcggatgtgttcaggtggggaccggggcacgccaggtgtttggcaggctgtgggaggcccttcctgggacggaagctccattccccaggagggaagctccaccctagcccaggacacccggcctcagagccacaaggctgagacgccatccctgccctccagtggagagcgtctctggtcaggctgcctgtgagcctcgaaccctccagagccactttgtgtaacctgcctcctcacagctccacaggagaaacaattgtcactccatttacagccagattaagggccttgccggagcccactgctagcaagtggcatagctgagactggccctaggtgctgggttccagggtccacactggtaaccactgccctgatcatcaggatagtaatacctgccagcagtaactgtggtgcctgtccatcagggcactgggaggactcaccactgtggcttgtgggctccctgggcacagagcccatattccatgatgtccccatcctgcccagggttcatgatcaggcctgttggggtgtcccttccccctgcttccgcccctccctgactgatgaagacagcagccctctcccacccacctccaagaggcagccctggactgggtctgtgtcccagggccaaccctgcccctttctgtccccatcccgtccctgccagtctgggcctcaccatcctggaagtggcatgcaacatggagctgccccacggtggggagggctggcagcagctgcgccagggctacctgccccctgagttcactgccggtgagtaggtgagggcgggagggggtgctgccacgggctcctggggagatagtggctggccatggaggcactgctgggctcagggtgcagtcggtgttctgggaccccgatgtggcccttcctcatgggcaggtctgtcttccgagctgcgttctgtccttgtcatgatgctggagccagaccccaagctgcgggccacggccgaggccctgctggcactgcctgtgttgaggcagccgcgggcctggggtgtgctgtggtgcatggcagcggaggccctgagccgagggtgggccctgtggcaggtaagctcccgacagtggcggctgcctgccctgctccccagccccgggggtccgcccacccacatcctgagctcctctcccccacaggccctgcttgccctgctctgctggctctggcatgggctggctcaccctgccagctggctacagcccctgggcccgccagccaccccgcctggctcaccaccctgcagtttgctcctggacagcagcctctccagcaactgggatgacgacagcctagggtgggttcaagtgcagggtatggggggctagggggaaggtgggggatatcaccggggctccatggagattcgtggtgaatggggaccactcccacaaacctggcccccatcacatcctggggaaggggaccaagactgggggtgtgtggcctggccaggcttaatgcagctgggcatgtggactggccgttcagggcatggcttcacacttagggcaccagcaccccagggagtggctggccgcgcagccccgaccccagtggaggctgccagtgcccagggataaaacattgtcccttctctgggaagagaaagcctctggagtctggggagccctgccctgggaacaagtccttggtccctggggcctggtgtcttga

SEQ ID NO: 81904 - DNA, 2417 bp, Homo sapiens
aaaccccgtctctactaaaaatacaaaaaaattagccgggcgtggtggtgagcgcctgtagtcccagctactcgggaggctgaggcaggagaatggcgtgaaccggggaggcagaacttgcagtgagccgagatcccgccactgcactccaggctgggcgacagagcgagactccgtcttaaaaaaaaaaaaaaaaaattagccgggcgtggtggtgtgcacctgtaatcccagctacttgggaggctgaggcaggagaatcgcttgaacctgggaggcagaggttgcagtgagtggagatggcaccactgcactctagcctgggccacagagcgagactcctcgtctcaaacaaacaaacaaaacaaatggacaagttttgagccttaaactcagggctagaattgaaccattctacacggaaactgcttggaaatcgcaccgtcctgtcatcctgctttttgccgccttgcagcctgatcactggctctggccttggactgtcattgtataggtttcatcctgttatctttcatttgcattcaggatagccagggcagggctgcttgcacagtcactgtcatcagccagtgcctgtcacataactagaaagaataataaatgctaaagcattaagtgtccattttgcccacgagaagtgaggctcagggagcatgtcttgactgagttccaggatgtgatgaccactttccagggtgcatgcccctagagtcctgtccacatgtggcctgaggtctgggcctgccaggcctcaccttgttgtgcttctgtcccaaacacagtgcagctccttcaacctcgccatggcctctgccggaatgcagatcctgggagtcgtcctgacactgctgggctgggtgaatggcctggtctcctgtgccctgcccatgtggaaggtgaccgctttcatcggcaacagcatcgtggtggcccaggtggtgtgggagggcctgtggatgtcctgcgtggtgcagagcaccggccagatgcagtgcaaggtgtacgactcactgctggcgctgccacaggacctgcaggctgcacgtgccctctgtgtcatcgccctccttgtggccctgttcggcttgctggtctaccttgctggggccaagtgtaccacctgtgtggaggagaaggattccaaggcccgcctggtgctcacctctgggattgtctttgtcatctcaggggtcctgacgctaatccccgtgtgctggacggcgcatgccatcatccgggacttctataaccccctggtggctgaggcccaaaagcgggagctgggggcctccctctacttgggctgggcggcctcaggccttttgttgctgggtggggggttgctgtgctgcacttgcccctcgggggggtcccagggccccagccattacatggcccgctactcaacatctgcccctgccatctctcgggggccctctgagtaccctaccaagaattacgtctgacgtggaggggaatgggggctccgctggcgctagagccatccagaagtggcagtgcccaacagctttgggatgggttcgtaccttttgtttctgcctcctgctatttttcttttgactgaggatatttaaaattcatttgaaaactgagccaaggtgttgactcagactctcacttaggctctgctgtttctcacccttggatgatggagccaaagaggggatgctttgagattctggatcttgacatgcccatcttagaagccagtcaagctatggaactaatgcggaggctgcttgctgtgctggctttgcaacaagacagactgtccccaagagttcctgctgctgctgggggctgggcttccctagatgtcactggacagctgccccccatcctactcaggtctctggagctcctctcttcacccctggaaaaacaaatgatctgttaacaaaggactgcccacctccggaacttctgacctctgtttcctccgtcctgataagacgtccaccccccagggccaggtcccagctatgtagacccccgcccccacctccaacactgcacccttctgccctgcccccctcgtctcaccccctttacactcacatttttatcaaataaagcatgttttgttagtgcatttggtgttgcagcgggttactgagtgcccaccctggctaggggaagagatgggcataagtgagtcacgatcccctctccccgtggcttgagtgagcatacccaccaggcagaacctagagccagaccttggcctgacagccaccaagggaggccacctggctgtgcctgcccagccccagcggcggcgcacagattagagggagcccagttacaaatgctctttatttccaactcgagggtggggatgttggggagagggaggtgatgggcaggccctccct

SEQ ID NO: 81905 - DNA, 1327 bp, Homo sapiens
tgccgtcagggacagggtctctgcccctcctccggggcggtggtccagtgacgtcaccgcttctttaagacccccgcctccgcccctgtcccgacactcggcctaggaatttcccttatctccttcgcaggtgagtccggggctagtgtgcgtgttggagagacgcctcttggggccgggtgcagggtggtggcggcgtgggtaggggtgcgtgcgaactcgggctgcggccacctggatgggcgagtccctgagggggtcggccggtccgcgcccaagcctccgaggtgatagggtccttcggggctcccaagggttaaacgcccctcccccctccccagggacaaagactccgaaacccctggcgcccctcccccacctgccttgcctctcggggcggggcgcccctcccccctccccctcacctgggggagcggaccttgcggccactgcagctatagaacccctccagggcgcgcggctcccaggctggggtggtcgggtgggccggggcgccctcggacagagtctttttcatgcagtgcatgaaaaagaaaggggcaggggcacactcagaggggagaggcctgggcgcctataccagcgcggccccgaccctaactcggccagaggcctaagggccggacctgagcgctggggcaccgtgccccagccagtctccccaaggtggtctgctccgcccaggcctggggcccccggctaatgagtagagcctgccctccgaccgctgccggccgggaaaagtttaggtccaagccgtacaatgaaagtactctgggcagtgggaggccacagcccggccctagtcagaagtgattccctccacgacctccaacactgaggggacacaggtgcaggccaggtggcggtgggagaactggtgttgaggggagtctagcacggcattttcgtctagaattcataggaaaaggccctcagccttgaggctatgctctccggcgcctagggcaggtcagaagggtggggccagggagttatccactggctttgggggaggaactgcttttagatgggggattaatgatgcttttcttcatctctcctggtcctggtgtctgccagcctggggtgtggaaccaagttgtgagggacattgggtggtgggaggaagcttaggatctccaatcttagtgttgaaattaacaagttttggttgggcacggtggctcacacctgtaatcccagcactttgggaggcttgaggcgggcagatcacctgaggtcaggagttcgagacccgcctggccaacttgatgaaaccctgtttctactaaaaatacaaaaa

SEQ ID NO: 81906 - DNA, 1111 bp, Homo sapiens
tgatcgacgagttggggaggccgtcgagaggcactagggtctgtgccctctataccatgtggggtgcccccttccatccggtgacttcagtgcccagctatgcggggggagggactggggtcgggcccggtgcccaggagtgagtcacccgccggcggcaggggggttgtggggacctgaccccccccacccccagcgtcccgcgctacgccctccctcccggagctgccgtgtcccggtcgggccgtgcggtcacctgtgaggaatgcgcggggagggcgccggtgactcacgttattcgagccggccgaccctgacctcagaccccagaatagccgagtcccgcccccagcctctgacccgaggccccctccccaggcaccgccccctgctcccgcggcagctcctggagcgcggacctggacaagtgcatggactgcgcgtcttgcagggcgcgaccgcacagcgacttctgcctgggctgtgagtggggggcagggccagtggccagcggaccccagactgggagggagggtggctggtgcgcagagcggggccgagagctttgcatctgggaaatcattcgggaggaggtgggagctgggagggggctccggtcagggaggaggccacgtttgggagaaggcagaaggctcagtcttagggggcggggctggcctggagaggggcgaggtctgactccgagtcccgcccccaggcgctgcagcacctcctgcccccttccggctgctttggcccatccttgggggcgctctgagcctgaccttcgtgctggggctgctttctggctttttggtctggagacgatgccgcaggagagagaagttcaccagtaagtgtgccctggcctgcccagccctgtcagcactcgaccttttctctgctgctgacgaccccacctcttatcttgcagcccccatagaggagaccggcggagagggctgcccagctgtggcgctgatccagtgacaatgtgccccctgccagccggggctcgcccactcatcattcattcatccattctagagccagtctctgcctcccagacgcggcgggagccaagctcctccaaccacaaggggggtggggg

SEQ ID NO: 81907 - DNA, 1023 bp, Homo sapiens
agtctttccctgcagacagaggtgttccaggccttgcagcggctccatatgaccatcttctcccagagcgtctcaccatgtgggaagtttctggcggctggcaacaattacgggcagattgccatcttcaggtaccctctgccgctgtccacccattagccctggcacttggccctcatgggacggatgcccccgtttctgactcctgggtcccctccgctgtccctgcagcttgtcctctgctttgagctcagaagccaaagaggaaagtaagaagccggtggtgactttccaaggtgggtatacctgtggagtctggcttcaggactttgggtgggattggctcactcagttctgcatttctctttagcccatgatgggcccgtctatagcatggtttccaccgatcgacatctgcttagtgctggggatggggaggtgaaggcctggctttgggcggagatgctcaagaaggtaaggagtcgagcttgggaaagggctggggtgcctggacccagagagagcctttgaggtcacctggtattttctcttttgaagggctgtaaggagctgtggcgtcgtcagcctccatacaggtgagcagggccacgtggatagagggtgcatcagggtgaagccacttcctcactgaccttgcctttccttccccaggaccagcctggaagtgcctgagatcaacgctttgctgctggtccccaaggtctgagccccatgtgactgttcttggtccaaactttgatccttcaccctctgcctatcctgatttgacattgactttctgcctcatcctgctcctccacaggagaattccctcatcctggctgggggagactgtcagttgcacactatggaccttgaaactgggactttcacggtgagcagggtcctggagccctagagcaggtctaggtcagggagaggcactcttcctaggtctcctcctgacatcgcccctctacatgcagagggtcctccggggccacacagactacatccactgcc

SEQ ID NO: 81908 - DNA, 1073 bp, Homo sapiens
ggcattcctgggtcgttagaggacaggcctgactgcgaagctgtgccttgcccctctcccacccgcagtttctcaccccgttctgctcccacaaggcccccctacagtcactgccacactggtggggacctgggacccagacccggaaccagcccagatatcacccctgaggacccatgcgccacgtcctgggtggtggaatcagtggctggagggacgacccttgctctccaggctgttaaccttttccgttgctcccccgccacccacctcctcctccccaggccacccaacttgggcacctccctgggcccagaactgccttccattcaatggggaacccttctatccccaagaaccccttccctgcttgcaccctggagagaacagcttgactcccatcaactcaacgctggtggaaagacagggaccgaaccctggctcaggcctggtcattgcctcctcagcactccctcctgggaggccttagctctagagtgaggggtgggtggaacctgggggcacctcgttcaccctgtccccactccccacagttttaggatctaaatgattgcctctggaactattcttctagactatcccacatcagaatcactgggaaatttaagtttgcagatcccacactcaccctgaatcctcactcagggtggggtcaggaatctgcattttaactagtcgcggggattgtggggggcagtagctggctgtttcgtggcatttctgtggctctgcagtgttcctccaccccaggaccaatatgttcaggccacaccgatggcctgaaccccatgggtagagtcacttaggggccacttcctaagttgctgtccagcctcagtgaccccctagtgcttcctggagctgaggctgtgggcggctgtcccagcaaccatgcgaggggttgccccagttgctcatacaaacagatcagcatgaggacagaaggcaggagactttggtcagttacctgggaattctgggctgccaggaaacgatttgggcctctgtcagtttcttttccatgtatgaggagggggaaatttgtatattag

SEQ ID NO: 81909 - DNA, 1661 bp, Homo sapiens
agtgcagtggaaccatctccgctcactgcaacctccgcctcccgggttcaatcgattctcctgcctcagcctcccgagtagctgggaccacaggcatgcgccactacacccagctaatttttgttttggttttttttttttttttttgtagagacggggcttcaccatgttggccagggtggtcttgaactcactcctgacttcaagtgatccgcccgcctcgggctcccaaagtgctgaaattacaggcgtgaaccactgtgcccggccttttacctaccagctttgcaggatcctgggtttctttccacttccaggccaatcaggttctggtgattgatagtggccctgggaataggcctgaccgtccctgttttgtcttgtttcccaggattcggaagcagaaccccagacaaggaggaatttaaacaagaagagcccaaaggggctgcctggcccactcccatcttagcagagtcccaggcagatagtcctggggtgccgggagagccttgcgcccagtcgctcggacggggcgctgcggctagcggccctggtgaagatgggtcccttcttggcagcagtgaaattttggaggtcaaagtggctgagggcgtccccgagcccaatccggagttgcagttcatctgcgcggactgcggggtgagcttcccgcagctgtctcgcctgaaggcgcaccagctgcgctcgcacccggctgggcgctccttcctgtgcctttgctgcgggaagagcttcggccgcagctccattctcaagctgcacatgcgcactcacacggacgagcggccgcacgcctgccacctgtgcggccaccgcttccgccagagctcgcacctgagcaagcacctgctgacccactcctccgaacccgccttcctgtgcgcagagtgcggccgcggcttccagcgccgcgccagccttgtgcagcacctgctggcgcacgcccaggaccagaagccgccctgcgctcctgagagtaaggccgaagcgccgccactgaccgatgtcctgtgctcccactgcggccagagcttccagcgccgctccagcctcaagcgccacctgcggatccacgccagggacaaggaccgccggtcctccgaaggctccggcagccgccgccgggactccgaccggaggcccttcgtgtgcagcgactgcggcaaggccttccggcgcagcgagcacctggtggcccaccggagggtgcacacgggcgagcggcccttctcctgccaggcttgcggccgcagcttcacgcagagctcgcagctggtcagccaccaacgggtgcacacgggcgagaagccctacgcctgtccgcagtgcgggaagcgctttgtgcgccgggccagccttgcccgccacctgctgacccacggtggccctcggccccaccactgcacccagtgcgggaagagtttcggccagacccaggatctggcccgccaccagcgcagccacacgggcgagaagccctgccgctgcagcgagtgcggtgagggcttcagccagagcgcccacctggcgcgccaccagcgcatccacacaggggagaagccccacgcctgcgacacctgcggccaccgtttccgcaatagctccaacctggcccgccatcgccgcagccacacggg

SEQ ID NO: 81910 - DNA, 1140 bp, Homo sapiens
tcaccatggtagtcaggctggtctcaaactcctaatctcaagtgatccacccgtctcagcctcctaaagcgttgggattacaggcgtgagccactgcacccggccagaagcccttttctaactccctcctgcaaggccttggcatggcctctttagaggtgacatagagacccagcttcctggagccagttctcctcctgccctcgtggggaagccgcaccaagaagttgagaggtgtgaggagagtggagtgggctgctgggagccaagagggaaaccaagacttggagctaaagctttgagctggggagggggcgggggggccagagaaccagccagtgaggaaggcctcggggaccctggagaccaggcttccagaggcagggaagtgacgggccagatgcaggcaacagggagcacagaggttagacttgtggtgcacttcctgccagtgatggagagaggccccaggtttctagggaggggtggtcttccttcagagcaccagtggaagttctcggcttcccctcacctgggctgtagggtccgttctcacggtggtctcaaagcccagggcccagcacaggccccccagcgcctccacgtcatgctgggccccaggccggccttggatcacagccaggaggagggcagccctggccttggacaggtcatactgtgtgctgggaccgggggccggctgcagagagggttaagacacatctaaagtggcctgagaggactccagctcctggcctccccggccggggccccccctaagcttctgtcccactggaaactgtggccatgtgattggatccctgccctgcccccctcacctcaggcctccagggctccacgcctcccaggcacagtgcccccctcaaggagctccgaaggacggggcagcaggtgccccctgcggactcttcagccaccctgcggaagagctggggatggggccgagaaaagactcagccaggcttgtggcttctatagtctcttcagggtcacctgccagaatgcagacaggaggaggccagcaaaggacagacaggcaggatggcctcaagcagggcccaggctccagttcaggctcaaggttatggacttccctgggcatggatggcctcgagtgga

SEQ ID NO: 81911 - DNA, 3935 bp, Homo sapiens
ctcctgctggcgccgtccaaccttacatgggttcagggcgccttcgtaggcgggcacggctggtttcgggctaaggcgctctggagacctgacgatggcgtcgggcccgggctcccaggaacgggaagggctcctgatagtgaagctggaggaggactgcgcctggagccaggagctgcccccacctgacccaggaccgagccccgaggcctcccacttgcgcttcagacggttccgcttccaagaggcagctggtccccgggaagccctcagccggctccaagagctttgccatgggtggcttcggcctgagatgcgcacgaaggagcagatcttggagctgctggtgttagagcagttcctgaccatcctgccccaggagatccagagcagggtgcaggagctgcatccggagagcggcgaagaagcggtgacccttgtggaggatatgcagagagagcttgggagactgagacaacaggtgagagagagagagagctgttttatctgtggtttgtttagccctgagcactgggacattgcgcccccggtcgaattcaagtaaattgccctgagtagaccttacgtggggaagaggacttgtgatttaacctggaacactcatcctccagattttcccccaaatgaacgaaagcagtgaagagtgccctgtttccacgcggaggcggtgtccctgcaacagttagtgttagccatggagttagatcgccagcgttcaaatcctcaatctgctagtactagctttgttactttggcaagttacttgatctctttcggcctgttttcctattcgtaaaatgaggatattaacatactttctagggcttagagggagagcagcatgtaaagttgtgaacactactagcttatgagtgcttagtacttgttacctgttgttatgttagggtccacggtctggtcttctctgcaaagctgggcctccgttaattgtgaactttgaaagataatttggcaccgaggccctgaggtcattggtccccagggctaccccaatttagcctatcctatagtgaggaatagaagcacctagaaaaggtggggagagcaaaagggagtgaggtgtatcttaagagctgtgtggggaaggtgtgctctgggagtgggccctttccctaacccctccccctgcacatgggatcaaaaaagcctttagtgtaaaccatttttctgttacctgggcccaaagggatcgcctgaggttctctgttgaaggtttgctctcagtatcctatactaatttcccttcctcttgggccctgttgtgatgatgagtgatgtgggttggttcccaggtcacaaaccatgggcggggaacagaagtgcttttggaggagcctttgcctctggaaacagcacgagagtcaccgagcttcaagctggagccaatggagactgagcgaagccctggccccaggctgcaggagctgctaggccccagcccccaaagggacccccaggctgtaaaggagaggggtgaggcacagttatctgggcaggtgggagggaggaggggcttgggggttgcccccgacactagctggatgtagcaatgatgcgaaggagaaggaatttctgaagatcaggttctcacctgtggaatgaaagacctgcagttggtggtgtgggttctcctggggctgggggaagggaagggagtctcagtagagcccttttttatgcagaacagaggcgatttagaaccacttgaatgacgcagggtttggagtgctactcttggtactccttccctctcaccctgtcattttggatatcagctgattaggcctctgtgcagtttagcgtcattcccaaaagcagaggctgggtgttggggaatggatactgtgttttaataatccttgggttgccaagagttaggaatgccattctcattataatttctgtcaccttcagcattatctgctccctggctttctctttttcctcctgaagggaacatggaagacaaggagatgactgggccccaggtgatgtggaagtttccattgtctccccccagcacccttcctcccctgagtgttgggggtgggggttctccatgtggaaggtcctttgtcccttaccacagcgtctcccccactgctttgtctatttcacacctcacttggaggcctgatacccttcttcccccctgacatgtgcttggcatccctggattttgcccctttaacccatgactctgcttgaattgttcttggtgcatcaggggctaaaggagatcttgtgctgtttcagttgcctgagagcttagaggacgtggcaatgtacatctcccaggaggagtgggggcatcaggatcctagtaagagggccctctccagggacacggtgcaggagagttatgagaatgtggactcactgggtaaggacttcttttccagggatgatgactgcgccatttctgaccagggtcctgcccgttattcattcacctcctggacacagactctgagttttgccaagaagcctccacaggagacttccctttgtctaaagtcccctgtacgagagtcatgtatctgccaagtggtacagttggcacaggcagcccgggactggagtcccagctgccagagcctaaggcgagtctgagccatgtgcacttcctagggcagagcaaacccaatgcggtgacaacctgccagcatcacacacatgcagtattccaggatgctggggggctctaaatggttgattccttgcaattttcagatgcttattcttatgagctcgccagtgtttcctgtgttccgttagtgtttctaggctcgtccccaaagacaaaaatttcaggggtagtaggatcaacattccagcctatcatctctcacagcccataaaaattcagaaagtggggagggtcttgtggaaatttggaaacaatgtatagctccaaagtaggccatatcataaattaagatttacctatgtcttgtactgtactcagagttttaaaattatgcctacggaatatgacagactgacatatagttggatttaggtggaggatatgcttgtatttattgtacaattccctcaacttttctgtatgtatgagaattcttttaataaaaagttggggaagtcttaacataaaacaagactgtgtgtacattatgattatacctatgttgaaacacaccagtagaaagactcactggtgtggtggtggtagtcccagttactcaggaggctgaggggagaatcacctgagcccagtaggtcaaggctgcagtgagctatgatgatgccactgcacctcaaccaggtgacagagtgagactctgtttcaaaacaaacaagacacaccgcacattgtttccatatatcaggtttgcctaaaaagtatcacaactgtacatttgttgacactaattctgcaaacgcaatcttgctcactgcaacctctgcctcccgggttcaagtgattctcctgcctcagcctccagagtagctgggattacaggcatgcgccaccacacccggctaattttttgtatttttagtagagacaggatttctccatgtaggtcaggctcatcttgaattcccgacctcaggtgatccacccgcctcccaaagtgctggaattacaggtgtgagccaccacacccggccttttttttttttttttttttttttgaagtgagtctcactctgttgcccaggctgctctggaacttctgggctcaagcagtcttcctgccttagtcaggaagtgtgccactgtaccagtttccatattacttttcactgctgtgatgtccaaagttgaacatggcccttttagtgagagatgctaaataggaaaagatcagattacagcttgttggaattaaacttctgttggagtccatgtttgctggaggtgg

SEQ ID NO: 81912 - DNA, 1328 bp, Homo sapiens
gagccaccgcccccagcagagtaaggcatttgaggatttgggtgcagggccggcccagcacagctgctagagaggtacattacgtcctttgaccctgccattctccatcccagtgaggcaagtgaggaacccagggtgcagagttcaaggaggcccttattcttgagcttacttgtcccaccctactctcagccctgctccatcccacccattcctgaagggcagaatcgagaggctcaggtggaaaggaaaattctaagactggtctcggctctgattccttgaccagtggcccgaccctttatcctgatgcttctccagagtgctttacctttaggagaggatgggattctgaggtagaagcagcccttctgggctgctgacctaacaggcagcggcagacaggtgggattttcttttctccagcatagaaataatgtacgggtttggtttctctctctctaccaggagaagagaaatttgagaacctggaaggtgttccgtctgtatgctctgagaacatccaccctcaggtgctgcttcctgaccaggcccgaggggaggtgccctggagtcctgagctgggaagacctcatgaccggtcgcaaggggattgggcgcctcccccagagggtggaatggagcaggccttggcaggagcctcaagtggcagagaactggggcgaccgaaggaactgcagccaaagaaactccatttatgtcccttgtgtggcaaaaatttctctaacaactcaaacctaattaggcaccagagaatacatgcagctgaaagactgtgtatgggtgtggactgcactgaaatctttggtgggaacccacgtttcctgtcactacacagagcacacctgggagaggaggcccacaagtgccttgaatgtgggaaatgcttcagtcagaacacccatctgactcgccaccaacgcacccacacgggtgagaagccctatcagtgcaacatttgcggaaaatgtttctcctgcaactccaacctccacaggcaccagagaacgcacactggggagaagccctacaagtgccctgagtgtggggagatctttgctcacagttccaacctccttcggcaccagagaattcacactggagagcgaccttataagtgtcccgagtgtgggaaaagtttctctcggagttcacacctcgtcattcacgaaagaactcatgagagagagagactttaccccttctctgagtgtggggaagctgtgagtgacagcaccccctttcttacaaaccatggagcccataaggcagagaagaagctctttgaatgtttgacttgtgggaaa

SEQ ID NO: 81913 - DNA, 1062 bp, Homo sapiens
tggaattctctgttaagtccaccctgccccagggtgctcctaccctcttggtctttttaaagccaaggtgcgatttgggcacctgactgtccagtttaccttaacaagtttgggaatccatgtgatgtttttgatacttcttcctcatttgggacattcagtaggagcatttgggcttccggggcccctgagaccaaagaagaggggccaagtaccctgggaaatcagctgaaggtcaacaaaagactggttgtgagttgcagctgtcccgaaggccccagttgggaagccatgggcagtccagatcaagccaccacgtgccctacgatggcctaacaggagtgcccattggcagattacacatgtaaatatgacctcagacaaaaaggaaccagaggcccaagggcaataataaggtggaatttgcaggtcagcccaggaattggcagaggaagtaggtgtctgataaccctttgtggagaatgagattccccccacctgtgtgagaaaaataaacagctctggagtcttgttcctgactccagaggaacgagagcattccaggaaagagagattccctggaaaattgaaaatgtgaatcctagggggaaattggggattgtgtctttccctgttgaaaatgtttggatgggaataaatatcttcaggaaacataaatgtctgtgagtcttcaatgaaagcctctgtctagacccccgagtgttgatctgtctcccctctgccttggtcagaggccctgctttctcatagacttactgggttggtcaggaagatgctgacaaaggaggcagcagacaggcagaggcaggtgagggcctggcagcctccaggctgggactgccatgtggtaacaaagggtcaagccaaatggctgctggggtgatgctgtcatagggtctctagaaagtattctttccttctgtggtctatagcagtaaaaatgttttcaattctttgtttagaatgtttacattcttactcagtagctgaggaagatctgactcttagagaacaggatattttggtcttgcaactgatttc

SEQ ID NO: 81914 - DNA, 1465 bp, Homo sapiens
gttatcattagtcaatagaattgagtgctttttatctttttttatatattccctataatcagcatgttactttcacagtaagaggaaaacaaacactaaataggtagtaacagagttaagaaagcagagtgtgttttaccattaaattgaaaacctaatttatccttatcttaaagctaactagaactagtcagcacagtttctttgttatacgatatgattacaaactaatgcttttcgcaaaggcattccaccttagataatctgggacaatacttcattattcagatccttgtgtaaaatttaaaaaaatgaatttatgaaacacaaatttaaataaatttaaagaaacacaaatgtattattttcaaactgtaaattttataaccattatataaatgggcactgatatacaaaataatgtcagttgctaaaacaagacaattcacagctggcctacatcatataatggcagaaatctttaaacacaaaatctaatgattagaaccagaagttgaaggcccactgaaggagtccttaatattatgaggcctaggtttcaaaaagctaccaattctagaatggattttactctggaactgtttcttgactatttcttgttgcatctctttcagtgtgaagtggaatctctgaaactcaggtgtggcatcaacaaagtcaagaaggtagtccaaactctctcttacagcagataatttaaattcagcagtctgcttctcagcttctcctcctttttgaacaacttcctttgttattccacctttggtttttaggagacaacccttttcttcatctccatttaaccacaccctatcatcatccaacttagtttccaactccccacatttttcaagaatttctctataatccccatgttctaagccttgaaaatcatattcaggttcctttttgtaaagaagattttcccatgcatttgctatggttatttgttttacttcttcccaactttttgcccagttaaaaattgcactttttatattgtagattttaattttggaaactcctttatctcctttctcttgctcatcatcactttcttcaaatattacaagactctcttcaagttgcttccatctatacagccgtttgcagctcaagatcacaccttgattcattggttgaatcaaggttgaagtgttatgggggaagaacatacattttattcgaccatcctcactggttagggattcagaggaaggatgagccgggcaactgtccagaagtaacaatgccctgacgtcctcgtcatgaaatcttagaacattaagttgaaaatgtcggacctcaggaacaaagttttgaaaaaaccattctgaaaacaattctctggtgaaccaaacatctttactgggtttatatatcacaggcaatgtacttgtgtcctctttcacacttttgggcagttttgattttccaataatga

SEQ ID NO: 81915 - DNA, 2162 bp, Homo sapiens
gtagaagctgctgtgttaaagggctggcaggcaccacagtttgtttcctttcaccctagttttctcatatttgtgtatagtcatttgtggagcattggtggcccagtatctctttaagcctttttttgtcattttttttagtgtcttatactacccacaatgtgggctgtacacctgtcgctctgcctccacccccacaaaccaaaagtaagttctgtggtaacaaggatgggaattatttctaggttgcagtccatgagctgggaaaggaggcagtgctcttgggagaaacagcagaggcctcaagtttcgggctgaagccaacagagtcccaaccagtgggcgtatcccaagatgaagaattttggaatacatacgagggtctgcaagaacagctcagcaggaatactcataaagagactgagcctgtgtatgagaggggtaaggagcttcatgataattttcttctcctgggagctgtgataatagtttattcacccaaaatgtcatgggcattttttgaataccctgctctgtggatttgtaaaaccagccttgatagcaactatgatgtccttccaggcagcagtagaaatgccaactgtggatgaaagtgggagtaggcctagagaacagaaatatctaaaccacagaactcttggtaataacagtgtgaactctgttccttagactagtggagaggaaggaaagaaatggagtgggaaggcttggggccacttcatccttgtaaaatacagaaggaattgagatcagatgggctgttagtggcagaatgtgaaaacagttgtgtaccaggaaaaacataataaaagacaaaaaacttcatctcctaccatacagtggagtccctgagtacttcattttaagatatctttaatttttgcctaactcagaaaaatatgagaggaaaaagggatttcccttttatttctctgatgaaaactgaggaaacatttagttggggaactagttctaggggctggtggatatttgattcttatttatgaagagactgcttcaggcatcacacacaccacacgtgtaaaggtgtcccatctgtacttaaaaagtcaggatcagtgttttagaaatgagctcaggatgtttatagataaaagagatttcttctggctcttttccccccacagctgtgcctactcaacagattctagcttttcctgagcaaacaaacaccaaagactggacagtgacacctgagcacgtcttgcctgagtcccaggtgagctgtgctttccagctgttgagggctacctttctctgctatgtatgattaatactgtccaggaggggttcagaggtgtgttagtcccgggtgttctctgggcaactgggtacctcccaggctgtgggctgacgccttttctcctttttttctgccttctcacttaaaaaaatcatgttcttttaattcctttatcgcctggccaattcatagccaggtggctaggctgcttctgtacagtggcaggttctgagctgaagtccattctcttctttagagcttgttgacatttgaagaagtggccatgtatttttcccaggaagaatgggagttattggatcccactcagaaggccctctacaatgatgtaatgcaggaaaactatgagactgtcatctctctaggtaaagattttcccttccctttatgtagttgagtactctattcttggcttactgagaaggaaccccagtgaggggtgtcttactgttccaggagctggttgattctcatctagatggtataggggagggtgtaggtagtgtatccagatcacctgtggagctttttccaaatgtacatgccgattgcttatcccacattgagtcctttatcctttccttctcttttccaccaaacttcctcttctgtgtcttacttatctcagtaaggggcacattcattatccagtggctcaaggcatacaaagtaacagttttcctttattctgatcttgtcatcataccccactgttaattcattagcaagttttcttagctttactttgacatatcctgactgcaacaatgtctcatcttcttgcactgttagcatcctggtgtaagccagtgtcatcttgaaccaggcatacatgcgtagctttttaacaggtgcgcct

SEQ ID NO: 81916 - DNA, 1571 bp, Homo sapiens
gagaatagtataatgaaccccctcaaggccttaaaaatcaccaacattttgccaatcttgtttcatttatcccctccagtttttttattttttgcatttagagggttgttggtttactttggagtattttaaagtaaatctcagacattctaacatttcacccttaaatagttcagtttgtaagagataattcttgacaatctctgccctaaaccatctttggggaacagttcctactcagtggaggacctctgtcccataggagcaaagctcattgagaacacaggagctgcctttcccttccccagagggtgaccaaaaaactttactgacaacttctcaagatggctttgtaagaagaccctcttgacctcctccctggagtatccatttatgagaacaccaggcatcccagatgcctcgtaatgagagtggtccggaagggatactagatgcccgtgatgatccctggagcaagttattactaacttgaaactaagtaatctactcctgcacttttaacaagcctcagagtgcttcattcattaagagttcagtggcatcggttaattagtggtttcctgaaagcctactgaacaaaaaactaataataattacaccaggcatctccccaggagttcaaagtgccctcagaagagtttctcatttactcacttgcattggctttaattttttttttcttgaaacaatgtgtaaataaatattcaaagcattaaaatttcattatagttcacctccctcttagtaaacctgcttgattttattttgttttaattagcatttgaccatcccatttgggtaacttctaagaagaaaaatgaacctcaaaatttaatatccctattctactttcttcctcatttgttatcatgcttccttgtaatgaggaattttctctcctttaccctggttagtgttccttccttaccttgatcctctgtctggagtttttctaaagtagttactctatgctttaacacccagtgtcctgatagtcaagaagtgtgctacaaactgctgtgaaagatcctttatggccagttaatacttgccataatttatcagtgtggtcttataaaaacatacttagccaaacaagagttctttgcaaccagaattcctcgtgccataagctactgtttattaccttctgcaagtctcaaatcaacacttaaattaacctgctgacaaaaattcattctgttcttatctctgcctaaggattactccgcctaagtttactccctaaaactttttgagaattatgtacgctgtgtgctcattcattcattcaacattgggaagatatttattggtcactttttatgtatcagcctgtcaaaactgtgagacaggaaaaacaaccaaaaacctagcacctgtctcctgggaggacaatgtaagcttggataggtagccagactaggatggagagcagaaaataactggtgtaggaaattggctcccctttggggttctgtgctcaccctccctctccttatcccaacaactctcttgaaaagaacatacccaaatcagaagcataccac

SEQ ID NO: 81917 - DNA, 1062 bp, Homo sapiens
ggtggagatccagtggtggggtttggccatgtgcctggccatatccactgcatatcgctaggtgatctccgtgtaaatctagcagtacgggtaagagtgtttgcggaggaactcctcaggtctcttcctccgcatcagcaggagggtatcatgggtgtgactgtcgggcactaacacgaatctccatcccatgattctaggcgttaggactggagaagcagctccgggccaccgtcccagctctaatctcacttaggcaatgcagagctgtgggcctgactaccacgtgtgtctctggcttgttgaaatgggcactttgtacatctcacttgtgctgggtagagtgtcttttctttagaaccagtaccaatctcttaggcttttggcattctctgcagccaaattctaacatgcttctacttagctggaatgtaccctcggcttacctttggtaaatggtatctccccaggtgagcttagccacttccatggctacaaagacctcattttaggtctagctccaatttcttttctatgtactccagattcctacattcaggtgcctacaggagtcgtcttttagatgtctctcaggcatcaaaacacatgcccttaactcatgcttttagcccctgatctgtttgcctccagtatgtggggccacatccatacaattgctcatgctatcaacaaacactccctctttcctcttgctatggcttgaatatttgtgtaccctaaaaattcatgtgttggaattctaacacttaaactgatgttattaggaggtggggactttggcagacccctcatgattgggattagtgtccttataaaagagactgcaggccgggtgtggtggcttacgtctgtaatcccagtgctttgggaggccaaggtgtgagaattgcttaaagccaggagttcaagaccggcctgggaaacatagcgacacgccatcttttcaaaaaatttatttagcccggtgtggtggctggtgcttgtagtcctagctacttgggaggctgaggcaggaggattgcttgagcccaggaagttgag

SEQ ID NO: 81918 - DNA, 1147 bp, Homo sapiens
agcctcaagtgatgctcccacctcagcttcccaaagtgctgagattacagacgtgagacactgcccaacccctctctttgttgataaatatgaatcctaatcttttttccaattgttaattgttctgctgtcacttgagatagcttcaaaaatgaaaggctcttgaggcctaaatagattagatggaaaagttcacctctagatagctgctactgagattgtccttagtacctatcccactggactctgacttagttatagctattctctccttacctttggatattcacccaaaactggatcttctgggaggccaggagagtctgcttggtcctgattttgtgtggttagtgtctgggttatagaataacccttctaaggtttcctggtcctgtttgtaactaccttagcttactttttccccagtatcccttgaagatattgtctatgttttgctttcttttgtttttatcaacaggagaggaaggcaagcctgagattaatcagcagttaagcctagagtctatggaacttgacgagcttgccttagaaaagtaccccattgctgcaccccttgtcccttacccagaaaaatcctctgaggatggagttggaaaccctgaagcgaaaatattaagtggaactcccacttacaagagaagggtcatcagccttttagttaccattgaaaaccacaccccattagtagaactctctgaatatttaggaaccaacacactttctgaaattcttgattctccctgggaaggagccaaaaatgtgtacaaatgtcctgagtgtgaccaaaacttcagcgatcattcatacctagttttgcatcagaaaattcattcaggagagaaaaaacataaatgtggtgactgtggaaagatcttcaatcatagagccaacctgaggacacacaggagaatccatactggtgagaaaccttataagtgtgccaagtgcagtgccagctttcgccagcactctcatctatcccgacacatgaatagccacgtaaaggagaagccctatacatgtagcatatgtggtagaggttttatgtggctcccaggattggcacagcatcagaaaagccacagtgctgaaaacacctacgaatctactaactgtgataaacatt

SEQ ID NO: 81919 - DNA, 1052 bp, Homo sapiens
tcccctctcccaagcatacatgtccctgaggccacccctcggctttgggcccaggtggggacagaagcctatctctcttcctgccactcctccccacagcccggcaccttctcttatgtgcagctcagaaaatgcacagaccaaggcttccatggagggccagtgtggtggggaggagcaaccaggacttgggtgcagcagggccctgctctcccctgcctagggggtacattggcaggtctcccctggcaactggttcttatgacatcacggggaagactcccagccttcctggacccctagtttgggagaggacagtgcccaaggcaagggcagggtgaaagaaaggcatgggaaggggccagaaccctgggggaagtccctggtccctctggctggggtcaggccacataaaacagacagctctggcaaactggagagtccttctctcaggtgatctcttggggccagcttcctcatctggggtgggaaatgagggttcaggagtacagacctaggaagacctaggtcggtactttgaaaatgctgaaaaggggctgggggcggtggctcatgcctgtaatcccagcactgtgggaggccgaggcaggctgatcagttgaggtctgtgggaggccggggtgggcggatcatgaggtcaggagatcgagaccatcctggctaacacggtgaaaccccgtctctactaaaaatacaaaaaaattagccgggcgtcgtggcgggagcctgtagtcccagttactcaggaggctgaggcaggagaatggcgtgaacccgggaggcgaagcttgcagtgagcccagatcgcgccactgcactccagcctgggctgcagagcgagactccgtctcaaaaaaaaaaaaaagttaaacattcatctttccggacctggccaagcaggaagcgccatcatgggagctgacgtccgccacaagaaggacctaaaggttcggcgcaaagagcccaagagccaggatatctaactgaggctgtttgttggtcaagctgtacaggttaccgtccagacgaac

SEQ ID NO: 81920 - DNA, 1029 bp, Homo sapiens
acaggcatgcaccaccacacccagttaattttttttttaatctctgtattcacatttcccagaaaacagttacagagtccctttgtgactttgctgtttcctgtgctcacactttctgtttcattgtcttgcgaagtctgacctgacttgcagtacctaggtaggttatttgtgaacattgatggaccattttgaacatggatcttcaagaagagtgcagacagaccttaaataaccaggaagcacactgaatgtagatcttggtacatatgggaactcaacaaatgtttgtggtgttcatttccaagtcctgctctcttgaaagcactaaggcttttcctgaggtgaccccaacctatggatcaacaagtattagtattactgtttcttaatctgttttatagtaaatctaaatatggttgtatagttcaaccactctatttaagatttctctaaatacaaggcgactgatctttaaaacttgtgttatttgggtcctatgtggtcactaaaattaaaaaaaaagacaactcagaaacatgaatgtcatcctacggattcccctcagaaataaccactgttaacattttaaaacactttttaatcagctgaatttgagtcaaaccactgttgacatttaaaaatactttttcttcatgacattttataaggacgggtgtttcttccttttagcagtaaaaagaaatgagatactaaagagagaaatgaaattcacagctaatccctcaattccattttcatgtatagccatctacttctcccattgaacttaaatatatgctttttaggtagcatttttggtattttaaattttatctcctttttgctttcccttgtagaaagttgacaaatagtccctaaagctgtcaataggttggaaataagaaggaaaagtaaagacaatatctaagttaataagtagttgctgtgtgatggggaactgaatgaattgtatttttccttggacagatttcacagagatgatgagagccctgggataccctcgac

SEQ ID NO: 81921 - DNA, 1043 bp, Homo sapiens
atgaagagggagagttgttgctagtgggttgaaaatgagagccagaaggtgaggattggttgtccaggagagagggagagtgagcagagcagggagacgtttatgtttgggctccttagaagagttagcatattctaggaagaaggggtgacacacacatcctaagaaagaagcctgtgcacagggctcagtgctaaatcctcattgtggttgtcatcaccttcctggcaacagctgcccatctgtggagcccagaaccattgtaagtccttagtgggtgccacccgatttgcgcctctccaagcctgtggaggaaagtctgaggcagagaaggagggcaggggaggacgaaacacaggacgtcaggctgctgcaagaggatgtgtgtccctcaggctgtccctttgtgtggccgctctgctgccgtcaggcaccctactgtgacaaagtccaagtaggaagcacgtcagctttctcccagctatgccctcctggttgtggcttcagtttgaggtgacattaggttttttggagagacccaggcgtcctggaattggtctctttagtacttagatgatcatttcctgagcgtgtgtcccgcagcctgtgagcatgtaactggggaagcacatgtttgtggtcacgtgtcccaaccaaaggtaggagctgacatgaacaggctagtggttgaatgcatgttaaaaatctgtggctggccgggcacggtggctcacgcctgtgatcccagcactttgggaggccgaggtgggtggatcacctgaggtcaggaattcaagagcagcctgaccaacatgtagaaatcctgtctctactaaaaatacaaaattagccgggcgtggtggcacatgcctgtaatcccagccacttgggaggctgaggcaggaaaattacttgaacctgggaggtggagattgcggtgagccgagatcgcgctatcacactccagcctaggcaacaagaacgaaactccgtctcaaaaaaaaaaaaaaaaaaatctgtggctggctgaacatggtggttct

SEQ ID NO: 81922 - DNA, 1024 bp, Homo sapiens
catctctaaaaatttttaaaaattacctcagtatggtgatacacacctgtagtcccagctacttgggaggctgaggcgggaggattgcttgagcccaggaggttgaggctgcagtgagctatggttgcatcactgcactccagcctgagccacagaacaaggccgagtaacagaacaaggccctgactctaaaagaaaaaaaaagttagaacaaagacttaagagaatagaatgtgatcttaactcttctcaagcaatgaaaaaaagccttacataagggtatcttcacctcaaatgtacatgtgttgcctgtcataacaagcagatggctaaactcattctctttactgcttgcggtatgtctggaaaactgcttaaagcttgaactgccctttaagcttttatagcttcttggaactcaaggcagagtaagtgaatccagacggggaaatccagacgtggtctcctaagatcttgccataaattaggtagaaacagaaacatactcctgcctgtttgttggcatagattttagactttatttaaaccttgatcattcctcaccagtcagtaattcatctttcttcctacgttacctcattggaaatatatttcccaggaataccgatggagaatagtggtgccggctctctctctcttctcttcctcgttctgtgcctctttccctcccccatgcttctgctctttctcccttttcattcaccctttatttttctttcttcttggctccctcctcttcccagctgcctactctgctcggatgttttgcctttttggatgttggtggctggctacaccctgcccactgtcccgaggtctgtggggaggcagcacctggaggcagcgacagcaaccacagggagcgccctggctcctccctgcccagcgcaaggccaaggcccttcccctcctgaaactggctctttacctctggagcctcagagagggaaaaaaaaaaaaacagaagtcattgccgccatatagattgatctccttgacacat

SEQ ID NO: 81923 - DNA, 1056 bp, Homo sapiens
tgccttcatgttctgtcctgtacacctggctctgccttttagatagtagtagcaaattagtggaagtactaaaagtctctgataagcagaaataatggcgtaagctgtctctctctcctctctgtctctctgcctcagctgccaggcagggaagggccccctgtccagtggatacgtgacccatgtgaccttacctatcactgaagatggctcactctccttaccctgcccctttgtcttgtatccaataaatatcagcacagcctggcattcagggccactatcagtctccacgtcttcgtggtagtggtcccccaagcccggctgtcttttcttttatctctttgtcttgtgtctttatttctacagtctctcatctctgcacatggggagaaaacccaccgaccctgtggggctgtaccctacatccctgaacttcagtgtcaagtcactgtcagggaccggtagcagcccaggatcttcctgctgaattgatggccttgttgcacggagttcctcctcctcttgctggttgccctttcttttcttcagggtgaaatattctattcactctcatgttgagggcagcatacttgaggcatcaggcccacacacatgctcccacacacactctctctctctctctttctctttctttgccatttcccttgtatctctctcattttgcacctgttctgtgactctctcgtctgaatctcaggaaactttggaggaaggatagggactgctgggaaatcctccaggaacaaggttaggaaatttgaagggcctgtctagccaaagcagccctcccctttttagttccatgtcagccaggagcatgtgaagcagccctcagtgatcagcctgcatggggtttgtcccttgcgagaggcccagctcagctaggagccctggtttgttgcttgcatcccatgctgtccccgggccaggatgctaagacctgccattctgatcttgctttattcaccaagatttacctttgtgttttcttctaggagttctatagttttagctcttacatttaggtctctg

SEQ ID NO: 81924 - DNA, 1020 bp, Homo sapiens
ggtccagtggccctcagcgcagatgcagagtgcttcttagacgctgcgggaaagccagcccctgcagcaccacacccagatgcacctgcagtttggaggattctggttggatgataaattccagctggcagtacatagcctcagtcccatctgtatgccctcccacagcctgcttgccactctgccagcctcttccttcacacagggatgctgctatagaaagggaggcagagagtcttaggacaagatgtcaggaatgaggcaggatcccccgttgcatctgccatttttttcctataggaggactcggaggagagtgaaattgacatggaagatgatgatgacgaggatgacgatttggaagacgagagcatttctctctcaccaaccaagcccaatcgaagggtccggaaatctgaacccctggatgagagtgacaatgacttctgacccttttgccaagggaccctggcagattaaaaccctcagacttgtaggtaaatgggaacttagaaggttaggaaggtaacccctgttttgtttactaagctggctggactcatgatcactgaagcaatacttatttctgctttagcctcctatgtttgcattccatgaagcttaaataagaattgaagcaaatccctaagatttatttttttccaccttatttatcttctaaaacttgaggaatgcatgtgttcttagtgattcacatccacgggacaaaaactcaagaagaaataagagctgacgccacacaagtcttggctgcttttgttactatacattttctctgagactccagcagagttggggctggaacttggcactggggactcatgtttggaatcgtaggggaacatctggctgttaatcacttgcacagttgagaacatttcctatacatcggcttttaattctagctcttatttcattttgtaatcttattttctttcgtctgcatgttcacaataccaagcattaaatgtattttaataactaaacttttctgaaaga

SEQ ID NO: 81925 - DNA, 1007 bp, Homo sapiens
catacaatagaaaatgcaggaccccatgcaaagcctttgtgcttctaggatcccctcgctacatggacaaggctcagggtacctccccttagaccaggtttccctataggcctgctgaagcgtctgggggtcagctggctctcagaactgggcaaaaggcagtgcgccacctggaagcagttctaagggtgagcaggaagggcaggtgcactcacttgatatgctggagcctgtggtttccagacagtgctgtggcaatgcatatcgccccgtccatccccagagaattctcttgaagactaagtggaaaagagatggagacacacggtgagccatcagggcagaaggaaaacacccggggaagcaacagtgcattgtctgggggcagtaacccaggcagatgtgtccacaggtgccatggcaactccaggtgggagttgaccctggagacaggtgtctacgagtggccagattgtcccacgcaagtgcgctggaggatgtaaggccataaatgcaagatgtgagtgacttctgactgaagctaagcacactcaacaaacccagctgcagtggaatgtggactataataagtctgattgtttatattcagaaggaaatagctacagaagaaatcaggagcattttattccatcagggaggacccagcagagaactctgctgctccaggatgcaggtaggtccctccagccacttacttgagtctccggagacttgagtttaccttcagagcatttgccagggctttggctccagccaccccaatggcatttcctcttaagctgttgggaaagacaggaagcctaaggcatgggtacaggctgagaggtgatactgacccctctgcgggtgggcttggggctgcttggtagaggaaacaaggacttcagcagtcacaggaggccagggctgtgccttcctcactccagggcaacagggcagagctggctctgggaagcagggcacacaggggcatggctggcctagcc

SEQ ID NO: 81926 - DNA, 1087 bp, Homo sapiens
caaggtgggaggatcgcttgagcccaggagttcaagactagcctgggcaacatggtgaggccccatctctttaaaaaaaattgtaaatattactttaaaaaataagttatatgctggatgtggtggtttgcacctgtaatcccagcactttgggaggccaaggtggaaggatcacttaaaggtcaggagttcgagaccagcctgaccaacatagtgaaaccccgtctctattaaaaaaaaaaaaaaaagctgggcgtggtgttgggcacctgtaatcccagctactcgggaggctaaggcaggagaatcgcttggacctgggaggcagaggttgcagtgagccgagatcacgcctctgcactccagcctgggcaacagagcgagactccatctcaaaaataaaataaaagttatagaaaaggaagtgggaggtgagagtgaaggtcttgtttctagcttgcacagttggttccattcacaagatggggagccaagaagcaggttttcaggagagagaatgcagggaccctgcacccgagcaagatcccgaagggaggtacagagggggtgtggacgcgcaggtctagggttgaggagagagggctgggacacggacgtgggagtcgttgggactttgaagatcactggagcccagggaaaggaaaagagctccaggaaaagagacgccaggcaagcgaagatgacataggacgatccctgaggagccctgcgcagaagagccaaacagaagaaaagaggacgaggcccagacagaggggacatcctggaagctgaaggagaagaaatggtcagggagaaaggccgatgaggctccaagggttaaacctagagttccctcacgccccagcgactccactcccaggtatatccagccaggagaaggaaagctcacgtccacacagaaactggtgcacaaaggtccacagcagcaccgttcctaacagccaagtaggaacaacccaacgtccgtcagctgatgaatggagaaatgaaacctgtgtacccatacaatggatatcattcagccttacaaaggaactaagtattgagacaggctacaatgtgg

SEQ ID NO: 81927 - DNA, 1050 bp, Homo sapiens
attctcctgcctcagcctccctagtagctgggattacaggtgcccgccatcatgcctggctaatttttgtgtttttagtagagacggggtttcaccatgttggccaggctgctctcaaactcctgacctcaggtgacccgcccaccccagcctcccaaattgctgggattacaggcctgagccactgcacctggccagtgctttcttgtcttaaaaagacactgtcacactggattacaggctcaccccacttcagcatggccccaccttaacaaagtacatccacagtgaccccatttctcaataaagccacatacttggggcacagggggttaggacttcatatcttttgtggggacacaattcaattcataaccccctcagaaccatccagtctgatagaagctgcacacccgctgaatgctttcagcctgtcccctgcccgccactctggaccttagtgagtagggaggaaaggacacaggctgagggtcatccaggtgtcccgcagaggcaggcggtatgtggggtggtgaggacgacagcccgtggaagatgccgttctgcacaggaaccgcaggtctcgtgggcacccagcctcctgttcactctcacgggaaaggtctgagcactggggctgagcgcagatctcagagctgcggtgatagcgctgcatgggatggagagaggcagaggccccgggccagggcccccaccctgcccgtgggcgggtgggacactcactgtcactgctccccttggccaggctggacaccaaccagttccaggaccccgtgatggagctgctgggcagcgtgctgagtgggaaggactgtcgcattcagaagatcaggtaacacagacccaggggacctccagggtgcctatggtcttgtggggtatggaaccctcttcccatcatcctctgctcagctggccagcggcgctgccacggagaagtgtctttggagcatgtggctccagatgcagcctgcttgtttctgcccaattccagaaagtgctagaggctcaggtgcctcatcagtagga

SEQ ID NO: 81928 - DNA, 1023 bp, Homo sapiens
acttggtcaccttcacatccccagggcctagaacatacaacaggctctccataaatatttgctggttgaataaatgaagagaaataaatcatatgtttatatcaatatatgctaaaaagtaatttgctaatttaacagatattccttatcttaaaaaattttgcccaggcacggcagctcacacctgtaatctcagcactttgggaggctgaggtgggtggatcacttgaggtcaggagttgagactctgtctcaaaaaaaaaaagtgtaaactaccttaagaggcagtagattatacagcacacgcactggtgtcagtgaggaattgatttctatcccaactcccacttcccagctgtgtatccttggacaagtcacttaacctctctgagcctcagtgtcttcatctgtaaaatgggagaaataatggtattgagagttatgagaaataaattatggaaatacagtgcttaacagaatatgcagaacacagtatgccttcagtaaatattacataatagtatttgaatggtaatagaacaaaataaatctttctctatcggagaagaaaactagaaatctgtcacaaacatcacacctaacagtttgggcaagaaccactcctggtctagtctagagtaaaacaagaaggcctgcaacaaccttattgctccaaggaaggggtaggcctggccaatgtggtaaaattgttcaaaataagagttatagtttttgggctgggcacggtggctcacacctacaatccgagcactttgggaggccaaaacgggtggatcacttgaggtcaggagttcaagaccagtctggtcaacatggtgaaaccccatctctactaaaatacaaaaattagccaggcatggtggtgcgtgcctgtaatcccagctactggggaggctaaggcaggagaatcacttgaacatgggaggtagaggctacagtgagatcgtgccactgcactccagcctgggtgacagtgcgagactccacctcaaaaaaaaaaaa

SEQ ID NO: 81929 - DNA, 1056 bp, Homo sapiens
gggcggcctggtttcaggcgcctttgttgctccccacagccgaggctgcagctgctgggtctgcactctgcctgcctggagcctcgggcagccttctcgagggtccatcgtgtcctcccagcacccagcaggttcctgggtgctcagaaagcattgttgggagggagggagaggaaggagggacaaaagaaggtaggcaggcaggggaatgtgcaggagcacttctggtctgctgcctcagttccctcccccccatcacccacacaggctctggggaaccagctaaccctcctacctcccctgagccacaagctgctctatgagtccagacccactactctcctgctctacaaccattgctggctcccacttgcttgctgaggaaaattcagaccccaggacccctgtcccttggctcccaccttgtcacctccttccctcagtggccccatgttgcttgctccctgtccccagcggatgtcccatactttattgtaatttttctcatgtggcttgctctgggccatgtccttccccctcacgcccttccctgtcagggcaggccacccactgaggtccacttccaggggccgagtgcgatctcctgccgcggacggcaacattctgctgtttcctcttagggtacaggtgacctgcctctggggagccctttgctcacaggaagatgttatggggcacagctgagtcagaggtgcctactgggtgacagagagaaaagaaagcaagaggtgttaaaagagggagcacagtggctcacacctgttatctccgtgttttgggaggccaaggcaggaggatcacttgagccccaggaggtagaggctacagtgagccgagatcacaccactgcactccagtctgggtgacagagcaagatcctgtctcaaaaaataaataggctgggcgcagtggctcacgcctgtaatcccacccctttgggaagccaaggtgggtggatcacctgaggtcaggcgttcaagaccagcctggccaacatggcaaagcccctcctctgctaaaaatacaaaaattagc

SEQ ID NO: 81930 - DNA, 1069 bp, Homo sapiens
agatagcagagaactcagaaccattccacgcaaagaggccccaagcaaaaggctgagagctgttgggcaacagatcctgaggggctgacgtgggcctgtctccacggccaggaggggctcccaccccgagcccagcaggaactctgtgctagtctgcactagtccacagtcctggggccactgccagtgccatgatgcagcccccacgacacagccaccaccatggctatagccagaccctcgggtctgaggccaaggccaaggcagtgctgtatttcttccaactctgcccactcctttcctgggtgggacggctgggaaggctggttccacagttctccccaggtccctgtgagccactggtccccggcccctgctctccttccagcccccaggcaccctgaactgtagggtgcaggacactgaggcaatgtgggcctcccagtgggcagccccacccagggtgtgggaggccatgggccccaagctcccctggggacttctcccactgccccaccctcaggaagccatgagctgtcaccttctctgtaaccaaattcttctctgggggccgcgacacgtgcagaaagcacttcgtgttttctgagggcacctgtggggctgaactacatggagaagccatttcacagggaaggagtcatacaaaagaggccttcccacagggatggcctccaggacagatgctgcccaagcctgtggtcggtggaagatgctgtccctcaccctgccccagactccccaccagccactgaggggctccccagagggcctgcctgtgctgggcccttgagcgggggcagacagaggctctgcctccattctccctccaaggtcccagccctgtgaacaggaaagcaccccaggaggagagcaggcaaggcgtctacaagcctcagcctccccaggaatcgcagggctctggggagcggcactggttctcacctctcactacgtaaatgcgtccactcaccttgccaaggcggcttcctaagctcctcccctgtggcccacatggaggggtggctgctggtcagggccacgcccccca

SEQ ID NO: 81931 - DNA, 1094 bp, Homo sapiens
ccagcccttctgggattttcacatccacagagaatgggtgctggcagccaacggcaacgaggagaaaagctgaccgccttctcagatcaggatgaggtgtttttacaccaaccccgaggatctgcagccttctcaggttaaattaaacctgtcacagacacaggaagggaaaagagcacataacaacaattatattgacatctaagccaggtcacatgctctgatttggctgaaattacaggataaaggaaaaatcctataggcaccatggctggaaacaaatggcctcaaaggaacgctggtggccgtggctttgtgcaacgacagccagtgttgtgtgacccagcgacgtgcaggccagggagggtacccttctactgatcaagagggaaagcgggaaggacgcacagctgtggtttccaacctgcacggaggcacccccatgaactcacagagcaccatcagatccttctgaattttgaaggaagcaatgatactctgctctgctcaaggccattcatggtctcaacattaacgttaccttgctttatagggtatcttccctctctctgccaggctgggttgtggcagtcactgaacaagcaattactgtgaaggtcgacgtggaaaaatgaggcaatgagggtggcggtgttctaccagattccaagttgaagaggtgctcgacaggcacacacatcccatgactaaacaaataacatgaacatttctctttatgtattacttttctagacatccactataagttgccaggacacaaatgcttattattggggtttacttatttaataaatggaactgtgggggatttctttttcttttctttttttttttttttttgaatgaccatataatctggacttactaactttaggtaacagtaagttaaaagatagaataaggtttcatattacaggaattcaaaaattgaccatataataaatgatgaagaaaactaacaataaacaggacaatgttcaaatagctcattggggccaaaagatcagcgtatatcctgcatcatctttcatgcaatgtctcagctttttttccctcaaacataaaggcagatt

SEQ ID NO: 81932 - DNA, 1520 bp, Homo sapiens
tgcacaatgtagctgacgagggtggcattggacatcttggtctccccaaatgtctggatgttgaaggctgcgatcttcagggacacggccccctgcagtagggccgccagtgccagcagcgcccccagcagcttcatgcccctcatcctgggagagcacagggcacagagacataacagaagtgagacgtcatccctgccacagcactccagccttctggagcccagctggcaggggctggtggagctcaaggtcagggggacgcaggcgggggaaaccctttcctacaacgtccagaaagccaaacagctggcaccacgtagaggaccccgagtcactcctccatccaccagaaaacccgcccgggagggacgctggagcctccgcctcactcgctgctggaggatgagactctaagcctccctccctgctccaaaccggccagtcacccagaggcactccacctggtgctcacctgagatgatggtgatgtcctcagagatgacgagaatgctgtcaagaatctggaatatcctttgatgacaattttctccttttgctgcttaaagaaaaaaaagtagtctatgaagaaaggtctctgaagaagcacttcaaggccctggcagtgctgctgggctccggatcctgcacaggcagtgcgtgtctgggagttttaaaagttcaggcagctgtgaccttccctggggcaaatgtgagccgtcacctgagagtgcagaaaacaatggctctgtgtggctttccgcataggtgggttgctagcacgtgtttctttctgtaagcacaggtttcttgctgctgtaaaaactgcacctgataatcacgtttgcacttagttttaaaatgtctgataacaaggccaaaggttcctatcccgtgtcccttgcacgtgtggtggcccccatcttccaggatagggcagggatgggccaggtatgtgcgggagggtggggctgggctccagtctccctgtctcttgtctgggggccccaaggtcactttggacaaagaggccaaagccacatccaaagttgcaaatggagccccctggtggctgacagccatgactgctctgtggcccaggacacgcctgccttcctgattcatcgccatcaggtgcaggcaactctgcaggaggctggggagctcggaacaagcagtggtgggggcctgcagcaccagcgccgtggggccaggacaggtggggcctgcaaagcccaccccaattgccagccaagcagtggggagccttcttgaggtagacaataggctgtgtgtttaggcccaggggatcccgagtgaccaggtcacaagggcagggcagcagctaaaggccaggcctcaggtccagtaatttcttggttcttttgttttgggtttttattgtttttgagacagggtctcacactgtgttgccaaggctggagtgcagtggcacaatcatggctcattatagcctcaaccgccagggctcagataatcctccctcctcagcctcctga

SEQ ID NO: 81933 - DNA, 1055 bp, Homo sapiens
ttttgtttgtttgtttgttttttgagatggagtgttgctctgttgccaggctggagtgcagtggcgcgatcttggctcactacaacctctgcctcccgggttcaagcaattcccctgcctcagcctcccgagtagctgggactacaggcatgcgcctggctaattttgtattttagtagagatggggttttcaccatcttggccaggatggtctcaatctcctgacctcgtgagccaccgtgcccagccaaattctgttttaaaaacggaaaaatggccaggcgtggtggctcacgcctgtaatcccagcactttgggaggcggggggatcacctgaggttgcagtgagccgagatcgtgcctctgcactccagcctcggcaacagtgagactctgtctcaaaaaaaaaaaaatgaaaaggtgccccatgcccctcataatgggtttctcctcttgcctttcagatatacgagaacgccatgattgctgctggacttgttgacgaccctagggccatggtgggccgcttgaatgagctgcttgtcaaggccctggagcgacactgacagccagggggccagaaggactgacaccacagatgacagccccacctccttgagctttatttacctaaatttaaaggtatttcttaacccgagtgtgtgttgggctttttttctgggtcctgtggcaggatgggtcctctcttcctgcagttcaactggtgtggggaggggctgctcacttcagcatcacctccactggatagtggtcactgatggcttgggcctgcaggcaagtgggcacagggtctgggctgagcctacctgagctcctgtgtcccatcctcatgtggctgtgcaagggaggacacataccagttggtcactcaggccataggcagcctggaagttaaagggaagagccgagtcgggaacaacggcgcctcggagcagcatccctgcaaccacgatcctgatgggtgttgggaagagaaagtaggttcccctttcacacatgggcctggctcagcacccgcaggaactaaactaaga

SEQ ID NO: 81934 - DNA, 1024 bp, Homo sapiens
tgactctgtcactgagggcagagggaagacgctgggtccaggccgggctctgctgttgggtggggtcccctcccagggcgtggtgcgcgtagctccctggagagcccctgggccacctggggcaggaggtgcttcctaagcccccagagctcccaaaaggggcctgatgggcagagcaaggcctgctctcggacaacccccgagtccactaccgtccctcgggtcagggccagcctggagtgccaggaggccatgggcatcggagggtttgcgcccagttagttgggcaacattgagcccatgggcctggaataagtggtgacctgccccgtcccttctaggaggacatagcaaagctgctgcgctacgagtcctcggcgctgccctccgggcagctaaccagcctctcagaatacgccagccgcatgcgggccggcacccgcaacatctactacctgtgcgcccccaaccgtcacctggcagagcactcaccctactatgaggccatgaagaagaaagacacagaggtgggtgagcggtgggtggggcgggctccgggggctgcaacctggggagggtcttgaccttctcagctctgtgctgggtgaacctgcccaagactccgggcagggctgcacagtgggtcagggtcacgggcacagaggccggaccgactgtgacggctgtttcccacttggaggtcacatgtggttttttttgtttgttttttgtttttttgagatggagtcttgctctctcgcccaggctagagtgcagtggtgcgatctcggctcactgcaacttccgcctcctgggttcaggtcattctcctgcctcagcctcctgagtagctgggactacaggtgcacaccaccacacccagcaaatttttgtatttttaatagagacggcatttcaccatgttggtctcgaactcctgacctcatgatctgcctgctttggcctcccaaagtgctgggattacaggcgtgagccactgcactcagccacatgtggatttctt

SEQ ID NO: 81935 - DNA, 1010 bp, Homo sapiens
gcaatcgtggctcactgcaacctccttaagtgattctcctgccttagcctcccgagtagctgggattacaggcgcccgccaccacacccggctaatttttgtatttttagtagagatggggtttcaccataattgccgggctggtctcgaactcctgacctcatgatccgcccacctcggcctcccaaagcgctgggattacaggcgtcagacactgtgcccagccagagttgtgatttttaacataaagcccaggctgtcattttccgagtgttaccccgaggctgtcccggccacccacagcccaggtcactgttctgggaggtggcaggacgtagaggaagctccggcagtgccgcctccctgcttccctcttagcacacgtgctgggttgaaggccaggcctgaagacaaagggcaggttaatggggaatgttgggtggtgtggagggccgcagccccgggagaagctgactgccgtgtctcccaggtgtggtggacagtgaggacattcccctgaacctcagccgggagctgctgcaggagagcgcactcatcaggtgagcctcgggccgcggggagaggaccctgctggggacaaggcccctacctgctcctttgcccccagagggccctagccgtggcccatggagctgagagcagaggtggtcggggaagcccggcctgcacatgggggccctcaggagccttccaggtgctggcctggcctctgaagcttgtggtccagaagaaggtgggggtggctggtcatggctgaggctggagtctggatagggggaggggccgcagagccagacctgcccacctgtgccccagggttgtgactgcagccctgcagcaggccagccctgtgtggaggggactccagtgtgctggctccaggttctccatcagtagctatcacttccccactctggccccaggctcaccaaatagtctttattcaaaacctcgcttactggctttttttcccctaatgcaagtagtat

SEQ ID NO: 81936 - DNA, 1055 bp, Homo sapiens
cctgtttaattccatgggagcggggctcagagtaaacttaggccaaggcatcaacatggccctgccgggggattcccccctcctgtgcttcggagatggttttctgctcttcttagggggcgcctgtccccctggcctttgtttttgcccctgggcatctggcacccgatttggagctgggccagtcccccacagtgccccaggcctgcttttggggtaagcccagaagcttcttcgaagcccagggtcggtggaggacccccgcccccccgccccccgcccgagggaaccaggagaactctgccgcctgcgacaggctcatcgttcctgatgggcatgtgatggcctgagtggtgcgctggggtcagaaatggggcatttgaggtgtgttgtgtgttgtttgggctctgcctatgaaaccctcgggaaccgctggagtcccatgcagggtatgtcccagtgtcacatccacctggcttttcctttctttgcctgccttagttctggagtgtttgaaatcgccgaagcttcgggagttagaaccgggacaaaaatcatcatccacctgaaatccgactgcaaggagttttccagcgaggcccgggtgcgaggtgagcgggagcccgggcccaggctcactctgggatccatgtgtggcctggaggccaccaggtcagcaggcattttccctggttctacctgcacgtagggtgcacaggcagagccgtgaagggccgagccgctgcgggactgggaggggggctgcccgccagggctgcgtagcatcgagctcctgctgggactgggaggaagctggcctggctgaggcggacctcctcctccttcctctgcgtggcccttggcctttagtgcacctgggggtttggcgcagtcctgtcccaggatgtgggcgtggccttccctctttgtgtcctgctggacactcagggaggccctgagtacccccaggagtcagcccagaaagccatgttccagccacaagctgacattgcagtctcgcagcagccggggcctccacagctctggttctcacg

SEQ ID NO: 81937 - DNA, 1061 bp, Homo sapiens
aaagctgcaataagccgtgattgcagcctccagcctgagtgacagagtgagactctcaaagaaatcctgaaaggaaagtcagcaccttcagtcactttgtgaccggcccagaggaactgcctttgactaaagcagaaactctttatgctttgagaattgactattctcctctaccttttaacagttattggaagtgcagctgaccagatagatcctgcaggatgagtgtccttcattgtctgtgcctcccatttctattcctgtaggtgtttatacgggagctgatctccaatgccagcgatgccttggaaaaactgcgtcacaaactggtgtctgacggccaagcactgccagaaatggagattcacttgcagaccaatgccgagaaaggcaccatcaccatccaggtacctccctcagtgtccaggcgtgtggcaggcccggccatgcagcaaggacaggatccgccttctagtgatgtctcgggtcccagggacgtactggccgtccgtaccaccaggataactctggctataatttagtgttacagtagcactcattcattatagaaaattttggaaaagcaggtaagcagaaaagaagaaaatttgaaatcaccccatcatccagcaataactactggtaacatcttagcatatggccacacagggttttggtatatgcaggtattaacatatctaaacatatcttatttttaatgtactcttttcatatttttaactgcgttttcccctcaaaatgccgacgaagcagtgctgtggctgctgctgtagccttgtggaaattttaaggctgaaaagttaggccaaagaggatcaggtaggggccctgagagacattgcatccaaagacagctgcctcaggacctgtcatcccagggtcacggcgtcattgcgggggtgtctgtctctgtggagaggtggacagactggcctcggtgggatctgagtattcccttttagggtgctggcttgctctgaaggtcatgccacataaatgaatgcaggcacgcgtgaatgaatggacttgtgaagggatgg

SEQ ID NO: 81938 - DNA, 1050 bp, Homo sapiens
ttttgtatttttagtagagatggggtttcaccctgttggtcacgctggtcttgaactcctgacctcaggtgatccacccgcctcggcctcccaaagtgctgggattatggtgtgagccactgcgcctggccagtataaaatttttttaaatgggcagcataaaaagttaagtgcagtgaactcataggaagagattattgtgaactgctggggccagggaggcctgaatgggagagagggcctgcagccaggccctgcagcaactcggatgggaaggagtcccagctactgagactgcagctgcagagtggaggagctgcatgggcactggcagtagtgggtagggatgtggggggtggaaggggaggggtgtgtggtgtcacattcaaactatcagtgcttcccattttgtgcgaccccaaaccaccagatagtttaacagtaagatcttgtagcctgacattgaggtttgtggtttttcctttagggtgtaggagaaacacaaagacggaaattgtacagctagcgtgtttggtatctggttcaggcagatttattcctctaatggtttattttttttttaatttttaattttttttttgagacagggcctggctgcatctcccaccctgaaatgcagtggcgtgatcttggctcactgcaacctctgccttgcaggctcaagtgatcctcccaagtagctgagactacaggcatgcaccaccacacctggctgtttttttgtagagatggggttttgccatgttacccaggctaatttcaaactcctgagctgaagcgaccccccggccttggcctcccaaagtgctgggattacaggcatgagccactgcacctgagttagtgattaaaagttgttgtagaagccgggcgcggtggctcacgcctgtaatcccagcactttgggaggctgaggcgggcagatcacgaggtcaggagatcaagaccatcctggctaacacggtgaaaccccatctctactaaaaatacaaaaaattagccgggcatggtggcgggcgcctgtagtct

SEQ ID NO: 81939 - DNA, 1906 bp, Homo sapiens
gtccagtcttggtttgcaagagacttgcagcggcctagacggatggccgggattcacaaaggtcgcagacacgggaactgcttcttccccagcgtcgcctccacaccctcgcgtggatactgacatccgccccattccaggaatgcgcacagctaggcgcagccggccagcgtgggccgggggcggcggggccacctcccccacctccgcgcgcaaggcccgtcgcccttgacaacgcgatccaaggtcacggaggtcccacccccaggcccgaccgtccacgagacgggtagtaccccgccacgcgcccgagcaggcagctgcccggacagcccggcgcccgccgtgacgtcaccgccccgcgcccgaggaagccccgccccgcgcagccccgtcccgccccttcccatcgtgtacggtcccgcgtggctgcgcgcggcgctctgggagtacgacatggcgcgcgagctgcgggcgctgctgctgtggggccgccgcctgcggcctttgctgcgggcgccggcgctggcggccgtgccgggaggtgagggcgtcctggctggacgggcagcgggcgggccgggccacggagacggcagggacgtccctgtgctccggggagcgaggcgccggcacctgcttcacaggcgtgggaggtccggcgaggccaagcgcggcagacgcgtttactttcgctccgctcctcgccagctccagcttggctgccttttcctcggctggactcccctcgccacccgcccatgggagccctgaaggaggctgggtcttggggggtcgcggggtcgggcggagcggctgcggggtcgtccctcctggagcttcggtccagtcaggtagcgcacgtgcaggtggagccgctgcggagcgcggagtctttgcgggtgcatgttgcggggaatggactcactcggggtgatcgtgctagttccatggatcgtgctttacccctccccgcctcccagtagcgcactgagggttcatttgttaattcgttcattggacgcacatgtgagcgcccgctcagtgcccggcgccgtgcaggttctggggacgccacagtgaacaaaacctatagcagtcatccgggtccccagagcaggtggactcgatgtcgttgacgcagctgtgtcctcggggcctggaattgatggatgcgccaataaatgtttgtaaaacagagagaacgaccctaacctctgctttcccagtccccactcggaggtaacaacagtgaaagtttcggcattgcttcggggctgtacacagtgttatacgtgtaaatataaatgtctgcgtataagtattttttattctaaaaagcctaaaccatgtatgcattgtgctacgttgtacttcagaaaattttaacgctcccagcattctttccacatcttttcatgtcagtgtatacaggtccatgtgccttccagtgaccacacagtattctgtatgatggacgtgtcatttgtttaaacattgtcctattagtggacgcaataaaggttatttcaggttttactttttattacaatgctgcatagaatgggtgagtacttaaatatttgttcacgtgcggtatttctttagccttacataattagaattttagaattgatatttcagagcctatgcatttttgaaatgttagcagatactgccaaattgtccaaaaaggccttatcaatttatatcccctttagcaggcatcaagactgcctattccaaaggtattttcttcaacgctgaatcttatgtcttttcaaaaccagtggtctataaaagataccttgtggccgggcgcggtggctcacgcctgtaatcctagcactttgggagcctgaggtgggcagatcaggagttcaagaccagcctggccaacatggtg

SEQ ID NO: 81940 - DNA, 1667 bp, Homo sapiens
ccacggatacagccccagccttcgccacaccacgtctcaccccagactggttccccccaccccggactcgcagtcaccatggccagctccatagatcagggacacttggggaaccccgaacagagtgcaatgctcccccagctgaacacccccagcaggagtgcgctgtccagcgaactgtccctggtcggggacaccacgggggacacgctagagaagtttgtggagggcttgtagcattgtgagagcatcaccttttccctttcatgttcttggaccttttgtactgaaaatccaggcatctaggttctttttattcctagatggaactgcgacttccgagccatggaagggtggattgatgtttaaagaaacaatacaaagaatatatttttttgttaaaaaccagttgatttaaatatctggtctctctctttggtttttttttggcgggggggtggggggggttcttttttttccgttttgtttttgtttggggggaggggggttttgtttggattctttttgtcgtcattgctggtgactcatgcctttttttaacgggaaaaacaagttcattatattcatattttttatttgtattttcaagactttaaacatttatgtttaaaagtaagaagaaaaataatattcagaactgattcctgaaataatgcaagcttataatgtatcccgataactttgtgatgtttcgggaagatttttttctatagtgaactctgtgggcgtctcccagtattaccctggatgataggaattgactccggcgtgcacacacgtacacacccacacacatctatctatacataatggctgaagccaaacttgtcttgcagatgtagaaattgttgctttgtttctctgataaaactggttttagacaaaaaatagggatgatcactcttagaccatgctaatgttactagagaagaagccttcttttctttcttctatgtgaaacttgaaatgaggaaaagcaattctagtgtaaatcatgcaagcgctctaattcctataaatacgaaactcgagaagattcaatcactgtatagaatggtaaaataccaactcatttcttatatcatattgttaaataaactgtgtgcaacagacaaaaagggtggtccttcttgaattcatgtacatggtattaacacttagtgttcggggttttttgttatgaaaatgctgttttcaacattgtatttggactatgcatgtgttttttccccattgtatataaagtaccgcttaaaattgatataaattactgaggtttttaacatgtattctgttctttaagatccctgtaagaatgtttaaggtttttatttatttatatatattttttgagtctgttctttgtaagacatggttctggttgttcgctcatagcggagaggctggggctgcggttgtggttgtggcggcgtgggtggtggctgggaactgtggcccaggcttagcggccgcccggaggcttttcttcccggagactgaggtgggcgactgaggtgggcggctcagcgttggccccacacattcgaggctcacaggtgattgtcgctcacacagttagggtcgtcagttggtctgaaactgcatttggcccactcctccatcctccctgtccgtcgtagctgcca

SEQ ID NO: 81941 - DNA, 1071 bp, Homo sapiens
acgcacgggcatggggaccccggggagccagatggcccccgtgagcctgaatgtgccccgacccaaccaggtgagcgggcccgtcatgcccagcatgcctcccgggcagtggcagcaggcgccccttccccagcagcagcccatgccaggcttgcccaggcctgtgatatccatgcaggcccaggcggccgtggctgggccccggatgcccagcgtgcagccacccaggagcatctcacccagcgctctgcaagacctgctgcggaccctgaagtcgcccagctcccctcagcagcaacagcaggtgctgaacattctcaaatcaaacccgcagctaatggcagctttcatcaaacagcgcacagccaagtacgtggccaatcagcccggcatgcagccccagcctggcctccagtcccagcccggcatgcaaccccagcctggcatgcaccagcagcccagcctgcagaacctgaatgccatgcaggctggcgtgccgcggcccggtgtgcctccacagcagcaggcgatgggaggcctgaacccccagggccaggccttgaacatcatgaacccaggacacaaccccaacatggcgagtatgaatccacagtaccgagaaatgttacggaggcagctgctgcagcagcagcagcaacagcagcagcaacaacagcagcaacagcagcagcagcaagggagtgccggcatggctgggggcatggcggggcacggccagttccagcagcctcaaggacccggaggctacccaccggccatgcagcagcagcagcgcatgcagcagcatctccccctccagggcagctccatgggccagatggcggctcagatgggacagcttggccagatggggcagccggggctgggggcagacagcacccccaacatccagcaagccctgcagcagcggattctgcagcaacagcagatgaagcagcagattgggtccccaggccagccgaaccccatgagcccccagcaacacatgctctcaggacagccacaggcctcgcatctccctggccagcagatcgccacgtcccttagtaa

SEQ ID NO: 81942 - DNA, 1572 bp, Homo sapiens
gaatgaatgaggtttatgttgacattgacccttggagaaaaatagtcaaccgaactgcctttacagtgcacaggaggaaggggatggcattgccttgatgagccatcatattccctggttctttaatgaggcctcaggtttcttttgcagcctcggccctgccctgtgtgtgcaccccaagggagaagtgttgcagggctaatttgcaggcttgcatttgctcaggataaagttcgagccttgcccccaccacacccagctttgtgggcattcattctctctctctggttacttctgtcctggctttagtccttgctcctctgctataactccttaaaggcagggccgatttcactggcacgttcatctgacgtgtgtgcgtgggtcctgcaggtatgtgacagggcacatctgggcctgtcctccaagtgaaggagatgattacatcttccattgccacccacctgatcaaaaaatacccaagccaaaacgactgcaggagtggtacaaaaagatgctggacaaggcgtttgcagagcggatcatccatgactacaaggtacccggcgctgaaggaaggtggtggcttttgtcacaactgaggggaggatatttgtgtgcctttttcttgcattcgcatacttgttaattaccttcacttatgaggattagaaagcagaaaaataaaagcctaaagtgagaacttagaagcattttcttcagctgattgaggctttcccctggccgtctgagagcagcacagttggagctgtttccatcagtgggcattggggcctgtgcatcactgttgcacacataggggctccagcactgtggtggggggtgcacatgtgtgggggtctgctgcactgtggtgggggggcacacatgcatgggactctgccacaccatggtgaggggcacgcttgcgtgggggtctgtcgcaccatggtggggggcacgcgtgcatggccctcatctcactgttgtgctttgcccactcaggatattttcaaacaagcaactgaagacaggctcaccagtgccaaggaactgccctattttgaaggtgatttctggcccaatgtgttagaagagagcattaaggaactagaacaagaagaagaggagaggaaaaaggaagagagcactgcagccagtgaaaccactgaggtacagacccttctctgagctccattgcccacgtgtcccgctggagctgcagggtggcaggctgggaggcgcgtgtcgactgttaggtccttcctgtggtggtgtctccgttcacacatgcacgtcgacaccacctgcagcacagggcgttggtgggcagcagtgtgggctctgcactctctgcacagtggatgctctggggagctgggggtccacttagactcggagagggaagagaggaagacagaaaatgggacatggggcagtcaggacacaacccgctgatgtaaaaagtgagtcgaggaggcacagggttgccaggccttattccgtgtttggtggccactctgcacatgatgctcatgccctgctgccctctctccttggcgctgcccctga

SEQ ID NO: 81943 - DNA, 1025 bp, Homo sapiens
gctgtgcctaatttataaattaaaattttgtgaccagtacaggtgtataagaaaaaacgcatagaggttgatactgtccatggtttccagcatccactgctggtcttggaacatacaccccgtggataagggggactgctgtatagccagtcctcctcagaatcccgtatttcattcacagaggtgcagttccctagtgagggaaactggtcagaaagcaagtgctccctgctccggggctgactggcccatagggaggactccaggccacggtctgaggaggtggccatgcctccgctcatctgcagtggccagagttagaggagcaggcctggtgtgcagaagcaccttgtcagcaacagcctttgtaaatgtccggctctggcttttgtttcaggtttgtggattctggggaaatgtctgaatctttcccatatcgaaccaaagctctgtttgcttttgaggaaattgacggcgtggatgtctgcttttttggaatgcacgtccaagaatacggctctgattgcccccctccaaacacgaggtagttttccagctccttccagggcgtgtcattcagtgagccgtgttaggatagaccagggctcttaagtgtcccagaggagcctgtgagccttcataggggattaaagtaaatgaaaccacaattaactaaccaaagtagttagttttgttttccattaaactagcgggaaatgaactgttgagatgactgcagtgagcgtgttttgtgtggcgagtctgtgtgggacccgctcttacctaacgcaggtaaacctggggagttgggatgggacagcctggcacctgaacagaggaagtagctctgccacgagggcttcatgtgcagtcaggaatctgggcaagaaggaactaaaagtggcttttctcagtttgccttaactgtggctctctgtgccgagtggtgccattcatccttttgttcagtgacgaaaactgaattccatttaactgattggcagcagggttggtgactggttggt

SEQ ID NO: 81944 - DNA, 1049 bp, Homo sapiens
aaagtaacccagagaacaaggtgtggacgcacacacagacttctacaagtgactctggtcttgtggttccgtgtgctttaacagtgcgccttctttgcctcctagtttcgttgattgcaaggagtgtggccggaagatgcatcagatttgcgttctgcactatgacatcatttggccttcagggtgagttgtttcccctggcctggagggcagttctgcacagagccagtggcggggcagttgcagtggctactgcatctcattcattgttgtcagcaagaattcagcgattaagagagatggcagttggttctaaatttaagttctaagcgtttgtccgctttaggaattgtggaatcaaagcagtctgcctcttcactctttaattttataataatgtgatttaaactgccaacaaactatctgaatgctgcattttgttggtttgacaatttacatcattatatacagtctcatcataccactattattttgcagttttgtgtgcgacaactgcttgaagaaaactggcagacctcgaaaagaaaacaaattcagtgctaagagtaagtttcgggaagctttctgtttcctggactgcacattttagaaacttgtagaaattgtccccattgttctttggttcctctcaacacatggttctgaggttcggttgtcaaagattttcgttagttttttccccagtactttgtatttttcttgtctcatccttaaggagagccaggccagtcatgagggtaagaatgcaagaatgttcttcaggggcttcactgagaataggcagcacagctgtgagtccctgaagtctgtgcttctcagaatggtcatctcagccacggggctgctgagcacagagctcagagcaggactcgcagccttgggctgtggatcttcatcaagtgtaaaacatctcagtccacccttaaagggaatatttggcctgattgttatatgaaagtcagcatttatgatcagcgcatgttttagatgaaaggttagatgtgcagtaaactttgtaaattctgaga

SEQ ID NO: 81945 - DNA, 1126 bp, Homo sapiens
atcacatttcttactctgtatattcatattgataaatgggtggaaagtctttgaccctgactgcatttatgttaaatgtttgtctagaatatggatttggtttcatttgtattgtaacacaattaactgaatgattaacatgaaaaaaaaaaaaacaggaaaaaattaaaatcagttctgggtgctcagcattttcatacatttaaagatctggcttaataccggaaataaaatctctgaattgctgtcaagcataaattttccattttgaaaaataaagctatttcagtttaaattgcttttttaaggccttttgtcagactgttttgttcaagtaaatttttccatctcaaaccctggagttatatttgactttctctgagtaagaacaaaattcagattcctaaatttgggctccatgcaattctagtattaacaactccttgaaaacatttgcctcttggagccggaccgagcctgtcgttgttagtgatgatggcctgtgatgtgtgcaatgagaccgaatgctaatcaatgctttgccttggctttctgctctgtgttgtcttggtgtctgcgtcttacctctgtgtctgtgctatttgttcccttccctgttctctaatcctgcctttccccacctgccccctgttcctttcattgtcctcactgacccatcaatcaaccaacaacgcccccccttcgtcgtggtgctctgccctgctctgattggtggcttcgttgcttgggtggctgtgtgttatgatggaccagttcacccaagtatggccttcttgctgacaggtatcatttctgtgagaagtgtttcacagagatccagggcgagaatgtgaccctgggtgacgacccttcacagccccagacgtaagtaccgtcctgtcattttctctggggtgagggagggtgaccttaaattgttttttcctcttaccaatgactataaggaaggtaccggtgccattttgacttccttgcaatgttttttggttttttgtttttgagacaggttctcattctgtcacctgggtggtgtgcagtggcactatctcgactcactgcagccttgaccacttgggttcaagcgatcctcctttctcagcctctc

SEQ ID NO: 81946 - DNA, 1048 bp, Homo sapiens
taaaagcaaaggatttctccaggattttaaaaccatttagactcacctgtgattacggtgggagtttcatttcagaatgtcttgaacggtcccttctagttggccatagttctgcgtgtttgattgtatcatgaatggggcactcaattaggagttttacttataaaagggaagtattggggattgagggaatgtcttttttgtgtattgttttggttgccactgaattggtttatagtttctgtactttaattccttcttgccagtgatgaccataccctcctgcacacggaagttcttcttcataccggattttaggatatttacaaaatagtgaatggccagaatattgctatagttcattcagggaaaaaaaaaatacatatttaaagaaaaacattaatctgcctcttgcctgtcagagtgttaaatcctgacataatttattaattgagttagtgccaaataaattagtcccagcaagaaaccttcattaatctagtgaatctgtcatgttcctcatcaaccaaacacaaaaaattggctcatcttgagatgtgcatgcactgaagttgtatgctttaaaatttgctgtatgtgtgtggttagtgaaatacaacagacaaaatgctcaatgtattgaattaagattagatttgggacttgtgggggacctgtcctagtggtagtgaactggccacacggtggcccacgcctcagtcttctgtagccgtgtgagtgcgcaagtgagtgagactgcagctgccgcgtcccattctgcacttggtggttcagcctggcgctcgagtcctgtcgcactgtttttaatactaatccttcctggcatcttgtagacatagttttgagcactaaaccgcattcgtgctgccgtcgctacctgacactcattcttctcgcttgtgtgatccacctccacccgcttgtttattcttacggtattcttgtgtactcatcttgttttatgcagcatcagcctgcatttctgttgatttctcatttatgtcctttccaaacatttagtagtttt

SEQ ID NO: 81947 - DNA, 2428 bp, Homo sapiens
acacaccaggctaaatttgtgtttagtagagacgaggtttcactacgttggtcaggctggtcttgaactcctgacctcaggtgatccgccctcctcagtctcccaaagtgctgggattacatgtgtgagccaccatgcccagcctgaaatggctttatttgccacccagtttgatgaatgagacagatttgggagttagctttactttctttttcagccaagtttttaatgttggaaacctttcatggaagaagcaaacttcccagtgttgtattttgcctcacaagctgaacacagttctgacactagtgtgttttcagaagctttagtccttaacggtgatggacgagagcccctcgagtgccttaggagcatcgtggctgggatgtcacagcagccaggattccgttttaaatgtgaggtaggagggatctgagcaccttttacaaagtgtcttttcttgatgttttctctgcagtctttaaaccagaggagttacgccaggccctcatgccaaccctagaagcactgtatcgacaggacccagagtcattacctttccggcagcctgtagatccccagctcctcggaattccagtaagttaattcataaaaatagattataactttgctggtgtgacttctgagtgtccattgttttatctcttgaaattagataaaataatccccctgccttgaagattgttctcctaatataaaaaactgttgtctgttaacagttatcagtgaaagtgtttattttgtttgatttcacctgttcatgaagccctggtccttggaggaggggtgcactgaagcaagggaagcacatgcccctgagacttcactttatatttggggccttgtgtcacttttgtctgaaagaatttgtgaacatgaactgtaaaaaaatatttgggcttctctcttttatattcctggatagccttgcaaaggccatggggacccagccgattctatgtagcagtcattactagctttgtgtttatatttgtcttgtaatttcattttgcttgctaggatcaagagtgaatatctagaaatacacactgtttgataaacttgttcactattttaattcagtggattaaagatctatttttaaaattttttgttagaagtatcttttaacaatttttctttacttttgcctttggagtattataatgtgatcatacctgaaaatactaattacacttttagtgagtaaaatcagttgcgtcagaggttattttcttttcatttcctatttcttactgttgggaatggaagttattttggtgctttctgtttctattattttaaaacaaagctgccagatgagactggcatttggatattgggggattccctatactgagaccatttttttttttttaaggactattttgacatcgtaaagaatcccatggacctctccaccatcaagcggaagctggacacagggcaataccaagagccctggcagtacgtggacgacgtctggctcatgttcaacaatgcctggctctataatcgcaagacatcccgagtctataagttttgcagtaagcttgcagaggtctttgagcaggaaattgaccctgtcatgcagtcccttggatattgctgtggacgcaaggtacagttttaagtttttccggaaagtgaattttcctggttaatccagccagaggggtgttatactaatatgagaccacgcctgtatactgggagtgcatatgtgcaatctgctgtctggtgacacagttgatgcctgaagcgatgtgatgggtgatcagagctgggtgtacaggcgcttactgagggaggccatggggaagcgtttctggctgcccctctctgcctgtggtacctgtctgtagtgaatgtctcttagagccagttctatcacatgctatcccaaaatgtctttaaagctactaaaattgttagaaaactgtctaatatactaacagaaataatttactagtctctatagtagactagaacattataagacagtaaatggaatgtatttttatataaaagtatttctcctttatttttgcagtatgagttttccccacagactttgtgctgctatgggaagcagctgtgtaccattcctcgcgatgctgcctactacagctatcagaataggtaagcgtcaagcagcatcctgcattatgtcttagggcaaggcacgttcatctggttatagtctgtgtacattatttctttcctgaagttccaataaaaagtggcccaatttcaggccgggtgtggtggctcacgcctgtaatcccagcactttgggaggctgaggtgggagaatcacttgagcccaggagttatgttatcagccttggcgacatagagaaacccccatctctatttgaaaagaaaaaaaaagagaaaaagtggc

SEQ ID NO: 81948 - DNA, 1055 bp, Homo sapiens
aatagttttcatcttacagcacatagaagggcctagggcagtgctataacttgagcacctaaaatgtgaccagggtggccgggcgtggtggctcacccctataatcacagcactttgggaggccgaggcgggcggatcacgaggtcgggagatcgagaccatcctggctaatacagtgaaaccctgtctctactaaaagtacaaaaaattagccggccatggtgacaggcgcctgtagtcccagcgactcgggaggctgaggcaggagaatggcatgaacctgggaggcggagcttgcagtgagccgagatcgcgccactgcactccagcctgggcgacagagcaagactccgtctcaaaaaaataaaaatgtgaccagggtgaccgaggaactgagttttttattttttgtaatattattcgtttggtaaaatttcagtagtcacaggggctggggactgcgatatgagacagcagcctccaagggctcgagagccgcgtttttgggagatgctggtgcgctgcaacagccctgccgcgtggagcaggtcctcgggccagaggaggggagcggcgcagttcacatacactcctgacttcacttctgcacatatgggatcttcttacagaaaggtgctggtgaagacaggagtctgaaaatgctctcctcggccaggcaccgtggctcacgcctgtaatcccagcactttgggggccgagattgcaccactgcactccagcctgggtgacagcgcgagactccatctcaaaaaaaaaaaaaaaaaaaaggaaagaaaatgctctcctcagcacggaatttgaatagttatttaatgaatgaataaatgatcaaccaaagtgacacttgtttcaggccctgtcactcccgattaccactggggcggtgacagggtctgcaggccttctccgtgcagaggcccagtgatccacgctgtgggctttgtgcgtcctgaggcctctgttaccactcctcagtgctgccactgtggcacggaggcagctacagatcctatataaacgaatgagcacagcta

SEQ ID NO: 81949 - DNA, 1167 bp, Homo sapiens
gtaatcccagcactttgggaggccgaggcaggtggatcacttgaggtcaggagttcgagaccagcctcgccaacatgatgaaaccccatatctaccaagaatataaaaaattagccgagtgtggtggcacacacgtgtaatcccagctactcgggaggctgaggcaggagaattgctagaacccaggagggggaggttgcagtgagccaagatcttgccattgcactccagcctgggtgttagactctgtctcaaaaaaaaaaaaaaaaaaaaaaaaaaaaaaaaacacttttaaatttaggaccataattgcactgactctgtgctgaagcgacttaatgaacaccaagtactttatttcttcttccggaagagaagaggaatcataaatgcaactctgactagaggaaggttttaacaaacctgttttaggcttgtaagagtcttcccgtgaggttgcggtaacataaaggtgtttgatattcatatgttatctgtaatgtttttctcaagatgatggaggaggatttgcaaggagcttcccaagttaaagaagaaacagacatagcagagcagaaatcagaaccaatggaagtggatgaaaagaaacctgaagtgaaagtagaagttaaagaggaagaagagagtagcagtaacggcacagcctctcagtcaacatctccttcgcagccgcgcaaaaaaagtaggccatttattcattaccttattaaagcatgctgcttttccacggtgttaggattccatgtggaggattaaaagctaaagtagaaacataattctatctgcccttttacctttcttgcctgccattccccagactttcccctgcagaaacactcaggctgagcaggacccctgccctgtgcctgtggggctcatggcaggagtgagagatgagctgctgctccgagggcacccaggctgcagagctgtcttctgatggtgctggcaggggccgagttgaaatgtgtctgggtccttgagcaggttaaggagcttggctttactcataaaagtataaagaaccagtgatgtatgtgagtaggagaataaccaaaaaagccataatttaaggaagatggtcattatgacagcacagggtgacttggaggcagaaggtttctgcaggtgcagtgaggaagctga

SEQ ID NO: 81950 - DNA, 2545 bp, Homo sapiens
tcaccatgttagccaggatggtctcaatcgcgtgaacttgtgatctgcccaccttggccttccaaagtgctgggattacaggcatgagccactgcacccggccagctttttatttttttaatggatggtgaagggggtgtggtacgttactcttaggaagagtccgagaaagaagcaccctagatgtggggagggagtgcttctgaatgctgagaaggagaagcatgcaagacagtcctagactgctgagcacttgcagaggctgaaatggggacggcacgggctgctcttggccctaggggttaagcccagctggctggatgtcaacttctggagagagtgtacacacaggtcctgtgccaggttggggtgtcagcagctgtctcaacaaccttgaaaggttcttaagtagagagcctctggtttttggttggttgaagcagtgatttttattttggggcagggagcatttgaaaaccctgtagctcttgaccattgagacccaagcaggaggacatttttccaggttgtgaaacaaggtggtgacattatccagaagactctaaggaaagaggctttgctcaggctttgatttttgaaagaaatcaaggagtcaggctgggcacagtggctcacacctgtaatcccagcactttgggaggccgaagcaggaggatcacttgaggtcaggagtttgagaccagcctagccaacatggtgaaacccccgtctctattaaaaatacaaaatttagccaggcatggtggtgcacacctgtaatcccagctacgcgggaggctgaggcaggagaattgcttgaacccaggaggcggaggctgcagtgagttgagatcacaccactgcactccagcctgggcaacaagagcgaaatctcatctcaaaaaaaaaaaagaaagaaatcaaggagtcagagaaattgagccttgggaaagtggctggatgctgtgttggggattggtccaggacttcagcctggataggaagatgctgctggtgtggggtatgatgcccctgctgtttaccagcagaatattggaatagatgttttctagttatgcacttagcaacctccctaccagcacatctgggtaaatacagatttctttaagtgctgttccttagtaattgtttttcattttgtttaaaaaaattctcaaggagtggggaagcttacattatagactccctggaaagtcttcctggtctgcatcggcactccgttatttgagggtaccatttctaggtagccattgaaggtagtgctccgtgagtcatcctttgagccttctcatgactacagcagcgctaaggcagcaccttccagaaattctctaaagggttctgtcagattctagtgttggtcctaagactaatttgaactggtgcttctttagaactcagagtttacagagtattattggaaattggaaggaactagacaccgcagtctggagacacttactggctgtgaagtgtctttcagtgatgtggtgttcctgtaaactacaggaggctaaggttgaggacggctgacccttgggcacttcttaatgcttaaggtgcttgcaaaattaaaagaacatttggagacttagcacagattctaacaatgaatgtaaacccagcaaggagctgggaatcctcggatgatgggcgtcagctgctccagaggcattaggtatgggtgtgcacagaagcttgccctggtctctggaaacatctcttctgtagcttgtgagggtgctgtcctttcagggcacctcctcaccctctttgttgctatgacactttggtactgtgccctctggctcagctctaccacagcctcgtttaatgtctcacttgttcctgtcttacccaaccttatgccttcatgtcctcgtccttccctggtacccctcaccatgccaccgtcaccacccccacattgatgccgttttctctggatatggagaagtctgttccttcatcatcttcattgattaattgggtgatttcttttcagttttctgttgcctgtgcgttccatcttattttacttaagagtttatttagcaagttgtaattctgttttcctgtgggtgcttttcctaatgaaccgttgtgggtacatttacagggatgaattcatttaaccccatgtccttggggaacgtccagttgccacaagcacccatgggacctcgtgcagcctccccaatgaaccactctgtccagatgaacagcatgggctcagtgccaggggtaagtgttctctttcgctgtgctgcagatagccctccctctcacatggaacattatctaagcagcagaattcatgtcacttgagaatcctgtggttcttgttcctttgaatttgggttatgctttatttctttcatctctcattttaaaaaaattattactacacagaattatttgactgttagttattttattggaataacaaattcataggaatgtgtggctttgtgagaatgtgggagttccaaggctggagaaggcagcctcagatatgtggcca

SEQ ID NO: 81951 - DNA, 1079 bp, Homo sapiens
ctttagaggctgaggtgggaagatcattgagcccaggagttcaaagttgcagtgagctatgatcatgccactgtactccagcctgggcgatagagcaagaccctgtgtcttttttttttttttcttctttttttggtatggagtctgactctgtcgcccaggctggagtgcaatggcacgatctcagctcactgcaacctctgcctcccgggttcaagcaattctcttgcctcagcctcccgagtagctgggattacaggcatccaccaccatgcccagctaatttttgtatttttagtagagacgggatttcaccacgttggccaggcagatctcaaactgctgacctcaggtgattctcccgcctcagcctcccaaagtgctgggattacaagcgtgagccaccgcgcctggacgaaaccccatgtctttaaaaaaaagaagaaaaaaaaaagtagtttgatagatgtgttatcctttcagcgtccaagccatcttcccaacacctgatcccgcagctctaaaggatcgccgcatggaaaacctggtagcctatgctaagaaagtggaaggggacatgtacgagtctgccaacagcagggtaggttgctgtttaccgtgctctggcctctacagcatctgtagtagacagcactacatttgtctgctttgttatctggaaatagtggaatctatgtagttgggacagactcctccccttgaggccactgaccaaggagacttcccagataagacacaaatctcctgcagaactctcttgattagctacattggtgcatggagtatataaatttacattatatccatgggatatatttttcatagtaggtggtgttgtaatattgttagcatcagtgaatattcaagaagttcatttgaatgaaatggaacatgtattaagtacctactatttgatatgtcctataaagtcattgggaattcagcaagaatgtgggcttctggtgtatcaggtatttgcatactacttttgccagtgtactcaatgaggaagttcattagttagaacctacaacacagatcattcagttgctttttac

SEQ ID NO: 81952 - DNA, 1050 bp, Homo sapiens
tcctttaataggaagattgtagacaaattgacctctatatttttttcctgagcttaatttctatgattttattttctgatattgggggtggagacacagaggtgtgtgtcagtgcagctgagtcactcaggagcgatactaatgaagcagaatgaaagtaagaggctgcatgtgggtcatttataactttttcacttagatagcagctaacctccataaacacaccttactttggttacaaagtagagtggggagggtgtctactgattatttgtgcacgttgattaccattattgaaaatatgacactcagagttcctgccgcagtgcttactataactggccagaatcacttatttaaataaccaccaattgtttatatggtggcatgttggttatctgtcatcaaaactttgaagtatatattaaaatttaactgttgattgatttcttttctgtctttaaaggaaataatccaatgaacattccagcaggaggaataacaacagatcagcagcccccaaacttgatttcagaatcagctcttccgacttccctgggggccacaaagtaagaccctgtttcagatctgagtgacagtccaacaggagcatggactgagaaccacacaaaactgattctttctaaatgtgtggcagagaaaatagtttaaatggggtggtgaggggtgaatgctgttttcctttttttctttaattataaatgtagagcagataatagattaaaacatagtttaagttttatttatttacatcacttggctctcctgacttaaacttttaaaagtcacatgtggtggcagaagaaccttactagacaaagtgtgtttgagtcacttcagtagatggatgaagtgtctttatttcctccttagcccactgatgaacgatggctccaactctggtaacattggaaccctcagcactataccaacagcagctcctccttctagcaccggtgtaaggaaaggctggcacgaacatgtcactcaggacctgcggagccatctagtgcataaactgtacgtaac

SEQ ID NO: 81953 - DNA, 1038 bp, Homo sapiens
agcctcactccaaccttaatttcaaacagctcagtcagtcaatcaatcaagtacagtatttcttgaacagcttcatgtagccggagagctcagcatggtgctctgctgcataggaatcccatcagaaggatatgtccatgctgtcattgtttgtgtatgtttcaaggacttgcaattatgtgatttggaagagcacattatagatttattaatcaaaactgaccgaccaggtatcatctctgctccttctcttaagccctctgtacctgtgcaggtgagcagtgaaggacagggttggggtcaacaggagggggctcctctgttcatctcagaggtgtctgctggtccccagagaatcagacgtttcccttgtcatacatttgccactccctggaactgacttcttgaggagtctctaggttttaagacataataatttttttcaagtgttatctgtgagattttatggtctgttgcatgctaagatagaaacttgacttttctttaactttttgttcctcacttactgctaggcagaataaatgagtccttcagcacagttcctttctccctaggcttgtttactgctttatgatattcatgtgtagtattttgatgaaatgtatttgcttctcaatagtttttaaatcattcgtgggcttctcccttttacttacctctcgtttttgtctgtctgtctgtttgtcgttatagccatcctggggtctccagctagtggaattcaaaacacaattggttctgttggcacagggcaacagaatgccacttctttaagtaacccaaatcccatagaccccagctccatgcagcgagcctatgctgctctcggactcccctacatgaaccagccccagacgcagctgcagcctcaggttcctggccagcaaccagcacagcctcaaacccaccagcagatgaggactctcaaccccctgggtaggtgaaggaactctcaacttcgttcttacttgtccacatgcagcaaagggaatggagtgatggaacccaaggcagttt

SEQ ID NO: 81954 - DNA, 1695 bp, Homo sapiens
ttattgttttttctcttctcccaaagcaaattatgcttatcgtgtgtgaactcttgagttaggaacccagagaggaaaatgtgaatctgaccctacgttggcttaaggttgggttttgaagacaatatatatgttaaaaataacgtaagggtgacctccctcaaaggaccgaggtagagacaagtcagtgcaatcagcattcttttcgaggagaattggagcgcacctgactactttgtagagaaaggtgggacttggtggagcccagtgcaaacagaataacaaaggaagaacatttcagacagtggggacagtgtctgcacagtgcacagcttgtgagggcatgcatttgactggactggggttcctgtgcaaacgaggtgaacagaaaggtggactgtgatgagctcctggaagcctcagggactctgccgagacccacctgtgctcgctctgtggagactgccttaggggccccgggactctgctttttaggcagtgtttcccacaggccagcgctggtcttacctgatgcacacttccttggtcagcacatgctccactctcttaacttctgtgattaatgtctctactgagagaaccttccagaatcacctgtggcgctaatctgaggttctttgaaatgaagcccagaccattgattacctttttggcctgtgttgagttttgtttggttggttggtttgttttgagacggagtcttgctctgtcacccagactggcatgcagtggcatagccaagtctcactgcagcctcaacctctcgggctcaagcagtcattccacttcagcctcctgagtacctgggactgcaggcatctgccaccatacctggctaatttttgtattttttgtagagatggggtttcaccatgttgctcaggcttgtctcgaactcctgagctcaagtgatcttcccaccttgacctcccaaaagtcctgggattagaggcgtgagccaccgcgcctggcctcattcgatttttccttgaattgttttttaaagattctgtaatcactgatctcgagttaaccatcccttatagcaatattcaattttttttgaataattaggacttgccaagataagtatcttatgtcagtcctggcatctgacctccagtaaattcagtgcacagagtggcatggttgactgggctttgggacccgtgagcaggttcccctcttggggcttatgctgcctcacttgtgaagttcttgctgctcaaagtgtaggcctcagggaagccatagaggtgctcccaggttgtaagcaataaagaaattgggcccccatttgagacctcttatattaaaacctgcatttttataaaaatcctgggtgattagtgtgcacattaaaatctgagatgcactgctctggatgccttggaagaccaggtatctgggccagtgctggtgagagggtttgagtcattctctgagagagagaccaggggttttccaacctagagtcccccagggactgttgaagcaagtgtgcagggtcggccccagagccagcctaatgcacgcactgtcccggctgcgtcagccatggccccagctgctgcccggcatctccatgagtgtagctcccactgcttcacctggcaacatgttccatctgtaggtgcctcagattgtttaaaacacctccttttggccggacgc

SEQ ID NO: 81955 - DNA, 1581 bp, Homo sapiens
acagccaagctcagagggcaggcgggctctccgtgtcaggaacggctgtgataatgttggaccctgactcactcactgcctctccctctccctgccccctgcatacatgcacttgaagcagcatggaacagcagagtcactttgttcactgagccaacacgaagacatggtatttcctgacagttactccatacgtgagaatttaaattccatgtcgctataatggcagtgacgtcttagggagggggatagaggggatacttcttttggaattggaaagcccttatcctgaagtaaattttgaaggctctgtcagtcagtctgggtcagtataaaatcccacacagacatttatgaaggtttccctctacgtggagctatggtccccagaactctttgtataactaaacgttcactctgcttcacagtgagagcctctgccctagggctgctgcatcctgatcaccccagtcgttttgccgttgtctaggttgtctgtagccctcggcacggctggttacgcagcgatccctgcttgttgggaggtccgcctggggctctggggctccctgccatttgtaggcttcaggcagtaagaaggatgaacctccctcccgtttttcaaccatcttcctgtcattttagaggtaaaactgtggtctttgggtgtgtcattcagtttcggacagctaggaagtgcccttcagtctcctgtcccctctggctggagctgtacccttagcgacccttccagcacagcacagtcttcctcatcttcctccatctcgtctgtgccatcttgccaccctcccctgttttgtgtattacgtgttcattcctctcattcttcttgatcatccttcctcaagaccccgcagctgcctggagaacatgtgctgcttttctttctggttgtttctgagtggcccagggaaagatggaaaaagtgctttgttcctaagagtactgtggagtggcgtgccagtgacagcccccgtggttttccttttactgagtccagcccacctccctctggcggcgagggagtaggcagcgagctgacgctgaccctgcttcctttaaagcagggtgtccctgtcatagagaagagaaatgccagggtaatggggcctgttatctgcctccctacagaagaaccacaacgagtttcctttaaaagccagtttcctggccaggcgcaatggctcacgcctgtaatcccaacactttgggaggccgaggcgggcagatcacctgaggttgggagttggagaccagtctctactaaaaacacaaaattagccgggcgtggtggcgcatgcctgtaattccagctacttgggaggctgaggcaggagaatcacttaaacctgggaggtggaggttgcggtgagccgagatcacgccagtgcactccagcctgggcaacaagggcgaaactccgtctcaaaaaaaaaaaaaaaaaaaaaaaaagccagtttcctaaaagtcagttaaattattctttgattgactaaaatttgaattaataaacaatttccctggacatttcttatataaagtgacattctggaatcctgg

SEQ ID NO: 81956 - DNA, 1092 bp, Homo sapiens
agtttgaagaggagcaggagagattgaaaaatatttccatatatgtagacccatgcagttcaaacccatgttggtcatgggtcaggtgtattttaaaggagatcccaggtgttgtatcatttcattgcaatatttccactgtgtgttttgaactaatggaaacttagttcaaatctgatggggaacctaacagaaactagatacctatagagtaattaaggattaaactgaaagaattccccttgggtagcagctttggaaggttttgttttccaaatgactttcttcgggtgttggtgccattgttggggcaggagggattgagtgaggagagtggctgagggtggggggaaacagctcgtctacttgcgggatggggtttagggtgaggagagagtggctgctaggagctgcttcatgagccttctgcttggagcatgtgaacctgataatgaaccttgaatttatcattgcaatgagtatttcataggaaactgtgtgagcatttcccaggcccttccttttatattgactgcgtcaccacagctgatgttacctcttttttgtttcagatgggaataactgggaacacaagtccatttggacagccctttagtcaagctggagggcagccaatgggagccactggagtgaacccccagttagccagcaaacagagcatggtcaacagtttgcccaccttccctacagatatcaagaatacttcagtcaccaacgtgccaaatatggtaagttacccttggccctcagtgttatggctctccggtgggtgctgtggtctgtggatttttaccattctcacagtgaaagtctataactaaaagtgtgtcagtaggtgataggaagagaacccagatttctcatgagtagctctctaaatgagtttaacattttctgtgatgagctagcaacaggagagataggtgaggatgattcagccgctcttcccaggctccttttgttgatggagagaattcacgtgcacgaatcactttacctttctctccagaatcatgagaaccagagacactggcttttcttacacttcctgtttgttagtggcttgatgat

SEQ ID NO: 81957 - DNA, 1019 bp, Homo sapiens
agggttttcctggcccaaagatgtagcacagaggacccattttatagccagactggacttgtgtatctgctgtgatcacacacacccgtttcaccattctgaaaaccaactccgaaggcctgttctcgttctgcccgacttttcagcatgggaaagtagctgtccactcctgtccactccaactggtagctgagatccttgtttggaagttttgaagatagaaagggcactgttcctgctgcctcttccgatgccccctccagccattgctgaccctctttgtgccttgactttggtcacttgttcgtggttctttgaccacctccttcctggctctattcctaggggctgcgtggcatggtggtgctttggcgtgttcattcatttgggtccttccgctgcatccctggtatgttgcaggggatgcagagaatgttccaggaaggtgagaagttttatcctagttttgtgaccaaaacaggttcaggatagattattacaaacatttatgtgacagataatcctctagagccgtgtggtactttgtactttccgtggtacccatgtctgctggagtagatggacagtcacagtctgccttttccctcctctttgttgatcatggtcactcacctacttgccagacagttcagacccgcagccacaggatttaatggatgggctaggctcagcaccaggatttgctgcaggtgcctctttgtattgttcttgggttttgagctgaacttaaagaggaatttcctcatcagagctcacactgcagtcatgttaaggctaatccagtttcacccccattctttcttgggggcagtggttggagttggggaaacctcaggatctggcttcaatatttttcttatcatacacagggactatgcattacatatttttactctctgagtgaagtgatagaaaacagaagtaggttctcaaacagttaattgattgatacgcttggtcacaatgctttttaatgggaaacctgggagagctgtgag

SEQ ID NO: 81958 - DNA, 1025 bp, Homo sapiens
tctgtaaagcattcctttatttcattactgtttaagcatggtcaggaaagaaatcatatgtagtgtagaatgattgctcccaaagctgtctctcacctcctcacccctagtactcactgtcgcagctgctcatcttagtgcttcgcatataggaacttgtttagttctcacgcaacccttagaggaggtgctgtgatctccattttacagatgataaaaccaaggtgcagagaggtttaagtaaatccctagcaagtggtggagtcgccattcagatatccccagagcccacatagttgaccgcaatggcatgttgcctctatggatgaaattgtatttgtggctgtgttccaataagaaaaatttggttttttcagaaagaggcattgggctgcctttggcccacaggccgcactttgccaccctgttttcatagacagatcctgtctctgtcccggctactggcgtgaggccggtgaacttgaaggagacagagttgcgttaagcggggaggtgatgagcccccgtgcaagggtgaagcctctagtgggggctgtggggagcgtctgctgagttctcaggctgatttagtgtgtccctgccctttccggggggccccttcctcacctataaagtggtaggttttagctagtcttatttctccacttgtctttgcaaagcttattactgaacatcatattttggttcctttttgtgtgtttttgaccagcatcagtgacaccccccaaagcccacttcctctgagtggtctgctgtgtattgtggcttgaggcgtgtcttgaggtgtgaggaaaactgctgaagtagtcagctgctgcaaaaatggacttagtgggctcctcggaaccaccttaaggccaggtgcggtggctcacgcctgtaatcccagccctttgggaggccaaggcaggcggatcacttgaggttaggagtttgagaccagcctggccaacgtggtctttagtaaagatggggaaaccccatctctactaaaaatacaaaaa

SEQ ID NO: 81959 - DNA, 1021 bp, Homo sapiens
ccacctcgacctcccaaagtgctgggattacaggcatgagtcaccacacccagcccactcttaactttgtctcttaagtatgtctcttgtaagcagcgtagcattagatcttatttaatttattctgataaccttagtcttttaattgtagtgtttagtttatttatatttaatgttgataattgttgggtttaggtttctcatcttatttgttttctgtttgctgcttctgtgttttgttcctttttttctcccttcctgctcttcttgtagaggcaaattccaacatctctgtcatctctgtatctgtttcatttacagtcttgtttgtttaaatatagaattcctggttatgggtcacatcttcctgctccttggcatgtccagtacttttagactgtgtagtggaaatggtggatgataatgttgttgaatatgggttttattgtcctttattagtttgttttgttctggcaggctcttaattactcagatcagtttgattctctcaaagcttgtttttaaacttaacttagggcaggtcttgaagccctgttccttagacatggccttggggtctcagtttaattcctgggatgttcagcaagatcttgaaactccgactgatcagaacttctatgtctctagcactgtgccacctctggaatctgttcaattcacaattccttcgtagtcctgcacacttagttacagctccagtaagccctaggaggtgttggtgatgtgattgttgtgtgtggtcgcactgggagatactctccattttaatggtgtgaacgtaacattatgatatataatggttgtcccgtagtgactgtgtatttcacactttaaacgttatctctcatcttctgaatcgtctgaggattaagttcactgtagaaacttgggaagtgccacatctaacattcttaatgtaaatgggtccaaatcataacttcaaggaccaacttttccaaaatatttttgctatattttaaaaagagttatatttatacaa

SEQ ID NO: 81960 - DNA, 1004 bp, Homo sapiens
cccggccgaaagtctttcatatttattctgtgaaacagtttaaatcgatttggaattatctattacatgaagaattgagagacttcacccttacagtgatgtgggcctgaagcctttttttccctaggaagtgactgaagatctttgacaatagtgccgggcgtggtggctcacacctgtaattccaacactttaggaggctgaggtgggaggattgcttgagcccaggagttcaagaccagcctgtgaacatagggagaccctatctttaaaaaaaatttaagaattagctggtcatggtggcacatgtctgtggtctcagctactcaggaggctgaagcaggtggattgcttgagcccaggagtgcaaagttgcagtgagccatgatcacaccactacaatcaagcataccaacagagtgagattctgactcaaaaaaaaaaaaaaaatctttgacaactttattgctattttctataaatattggctcttttaggcttttagtagtctcttaggtcagtatcgtttttatttagtaaagtctaaatttgctttgattttgagaaaaactaaaagatacttaacttttaatctttgtttaaaaaaaggataggaggtaggcaagtcacatgttacagattaagaagtggaggctgccagtgagtggcagaaccaggcttgcatccacacggtctggccagaggcctgttaacactaatgcaatgcagcctgttctttcgtaagttttacagtttctgttttagtagaaaattcttttcatctaatctttaaaatttgttaacttaaagctgtgcaaaaatgtgtgcagttctttgtcatttttgatgtttgtgattatttctcttctcattcctaattttttttttttttttttttttttttttgagatgggagtttcgctctttttgcctaggctggaatgcagtggcatgatctcagctcactgcaacccctgcctcccaggttcaagcgattctcctgc

SEQ ID NO: 81961 - DNA, 1073 bp, Homo sapiens
agtgcttttcctattaaaaaattaagaaatattttcctgtatttttctccttattacatgacttttttttttttttttttttttgagatagggtctcagtttgttgcccaggctagagtgcagtagcatgatctcagctcactgcaacctctgcctcctggtctcaggtgatccgcctgcctcagcctccccagtagctgggactacaggcgcgcatcaccacaactgactaatttttgtatttttttgtggagacggggttttgccatgttgcccaggctggtcctgaactcctgagctcaagcgatccacccacctcagcctcccaaactgctgggattgcaggcgtgagccaccgtgtctggcctccttgaatctttaactcaatttattttggcataaggagtgagacacagagatccagcagtatatattttttcttgttataatcatcttagtaccatttatttagtattggtaatccatcttttctcccactgatacgatatgctgtttttggtatacactttattctcttttcaaacatataggatttgggtctaatttctgaactctttttctttagttccattgacctttgcttgttcctgtgccagaaacctattaacctagctgtgtgatgacttttagtatatgacctcactagttatttctcacacaggtggttctcaactctgtctacactttatcagatttatctggagaatttttaaaaatatgatgcctgaaccccactacagagcaattgagttagaatctgggggatatggtagaaacattcgtatagtgtgtagttcctcagatgactttcatggcagccagggttgagaaccccactgtgttagataaatttaggactttttttcaaattttaaaaacaaaaaatctttgggattttggatttataagattcactacaactttataagtcattttaggagggatgtgacattttaacagttttgtgacttcctgagtcttcttatacatataaattatcttttctgggggtcttatgttgcttggaagcatagtatggttttctttatctg

SEQ ID NO: 81962 - DNA, 1019 bp, Homo sapiens
tgaacaccgcacaggcaggaggcatggccaaggtaagtgaactgaagcactttcaatacttcctacctaaccgcgggctttccctccgagtaatgcgtaaaatgggaccacgtggcccactcctgtttttcctcttgggctctccacgtgccactcatgcttggaagagacagatttctttctaggataaagatctctgccccatttctgtctttaaaatgagaattcttaaagaagtaggacagcttgcaggtcaggcagttggaaagtacagggcctaatgtgtccgtgaacctggtagaggttgctttctgcctgtgtactgcccactgaggaggtgatcactggtctgtatgctcctctgtggccatccagtgaagtatctgttggcacagtatccatttcactgaatgagaaagctgtgttccagggttgtcagctcactccctgctatgttaacaaggaagaggtggcagagccggggagaagcacaggcattcgggtcccagaggaaacaccagtgcagtggttcttcaagtggggtcccctggaccagcagcagcagcagcatcccctagaagcttgttagaaatgcagacttctttattgactcagaagctcggcgtggggcctgggctttaagaagcctccagatgggtgctggacacagtgactcacgcctgtgatcccagcactttgggaggccaaggtgggtggatagctcaactctaggagtttgagaccagcctgggcaatgtggcgaaaccctgtctcttggaaaaaaaaaaaaaaaaaaaaaaaaagcagcagcctccaggtggctccaaggtcacgcacatcacacacacacacacacacacacacacacacacacacacacacacacacacacacacacacacacacacacacacacacacacacacacacacacacacacacacacacacggccaagagctctgctagggaaaggcctggactgggatttgcagccaccagccttgcagctgccttcta

SEQ ID NO: 81963 - DNA, 1908 bp, Homo sapiens
cagaacaagggcttgatttagattaggacttagagaaaagggaaaagtaaatgcagagaaattataaatatagtattttattgaaaacagagttgggaagaaaatggccttgggatcactgtccagtttagtcaggttggttgaaaggaataccagtgaaactcaattgcctctcgggctcagctacacagatcttgaaaggaacagattcagctctgtgctgtactgtgtgacttttctcctcctgcagattctatagtaggaaattcttttaatggagattactgtttttctgttctcctagatttggtgtgattttttttttttataagtaaaagttaccccgtggtggacaaaatttttccccgatttgtggatatctttacttaaatctgatttacatattcagaacgtcacctttattgaaaataacaaaaagacataacatattgataggttttctgtgtcattgtggttgttcctctactactgtgggaatcggtttttgtttgaagagcacacctgcccgtagttgaacttctgttgagaagtctctgagggaatcatttgaatgatggcaagagaatcaagtgttttgctttcactgatggctttctcagtcactgaaactttaggggagaacggattctttcccaggaggaagagggtgaattgagatgtttccttgtttggggatgcctgtgttctcgggatgccctccaagccagcgctgtccagtggtcgttattgggagggcggctctacgctgtgtctatatgacacagtactggaaccacgagccacgtgtggctgttgagtacttgaattgtgattagtgtgacttaggaactaaattttaaatgttacctggtttgagtaaatgaagatagccacatgtagttagtcactacggtattggacagcacaactgtaagtacatttacttatcctctttgtctagagttttctttaagatacgtatcacctagatatttatgacaaagttcctttaaaacgatcatcttttaaagatgcaagactccaaattaaaaatgatgaaagactccttcaaaaatattcacggcttaggtcacactgttcaggattattcactaatttagaaaatatttgttatgctgtgatgtaggccctggcgatccagtggggatgtgacaggccccatctctgccctcatgggtggtgatggatactggacaggtaactgcagtcaggtgtgaccttggaggggacatactgtgcattgactgaggcaccagatggggactgagcctgttttgaagggtattggaagtccccgggggctgtgacgttagcactgacacctgagggtgaataggagatggcagatagtactgttccaggcagagggaacagcactcatagcagggtggaggtctggctcttgtgacagtttttgggttatgttcactgggctaccagaatttaggaggcctcatggttttgcttctgagatggtggagactaaaggtgtggttctgccctgcgggggttggtcggcccgggatccagtcttgactcctaccacttcattcttttattcagcaaatatttaagcacattttacgtgtggggcaccctgctgggctgtggtgatgacagtagtggcagaagctgcttctgtcctcatggaactctgagttgtgtggtgtggtgggtgagcagtcccgtggtgcccaccgtggcctatagcatttcacactcagctcgatgtctgactggaaggaagtggatgcctcaggctgggtggtcagggaggcttgttggaggaaggacaccagagctcattgagggtgagtagagcatcagcttgggcatctgaaggcgagataacatcaccaagggccttgaatgtcagacctaggagtc

SEQ ID NO: 81964 - DNA, 1343 bp, Homo sapiens
ttttctaagtctctatctgtaaacaatgcatttacttgaatcgacccaggaacctgccaagcttagtgagtttcagtagcggccttcccgcacatgaatgagatcactaagggggaggtttgtaaccacctgtggtgggggcagccaggagtgtattcttcctcctgggttagggcgtcccccttttccctctggttctggtgttatcctcagcgtgacgtgtgtgggctcgtgttcctgtttacctcagggagaatgagaaacggttatgttaccccatcagtgagttctggctaagtaggaataaaagttgtcatagagacttttaggactaggacatttcatgaccgtgcttcgtttttgaataactgagaggggtgagagcggtggccccattcaaaggtcgtcagggatgaaggtaggcaaggacaagtcatgtgcagggcgccttagagggccttcagaagatggaaagtcgctcctggctgaacattcagatttgattctgtaaacagaattgaacataacttacaaagagactgagtcctgcagttggaagttgatgcttagattagtcgcctgtgttttcacagcttctaagtagtgtgttgtaattgtgtggcaaagtatgtgattacctggggggtccataattgctgacttgtgtttttacttgatgtatttgaaaacagttaggaaaatgattttgccaaagtgtgtcttaccttagttaagatgaaatgtaccttattgtgagtttctgaagattgcaaaagcttgtcagtttagtttttggggtcccattagtgagggcacccctctttaccttactcaaaccagctcttcacatgtattccaagaaactagagggcatgctaagaggtatttctcaacaaatggtttgtgctcagatgctgttgcttgtagctgaggaatttgactgcagactttcccagagccttggtgtcctgattgggcactgtgagagaggggctacagttggaccactctcaatcctgtttgacgctagaactctttttagcctattatgggtccgcagacttcctctgcaaagggccagagagcacgcatttggctttctgagccatatggtctcttgttgcaactactcaaggctgccatttcagcaagaaagtagccataggcgagtgggcctggctgtgttccagtaaaactctagttgtaaagactggcatctgaggacttcgcccatgggctgcaatttggtgactgatataacgtgggacttcattctctgagcacccgttggggagcactggcctaccacggctgcacagacagctttaaggaaaacagcagca

SEQ ID NO: 81965 - DNA, 1697 bp, Homo sapiens
gtccggggcggcgggggcccggggcgcgctgtcacccccacctgaaagagagcgtccgggggtcgtggtcgcggataccgatcgagccgggagctcggagcaggccccgcagcccgttcccctcgccccgcgcgggagggtggaagttcgtcgcaggactgtcactgggcccgagttggtcagcacacgcccggtgcactcggcctccccgcacccgatcagccctcctcgcggggaccctagtggcactccaggagggaagaagtaaagtgcagcgtgtgggtttgtttggtaatgtcctacgcatccatccgcggccgtgtccacacgcgtggccgtccagaggaatgacagcggagggtacctttgatgcttagagaaagcaagatcgcggccaaaggtagggcagtgtgttttctggattggcgacacattgaccaggctgcattcagaggacactcacagcagccgccagcttgcgagttagaaccgaagtttcttggaatgagtgagttccttggaaagatgcttagtgcttattttcaaaactccttgttttgtgtgtgtgtgtgtgtgtgtgtgtgtgcgcgcgtgtgtgtttttagtcaactagtcattccatttttcaaaacccaaacttcgttagcaagatgtcatgaaagttgctgtggtgtgtttcatttccatgtataacttcaaaagaaagttaaacagcaggtttaagttcatttgggctgcaatctccatttgagtttgtgttgctttcacagtgtagatgtacaaagaattaaggaatgtaggaattccaatttttcaaaaaaatggagcaggatactgaataaatcatctttttgtttgtttcctttcattaaacggcttccctggaaactttcttaagttatcatagctgcttaagagaagtatttagttttctattaattcagtaattctgggtcccactgcgctggttcatggtaacatgaactagttgtatttcctcttttagagctctctcctttgccgcaaaaacttgtgtgccgctgcgaacaattccatctccagcgcagcttgcatttctccagtagtcttgcagtggtagcatctgaaaatcagtttctaatgaatgagtccaaattgaattacatcgctgccttcagatttgcactagacacagctgttcaacttgtggaaatagttctgtgaccgaccactagcatattaaaaaaaactgctattgctgttgaaacaaaacctgaattttgtggcttaagtttgaatacaattcctggaatcaagttatgataagcgacgtttaatattaatgtagaagtgaaaagcgatttttaaagatcaatcataaggagattcttatctagttaaaatttgttaaacagtggggaggagtaaatgatgctcatggtatataaaaatcactaatgcttttctttttagctgataaaagttgagtttgacgttaatcttataaaatgaacttattgaagtgagaaatttggaaacagtagtttaaatgccgttgtactgcaaaacagatctccgttgcttcattaatcttgctgtgtttgagtagtcttcagttctgtgagacgtaggtcatacgtggcgagttcagctttgaagcttgtcttctgaaactggtaacctggatggctttgtagctttgctgttgttgaatgaat

SEQ ID NO: 81966 - DNA, 1439 bp, Homo sapiens
acctgtctctagtaaaagtacaaaaataatctgggcatggtggcgtgcacctgtagtccgagctacacagaaggctgaagcaggagaattgcttgaacccaggaggcggagtttgtggtgaggcgagatcacgccactgcactttaacctgggcaacaaagcgagactccttctcaaaaaaaagaaaaaaaaaagcagaaactggttcagccttgtttagaagggcaatttggaaatttctaaggaaattctaaatgtgcaatatttaaaatgactcagcacttccatacgcacaaagataggggtaggggaatattccctgtgacactgtttgtggtaagaaaagacagactcgggcccagttccatcagggggaatctggctaaattacagaatttccgagtgctggaacactgcacagccatgagaaaataatggcactggttcagatgttagcattgtcctgagtgatttcggcaaaaagaactaacccagaatcaggggagatggcgtcttgtcaaacttttttatacaggtagagagtatagaactcataaaagctatttgtaaaatgataagtttattggattagaaatctaagaaccaaggccaggcgcggtggctcacacctgtaatcccagcactttgggaggctgaggtgggcggatcacctgaggtcgggagtttgagacaagcctgaccaacatggagaaaccccgtctctactaaaaatacaaaattagctgggtgtggtggcacatgtctgtgaacccagctactggggaggctgaggcaggagaatcacttgaacccgggaggcggaggttgtagtgagccaagatctcaccagcaacaagagcaaaactccgtctcaaaaaaaaagaaatctaagaaccaaatatatcagagaatgttaaatttcttgggtatgatgatgatattgtagttacatagggaaatatccttattcttaggagatacatgctgaaatatttagagctgaagtgccatgtcagcaacttactttcaaaaagttcattcagcaaaaagccgggtgcagtggctcacacctgtaatcccagcactttaaggcaagctgatcactttgagatcaggagtttgagaccagcctggccaacatgatgaaaccctgtctctactaaaaatacaaaaattagccaggcatggtggcacacacctatagtcccagctattcaggaggctgaggcaggaggatcacttgaactcaggaagcagagggtgcagtgagccaagatcgcaccactgcactctagcctgggcaacagagcaagactcaatcttaaaaaaaaaaaaaaaaaaagatgttaggccaagcacagttcaagcctgtaatcccagcactttggaaggccaaggtgggaggatggcttgaagttacgagtttaagaccagccttg

SEQ ID NO: 81967 - DNA, 1044 bp, Homo sapiens
ttttcttttaatttttttttcttttttgagacggagtttcactcttgttgcccaggctgaagtgcaatggcacgatctcagctcactgcaacctccgcctctcaagtttaagcgattctcctgcctcagcctcccaagtagctgggatttacaggcgtgtgccgccacgcctggcttgtttttctttttctttttttttttgagacagggtctcactctcttgcccaggctggagtgcaacggcgcactcacagctcactgcagcctcaacctcccgggctcaagtgatcctcccatcttagcctcctgggtagctgggaccacaggtgccaccacacccagctgatttttaaattttttatagagatgggatctcgctatgttgtccaggctggtctcaaactcctgggctcaagtgatcctcctgccgcggcctccgagagtgccggggtcacagctgtgatccccgtgcctcgctgttgttctctttctgttgagttggcagtcaggtccttgattcttggtggctgagggtatctcagtccaaggcaagaatcccacagaaagagactgggacaaatgaggccagaaatgggcctcgcccatcactcttttccaaaatgggctttgtcagtcactcttcctatacttgggtcaccaaacctgatcaccactatgtgcaaagtgcagttttagttttcaaagaagtgacactatacttaagaatacttaagaacgttaactgcgttaacctccacgcacacagccatagacaaattcccccgtcagacaggagcccattaggaaatgcccacccctctctgtagcctttgtaaaattaagctgataaaagacatcgctgttgttgaggtttaaaatcaatggataaccaggaaagaatataagaaatcatattaattattctcctgtttacactacacttaaatcatttagctgtcttttttttttttttggaccttctgctgcaaaagagccattctaatgaacttggaccccagggtccatgtgtgtggttattcatta

SEQ ID NO: 81968 - DNA, 1010 bp, Homo sapiens
ttggaaaatcaaatgaggtaatggaaatgaaaagtactacacaagtgtgattattaaagacagttcagtcaataggtgaaaagactcgtgtagatactttatttaacctggaatcaatgtcttatactcagtagacactccttagatgtgagtttaaagatgtcattactcctataataccagcactgtgggaggccaaggcgggtggatcacctgaggtcaggagttcgagaccagtctggccaacatggtgaaatctcgtctctactaaaaatacaaaaattaaccaggtgtggtggcggctgcctgtaatcctagctactcgggaggccgaagtgggaggatcgcatgaacccaggaggtggagattgcagtgagccgagattgcgccactgcactctagcttgggtgacagagcgagactctatctcaaaaaaaaaaaaaaaattaagaagatgtcattttaatgagcagttctttgttaagtaaagaagaagaggaaaccaggaaatatgatagtgcttggccacctcaccaagtgtttgtcttaaaagaagctttcttgattaagtaaaaatttaaaaggaaggaaagaaaaacccaacctcaccgcaacaaactaccctagtctgaggtaattgtgtagtgtaatgtccctacacctgaatttttcatgcacctgcagatttaggggctctgcctatctttgagtataaatgtccactgaattattagcaaaatgatttgttctcagaaaccaaaattttagcctagatgaatgccgccattggagttatttatatgaaaaggcgtgttaagctcaatggtcttctcttctcttctcttgttttcttttcttttggatttgagacagggttttgctctgccacccagcctggagtgcagtggtgcaatcatgggtcaccgcagcccctacctcctgggctcaggtgatcctcccacttcagcctcccaagtagctgggactacaggtgtgcaccatcatgccc

SEQ ID NO: 81969 - DNA, 1030 bp, Homo sapiens
ataagccctggttccttttagtagaaagtggtttttagaaaccaggatctaagtattaggtgtgttcacgctactgggctattacggctacaaggacttctcaagcagcgtagttaggaattttttttttttttttttttttttgagacggagtttcactcttgttgccaagactggcatgcagtggcaggaacttggctcaccgcaacctctgcctcccggttcaagcagttctcctgcctcagcctccctagtagctgggattacaggcatgcgccaccacgtccggctaattttgtatttttagtagagacggggtttcaccatgttggtcaggctgggtctcaaactcctgacctcaggtgacccatccatcttggcttcccagagtgctgggattacaggcatgagccaccgcgcctggcatagctaggaaattaaacatatgcatgtacttccctacacgtacacatatgtttgtacatacacacacgggcacacatgcgtttgtagttctttgtatccatctgtcccgctcgtatctatgtatccattcatctcatataaaaatcatgataccatccaagtcaaatggtttgtttcagctttctcccctttccttggctgtgcccctcttttctaacaataacagtaacagctcttatcatattaactgtttttatttattgacccttgtatgtcaccagtcttctgacatgcaggccatccagtccatgttcctggcccaggaacatggcagccaagggtccccacccccacttcggcccccaacagtggactctcgggatagttctttttttttttttgagacacagtctcactctgtcacccaggctggagtatagtggtgtgatctcggctcactgcagccactaactcctgggttcaagcagtcctcccaccctagcttcctgagtagcagggactacaggtgtacaccatcatgcccgtctacttttgtattttttgtagaaacagggtcggtcttaccttgttgcccaggctggtg

SEQ ID NO: 81970 - DNA, 1055 bp, Homo sapiens
agcccctcttccaagacatgtttactatcgtttacgtgtgacatgtcaaaacatcttaaaactatgccacgcatgtaataggctctcagtgattaaaaaatcagtttgtctcttaaggagaaaagaataacagcatgtgactcttgtgagtccctgacaaagaatctgttgttccccgtgcacttgaagagccgctcatgtcaagaagcaacttgtgattatgcaatgtgtgacttaaggcattgtcagatgcgttcggctgaaacgggaccccgccccagcagtttgccttactaagttaacatggtaggtcagattttagtattgtagaaaaagccacattcaatattctttgagtagcatatttatttcctagggctactgtaccaaagtacctcaaaccaggtggcttcaaacaacagagttacacgctagttgatatctagtgattcaaagaacagaattccacactagttgttatctaggaatgcggagtgagtgatagagggggttttggtggcgttatattctaattttgaagtaagtttaaatttacagagatgctcccaaacagtataaagaattcccaaatactcttcacccagattccctgaattaacattccgacatgtttgtctgtctgtctctccacatacacacatcccttttttccggaataatttgagaatagactgcagagagtgcctctagattctcctgtgtgggtttcctaaaaacaaggacgctgtcccggatagcctgcaccgacctgcccaaatcaggacgtgggcactgtcacaccatgccaccaaatgcagaggccccggagcccgcccaggaccacaggcgccgtctgtgtcaatggctctcgagtctccttcaatctggggctgttccttcgtctctgtctttcacgaccttgacatttttttaagagaacaggccagttactttgtagaatgtccctcggtttgggctggtctcatattccttcatgatgagaatcaggtggtaggttcctggcaggagagtccctgcagggttgtcacgacagg

SEQ ID NO: 81971 - DNA, 1035 bp, Homo sapiens
atctcatgtaaatgttactggacaatatgacccatctctttaaaaagtgaaattgttagtgggaagctgtggctcacacttataattccagcactttgggaggctgaggcgggaggatcacctgagcccaggcatttgagaccagcctgggcaacagcgagacctcatttctacaaataataaaaacattagctgggtgtggtgacatgcatctttggtccaagctactctggaggctgaggtaggaggattgtttgaacctgagaggtggagcctgcagtgagccctgatcgtgcccctgcactccagcctgggcaacagagtgagacctccatctctaaataaataggtaaaggtaaaatcactgctcagtcactagagagaggagagagaaaagtaaatatactcaaggagtgggaaaagctttgaagtggcatatcaaaatgagaaaaataagtgttttttagagagaaaagatttgtggagaattatatattagaactatttaagacttcttaaaacttcacgattatatggttttgtaaggtttttggggattttcataatgagatgtagatggaacgtccccattgcccatcatagactattcaggcaagttcatacccattcctagaatggagaaccgtctcctctgcggtgaagaagcgcccctgttccttaagaggcagcagcaggaggtggaaaacaacatcccgcttgctaaagtcatgggccttagtccaggcgcggaggctcacgcctgtaatcccagcactttgggaggccaaggcgggcagatcacctgaggtcaggagttcgagaccagcctggccaacatggtgagacccagtctctactaaaaatacaaaactgagccgggtgtggcagtgggcgcctgtaatcccaggactttgggaggccgaggcgggcagatcacctgaggtcaggagttcgagatcagcctggccaacatggcgaaaccccgcctctactaaaaatacaaaaattagccaggtgtggtggctcatgcctgta

SEQ ID NO: 81972 - DNA, 1008 bp, Homo sapiens
ccctggtcccctgtggccaggcttgatttgctctctctttggaagccaccttggcacgcaggcactggtggaaaattttggagtacctgctggaggttgaagatgtgagcacgaagaaaccatggtcttgtctcgggagcctcccagactttcccctttacggctggtgagaacgtgaaatggttcacttgctgcagaagacagtctggcaggtccccaaaaggttaagcacggagctaccgtagggcccagccatgccactcctgggtttgtgcctaagaggtgaaaaacacacatccacacaaaaacttataggaatgttcatagcaacattatccacaattgccaaaaagtggaaacagcccaaatgcctgtctgctgatgaacacataaacaaaacaagtaacacatcaacaaaacgtagcacctctgtaggatagcatacgattcagccttaaaaaggaatggagttctgatacatgtgacaacgtggacgaatactgaaaacatgcccagtgaaaaaagccagaccacaaaggccacgtttcgatcgcttgagcccaggagttcgagaccagcctgggcaacatgtcaaaatcctgtcaactcaaaaattagccaggcatggtggcatgcacctgtggtcccagcccctcgggaggctgaggcgggaggatcacctgagcccaggaggtggaggttgcagtgagctgagattgcctgggtgacagagcaatctctgtctcaaaacaaaacaaaacaaaaacccaaatgccacgttttatatgattccatttctaggaactctagaactacaggcaaatccatacacacaaagtagattagtgatggccagggctggggaaactgaagggaaatgggaggtgaccgccgatgggtatggatggggtttcctttcggggtgatgaaaatgttctcgaatgggctatggtgatggttgcacaactctgtgtgcgaaacctccctgaattataaactataaacgag

SEQ ID NO: 81973 - DNA, 1543 bp, Homo sapiens
accccaaacatctacacagaacaagcctccaggtagaggaaaggcagtaaccgctttgctggaatgactgagtggttcattaaatagaggctccggagggtcttgataggctctagcaaaggtggtggccgagagggctgaccagcgcatggtgcctgggaatgtgaatgggcccaggggcgccagagtgtggacagcttgggactgtgggctccgaggtgctgcgctgagggcgtggggcgcagggcagaaacacagaggactgagtgcttaggggaggcccaggaaatgtggggttgaacggcctagttctggcaattgtttttaagctttgtaagatggagatttcaagaagtatatttatcttaataatattgtagctcctggtaattcttatttgattaccatttatacacatggaaaaccagcatgcctgtttctggcaaagctccagggtagtctttgtgcataatttccaggatttttatgtaatgctattaaaatctgttcttttttttttcccccttccaaagcggggaaaaagcagcttttgaatcatttattttcgtgtttgagttgtttgggaaatattaactacattttctaacactctagcctggagaaaggaagaaaccccacatgcgtgtgatttatttccttgtgtatggatattaaatgcaatataccattaaggctatgacactttaagtgaaagtgtttattgcatgttgattcagttagttcgtaccctattgtgttactatttaaagtgtggattgcatcgcattctggaacttcataaatgagttctttttcccataaggaaaggccactgcttctgatgttcattaatgtgatttttgtgtgtgtgaatgagctgcctaaaaactgggtgtggtgagggtggtttctgaaagggaagcacttttatagcatgatcttatttgaaaatttaatttgtttttgtaaattagcttttggtcttaatacatttcctccactaacaagcacttttgggcaaataatttaatctctctggttctgcttttttcatattggtaaaatataaagtttgagatagatatgcttaaaatctccaccattgtctaagtatagctgagattctcacgtgattgggacatagtgctcattcttaatttgaaaagtgtttttttctttgtcctcttgtttcaactacgaactctcatttagacacatttagcatagggaagctccgatttatagagccactaaattgcagggcgtgtgtgagatttgtaacttcataaaagattctttacttcctttaaatataaatacgtaagattgagttctagaagtataatttacacatggtttcctgaggatcacgtttcctgaataaagcagggtatcgttagaggaaccccatttgattttttttttttttttttttttgagatagagtcttgctctgtcacccagggtagagtgcagtggcgtgatctcagctcactgcaaactccgcctcctgggttcaagtgagtcttgtgcctcagcctct

SEQ ID NO: 81974 - DNA, 1269 bp, Homo sapiens
aaaatgaaaaaatttgatgagaagggtggcactgccatacatttttgcaaatctctttaatgtctggattaataaacggttgaagttttttgttttttttttggtggatttttttccctcttgttgcccacattggagtgcagtggcacgatctcggcttactgcaacctctgcctcctgggttcaagcgattctcctgcctcagcctctcgagtagctgggattacaggcacgcaccaccacacccggctaattttttgtatttttagtagaaacagggtttcagcatgttagccactgcgcccgacccacggctgaggttttttgagtgataaaatgtacacaacagaaatctaccgtgttaaaacacttttaagtgtgttcgctgaattttcttaaccgctttggcattcaatttgttgcaatatgttgaaaaatgtgtagaaaatctggctttagttggaagagcattttcatagcctttttatgtgattctggatatttttctttgattctgtagaaacattcaacaagtgagtagtagtttctttttctttttctgagatggggtcctactctgtcacccaggctggagtgcagtggtgctaccatagctcactccagccttgacctcctgggctcaagtgatccttctgccttggcctaccaagtagctgggactacaggcatgcaccaccacaccccgctgattttttattttgagtggtagtttcttaaatgttagttgcaatatggaatctgaaattttattatctttttttgtacactattatattaaatgctgttgggtttttacccaggtgtgattttataacgtcatgcactagtcatttggaaaatattggtctcttgaatgatgcagctcttccacatgttgacgtcagtaaagtctaatagtctgaagatgttgagttcatcacagtggctgatgtaagttttccaaaactctacttgaaaactggaattttttatcattggcggcaaatactgtcagttattttccttgaagcgacagactcattcatattcccaggaatggtctgcccgtactcaagcctgaacgaccgtggtttgtctgtaggtcacgtgtaaataatgtgctaccaaaaaggtggccagttcagcttgcaatccaaacagctgcacagctgcttttctccaggaccgctgtgctttgatgggcagcagcgtcgtcgtaggcgtgcttctcatttcatcactcagactattcagaagacacctactcaa

SEQ ID NO: 81975 - DNA, 1050 bp, Homo sapiens
ctgaccagttgaaaggtatgtgcactgctttacctcggcatcccccctccctgatcctgattgtattaaattaaaaaaaaaagcttccagcctcagtgtctgcagacagctcaggtatctcagaatgccttaccatggggggatctcagggtcagtgtgacttttctttcagcgggtcaaatatcacagatctgttcacactgcagaaagggacgctgtgcagagatgacctagacgcgacctttagaaggaaggagaactttgaacgtgcataaccactggttggctgaaatgtgggggcacgtccggtgaatgtaagggtatggagcccttcagcattcagcactgtttagcacttaaggaaattgcctttgcattcatttggtcaccctgaagtcccatccaaatgtttctctctgccctttttgcgaaaacgtggagaataaaatctttctcctctctaggcctcactttgcttatcctcaaaatagggataggaagtcggcgcagtcctgcaggtctctggagaattagacggagttacttacctctgagtacacactgtcttttatctaggtctttttttttttttaaaaaaagtttgcattttcagctttcagccatcatttgtttaaggatattttattatcatagtatttgccttaagtgaagagcttcatattgagcttctccagccaccaggtgatttggaagggagaaacgtacctgccggagagctggtattcccctccctcatcctctcaggtttggatctggtgcctggtccctggtttgaagctccttactgctattcttgatgtttttactgggctgcttgttttttctaatataggacaaaagtctttgagatctggaaaatgatattaaaataagtaggacgaaaaagaaagattttaagtaatctgctacatttcttcccccacttcctcctttttaaacagtccttatgttttactaaaatcttcaggattgaggggaacatctgttgtggaagtatgtagagaaaataacactgattttttttaaaag

SEQ ID NO: 81976 - DNA, 1059 bp, Homo sapiens
aaaatacaaaaattagggcatggtagcgggcgcctgtaatcccagctacttgggaggctgaggcaggagaattgcttgagcccgggaggcacaggttgcagtgtgccaagattgtgccactgcactcctgcctggacaacagagtgagactctgtctcaaaacaaacaaacaaacaaacaaacaaaagtctctctgaagccctctttacccacacctttattcctaataccccacagtctgggcaggggcccagggtgctacctctctccctgctcaactcctccccacggctccacccacgagctcagttctgctgattgcatcactggtgctgctgttggaacacagcattcagggatgagccaacaaccagtttggtgggtgagtttcaccagcaccctgcaagtggcctgctgtggagcagaaacctctgctggaaagcgccgagccatttcttccatgccttcctcttgctttactgccgtgtcccctttttactggcctcttctttcctggagggtcccatgaagtctttcagttgttgttcataatctaagcccctcaagcatggaaaaggaacctgatatgtattgatcacatgctatgtgcctgacatgctgtgccagatgcttcatatctagatttcatttaatttcatagcaatttattaggtaaaaaagtcagagagctcacagctgagaaaactaaggctggttagggaacatgtggaatattacacagctgttaagaggagagctggcatttgaactctggtctaatcccaaagtccattctaacacccttcacactcagaataaaccctgtgcctgggcaacagtgagacccccatctctacaaaaaattaaaaacagattagcagggcgtggccgggtgcagtggttgaggctgcagtgagccgtgatcaggccactgcgctccagcctgggcgacatagcaagaccccgtcttgaaaaaaaaaaaagaaagaataaaccctgctgctgcagtatttgggtttatcttatacctttgcaagtcagagccttttccttgtgccg

SEQ ID NO: 81977 - DNA, 1075 bp, Homo sapiens
gctcctacatgggaggttgctttctggagaagattgagcgggccatcactcaggagcttccgggcctcctgggtagcctcgggctcgggaagaatccaggtgctctcaactgtgacaaaacagggtgtagcgaaacaccaaaaaatcgctacaggaagcactaggtggtggagcggtccttgggttcctgttggtgaatcagcttgtgtcctaactgtctgagaggtcctggtttattaaccctttgagccacactggcaggaattattacacagtggagagttgggagttcattgaggccaggggtcggggcaggtgtgtgggtctagggaggagagtggaaactgtgaattcctgtgtgcttgtcttgttgcttcaatgaggaggcctgattgaggcaagtcagcctccacctgcttttcctgggtcctgtcttggaaggacagagagcagctaaattctagtgtatcttaaatcagtgagggtcaaataagctaaaagcagctgaaattcctttgttccctgtgagctgggaaaacagcgaaggcctgagtcgtagagattgtcaggtccattttggcttctttccacacccacagtctcgcgtttgttccccagccctcggctgcctcttaactttgggttgactttcaacagtgaatagtctcttgggtctgaatatacctgggtttgtttttgtgtttttgagacggagtctcgctctgtcggccaggttggagtgcagtggtgcaatctcagctcactgcaacctccccctcctgggttcaagcgattctcctgcctcagcctcctgagtagctgagattataggcctaccaccatgcccagccaatttttgtatttttagtagaaacgggacttcaccatgttgcccaggctggcctcgaactcctgacctcaagtgatccacccgcctcggcctcccaaagtgctgggattacaggcatgagctgccgcacccggcctccacctgggttttgagccaatcccccggacttgctcctggtttcctcaaggggtggggcagtggtttaggacactcgacaactaagaa

SEQ ID NO: 81978 - DNA, 1056 bp, Homo sapiens
gtggtaggcctataatctcagctactcaggaggctgaggcaggagaatcgcttgaacccaggagggggaggttgcagtgagctgagattgcaccactgcactccaacctggccgacagagcgagactccgtctcaaaaacacaaaaacaaacccaggtatattcagacccaagagactattcactgttgaaagtcaacccaaagttaagaggcagccgagggctggggaacaaacgcgagactgtgggtgtggaaagaagccaaaatggacctgacaatctctacgactcaggccttcgctgttttcccagctcacagggaacaaaggaatttcagctgcttttagcttatttgaccctcactgatttaagatacactagaatttagctgctctctgtccttccaagacaggacccaggaaaagcaggtggaggctgacttgcctcaatcaggcctcctcattgaagcaacaagacaagcacacaggaattcacagtttccactctcctccctagacccacacacctgccccgacccctggcctcaatgaactcccaactctccactgtgtaataattcctgccagtgtggctcaaagggttaataaaccaggacctctcagacagttaggacacaagctgattcaccaacaggaacccaaggaccgctccaccacctagtgcttcctgtagcgattttttggtgtttcgctacaccctgttttgtcacagttgagagcacctggattcttcccgagcccgaggctacccaggaggcccggaagctcctgagtgatggcccgctcaatcttctccagaaagcaacctcccatgtaggagcactgctgggagagcagtttgaaactggaaatgggattgatgccgaagaagtccttataggcctcgcggttgggaaggtcaaatttgctgacattggtctttgccaggatggtcttgaagatgtagaatttatcgggatcttccacaatgtccttaaagaccagttctccatcactgaagaaggtcattttgtccttgtaagtctgcaggtagcggt

SEQ ID NO: 81979 - DNA, 1042 bp, Homo sapiens
tgatgatgatggtgatgatgatggtgatgaccgtgccgatgatgaggatcgtgatgatgatgatgatggtgatgatggtgatggtgatgaccgtgccgatgatgagggtcgtgatgatgatgatgatggtgatgatgatggtgatgaccgtgccgatgatgaggatcgtgatgatgatgatgatggtgatgatggtgatggtgatgaccgtgccgatgatgaggatcgtgatgatgatgatgatggtgatgatgatggtggtgactatgctgatgatgaggatcgtgatgatgatgatgatggcagcaatggtggtgatgatgatgatggtgatgacgacgatgacgacgatggtgatgatggtgagagtgatgatgacaatgatgatgagaatgatagtggtgataatgatactgagttgaatgaactctaggtctgatgtcctataacatttctgacagtctcaaaagccgttttccctggtaaaggtgagagggccacacagtcccaagggggatgaaagttccaaatgttggaggttcaccgtgaccatgaccttcacactgctgtgtgtttccactcctgcgccctgggcaggaagcaaggtgtgtgcatatgtgtatgcacatttatattcaagctcttccctggttttcacaacttagggctgagcttcccctgaacttctgctaaacaatttggagtaaaaaggactgaggataatggcttcttacactgtgacctttctcccaggctaaaaataactgctccaacagaaagtctctcaatgaaacaagctgtcccattgggccccagagctcactccccaggaagcagctgtgccactggacccagttctcctcttggaggcgcagacagaggtgtgggagcctccgattacactcacttccatcgcatgacatctcacttcaatcctgggaaatcaaggctggtgtctttcccacctcccttgcttcttgccgaagcaccctattggccctggagcagggaggccgcagaggacccaggacaccctggagag

SEQ ID NO: 81980 - DNA, 1048 bp, Homo sapiens
atcttaactaattacatttgcaaagaccctgtttccatagaaggtcacattcttcctgggtgtggtggctcacacctgtaatcccagcactttgggaggccaagggggtgcggatcacgaggtcgggagttcaagaccagcctggccaacatggtgaaaccccgtctctactaaagatacaaaaaaaaaaaaattagccagtcatagtggtgcccgcctgtaatcccagctacttggggggctgaggcaggagaatcgcttgaacccgggaggtggaggttgcagtgagccgagatcgcaccaccatactccagcctgggcgacagggcaagactctgtctcaaaaaaaaaaaaaaaaatcacattctgaggttctaggtggatatgaattttagagatacactaattttggggggctttctcctaggggatggtcttccactgggtggagggggtacctgtttccttggtccactttgttccacagctcatgggttgccccccctggctgatctggagctctgcagacacacccgggcaagtgtgttgaatgaacagatggaggactggctcaggcagagaatctcaggaggtagcccggcctagtagtggtggtaggtaggagggtggctgcccgggtggggagaattgaccagaattgcccagttcctagggggtgtgtctctgacgcagggtgaggtagagaggggaaagggatggaggtctgggtcctggctgcctgtgtgatgaaaagagtaagggagcaagaagctggaagcccaggaccagcttactctgtgacctgaggcccagctcttcttctgcacgaggccccagcacgcagtcccctcaaagtcttggccttgggcacagcagccaagcaggagatggtgcaggatgtggaagcacctcctcatctgcagaagctcctcagaggaagaacttctgagtgaactttattttagattcaggggggacgtgtgcaggttttttacatggatgtagtgcatgatgctgaggtttgggcttttgttgatcttatcagcca

SEQ ID NO: 81981 - DNA, 1039 bp, Homo sapiens
ttatttttcttgcacttacccaaggagatcaagagaccgggagtgctctctaggacttgggaagaatctggaaaagaactggagaagtgtcaagtactcaccctgtcctggggagaccatcctggcctcgggctcccaagacaccagcccacctcctttcctgcctttgtttcctttccgaattggtagttaagctggtgagcactccaccaagtccctccttgcttggcgctgtctacacagaggcagagcggctggcctggggtggggcccagcgggagcaccggaacccgggggcagagcaaatgctggttttgtcacaaatcagccgccaagtccctgactatctctgcgtttgtttcttcacccataaaatggggataatgatacttgctctatttccagcatggggctgtttcgtgactataataagaaaatggctatcggatgcttaaaatattttttgataatagatactttctaagcttaaaaggactatgacaagaatgacaggttatcactcttgtgagtatgcggcaacttgatatttgcctccagtttcctgaaatatcatgaaacttgaccaaccaggggaatccatcaacacgcctcccctgctcaggactgttaatatccttgggattctctgtcctcaaagagcttacagactaggaggggagacagcccctgctcatgacatgaatagagaaccatataaggtagacgtaatcagcagctaaaaataagcagcctgagagtgcagagaaagggggagcggttgtcggggcatgcttcctggaaggggggctcgagctgggtttcagagcatgtgggccccaggatggtgacgacagggtctgcggccatggggatggtgaaaacgattggctcagtgttaaatggtgtcaggaagctctcacagcgccaggcttaggtgttggttcctatttgatcttcctgggaccacggtaacaacttgccacaaagtcagtagcttaaagccacagcaattgttttttttgagacagggtctcactct

SEQ ID NO: 81982 - DNA, 1003 bp, Homo sapiens
ctgcacgcagctgactttggttttcattcttctttgtggactggggatgggagtccagcctcaggtccccttcatgatgtgttcctggctgtgaggcctgtgccctctcgtgtcccattggtgggactcactttggcatgaggactcactttggctcaaggtggtgggctggcttctgttctctcccgagtttgctctgggagtcctgtcttctcagggacctcgcccctggcctcacctgtcttcttagagctaaaagttgatcttcagagtctgcctccgccctatttggctccttcattccctcttgggtctcccttccctactcaggctgggcccctgctccgacccctgtccctgctaccaagacactggtcatggggggagctgcagctcattgcagtggaggctggtgactcgcagcacagatgggcactttgctcaagtctgtctgtgtttcagaggattcagaagatttcagctcaaggaagatatctctaagatggaatttcccatttggcaggcaaggtctcacccaaagttcctaaatctcaacacggaggtggtaaatagttcaccggttctgagcgcagagggactgagctacatagcaggggtttctcttctgggtcctgaatgggtgaaataatgaatgaatgaattggagccatggcgagcacggctgctaagcatgatctgcccagtgctcgagaggtcccagtcccctgtgctcatccctagctgggtatcctcagtaggacgtgacaggggtgggtgcagtttagcaaatgggacggatttaactgagtttctagagactgattcatttcctcgatggcggcagcctgtgctgtcatccttctctaatatcagagaagtcctgttccatctattttcagcctccctcatccctctgcagccctgaaggtggttttactcggagtcaaggtcccagctgcccccctaccttggggacatgcctgttgcctgtgacttcctcatt

SEQ ID NO: 81983 - DNA, 1978 bp, Homo sapiens
actcagcttcccagctccaccgcctgagcccaagggatgctccattttatgcctgtcacccacgccctgtgacccatgtcatgtgatcccagggctgcaggggttcgggggaagagaatccagccacggccctgccttctggggcctggcagctgggacagcagtggcgcagcctgagcctctgcacagccttctggggtccgggcttcttccccatcacaccctcctagttgccctggtgactgtgtgacccctctcccccctccaccgcctgctgccacggccggccgtataaatagaggcgaggagcagctgggctctcttggcagtcaccatgagggcgctggtcctgctcggctgcctcctggcctcgctcctgttctcaggacaagcaggtagggcccctcccagcatgacccagcccagactggtcccccacgcttcctccaaggttttctgtctaccatgggttgggtagggggtcggggctgatggcaaaccctggctcttggctggtgtcttcttacccttctcttttccccgggcctggggcctcagagaaagagctgggtgctggagaatagcagcacagttgcggggccctcaggaaggccagaggaagtgggaacggcaaacagagctgagctgtgagccagggtcagagaggagtctggccagtagatgtgggaaagagggccctcaaagtcgagacgggggagcctctgagacggacaaaatagcacagtctgggagctggaggtcgttgaggtgaccctcccacctggtgggatataaggcggaggccccactcgggtaagagaactgggtttgcgtggacagaaggggatacagtgggcaaaggtggggaccgttttgggagcagtgagatagaattggaattggtttgggataagatcggaaatagagttggcggttgggctggaaacagcattggatgcaattcagaagaggaacggggcccgttctggagtagagcctctgctcggggtgggggcttccatcagaaaaggggcttggctctgtgtgctgaggcttccctttgacatctcagcactttgggtagcagaggtggtggcttgggttgcagcatgggggttatctataggctatggaggagatgccagattgttttgccacctctcttgttcctaaggttcctgaggccaggttccccgagggaatgcttttagggaggtgctccggggatccccctaggatccggactgcccaccgagtcttttcatgactcggcagtcttcccccaagctgggctctgagcctaggtccgtacctgggactggagaggcccagagtccagcctctcaggtctttgaggttgaatagggggttgcaggggcacagtccctgcagggagagcaggcagtgggtgggaacaaaagctatttctcggggactcaagatgtaaggtggggggctccagccactgcatgtgctgctgggccctgcccttgtctgtccttgagttaatttgggctctgcagggctgcagcggcttgagtgctgagtattccaggcggctgtcaggcggctaagtatggaaacagccgcgtaattggatccggagccccaagccgctgccaccctctcccttcgtggccgctcctgtgctgccccccagccccagctgctgggctgctacacactgggccccaggaatttttggccttttagggacatcctttatctttcctcccaccgagggaactggtcatctggaatgttctgcaggcctcgctgggggctcttgtcgtggggaaaggacgcaggcaggtgcttgtgcaaaggtcccttctctctgctgtctttccttcctgggtcccacagcgtgcgtctgcccctggcccaacctccggcgtaaagcttccctctgtccctgctcctgctcagcacttgggctgtgggtttcatccactgtggtggattttatcaggactct

SEQ ID NO: 81984 - DNA, 1060 bp, Homo sapiens
ggttcaagcgattctcctgcctcagcctcccgagtaactgggattacaggcatgcaccaccgtgctcagctaatttttgtattgttagtacagacaggattttgccatgttggccaggctggtctccaacccctggcctcaactgatccacctgccttggcctcccgaagtgctggtattataggcataagccaccgcgcctggctggtcccctgccctattttaagagtctctattagggataaacttcatggaaaatgtatgtctgttctaagaatgttctcaagtgtcattaccttgtgctgtatctgtttcctctttacgaggattctcagaagaaattcttgccgagtctcaatagttgaaataatttcactccttccaagcatttggtttgctcttattttaaggacactgaattgggcaggtggtcaagttacacacatgtgagggactgaaatatatggtgtcattttttcccgttagtcttacgaatggttccatactgtgtgccttcctgtttttcttccactagtacttccagttcgtgctttcttgctatattttatagagaaaggccatttctatgtctttctggtactgggtgggttataataaaaacgtgcctttggtgccatgatttgggggtgtctttggccgtgcagcagagcgatgccccagctctgctagatgtttgaagggctattgagtggaagaggggtcccttcctgtgaccttggcccccttatcagttgactaactggccccagaccagtatgtaaagcacatgcaaatcctcaaacagcctcttggagccagctggccatgctgtcctcagcttcagatttttttgtgtttctggctccacggtgttcccccgcatcctagtccatcctcctgtcctttcttgaaccagctgtctgtctgtgctttcctcgatgctgtgtggccttgtagcatttgtcattttcactctgttgagttggccggcttggcctcccttgtcctgcaggtcctgggcagggatggcgttatatcatcctctgcctttgtctccttt

SEQ ID NO: 81985 - DNA, 1040 bp, Homo sapiens
aagccactcaacccgaggtcccggggctggggtgtcgcagagcgtgtgggagcatcggcaccccagggcggggcctcggccccgggggctggaggaagctgacacggagatgcctggcctctctctgccaaaaagcattttttcctttaaatatgttttttaagaacagggaaaattaaacaaaaccccaggttatttcttccctgcccagagccagcctgggattgtcagccttcaatcccctttccttcctctttttgggttttcttctttctcctttaagcacttacatggttgggggtaagactaggctggggcattctgggggcccggaggtctccgttgcttcttggttggggtttgctgctgctgtgcccccctcccccttccccatctcggcactagaattcgccactctcccaccccccagcccccacctctgcctccaggtctcatcttccaccccaaaaatgtctgtctctctctttttgttttgtttgttgttggttttttatttctttttggtttgctttctgtttttgttttgtttttcttttttttctttcttttttttttttttttacaattttgaggtcttcgtgttcaaggagaagctattatattttgttaagaaagtggggagaaaaaaaccaagaggccaccgtgcctttgtaaagaaacaaaataaagtttgtactttgttttttagattctgagtctcctgggtgtgggctggcctgaagaccagggcagggctaccccatctagagtaggggggctccttgggccccccaaagcggactgggtgtgtgtgagcacagttactccctcagcttgtgtgtggtgttgcgatgaaaaattggggtcctcagtttccctgggatgaccctgggtattctgtaaagatggaagatggtgttgaggctggggagtggctctttggtgggcggcaaggagagaaggacaaccaagccaccgattccgaaaacctgggaaaggacacaggtgttcaggggccctgcttggtccctacgctttgg

SEQ ID NO: 81986 - DNA, 1066 bp, Homo sapiens
tacatcttctccctggagcaggagaagaccaggctcttgcagcagaacacacagctcaagcgcttcatccaggtgcgccctgtccttcatggctccctctccctggcatgggcatgccttggacccagccatgggcctgggactcaggtgtggctgcaggccccttcttgcccactgacaagtacttccaggcactttttttcctgccccggcctcagtttccccatcggtcaagtgcggtggagtgggctctggaaggagccaggtgactgttatgtaaagcagcccattctcctggcatttggctggtttgttggacttgcagaaggggctccctaatgaagattcacctgtgttgggcagctttggggggctgcgatggaaccccaatctccgtggtggtaccgaggtgtcaggcacactgaccgactccttggggtccccaggagctgagcggctcgtcccccaagcgacggcgggcagaggacaaggacgaaggcataggctccccggacatctgggaggacgagaaggcggaggacctgcggcgggagatgattgagctgcggcagcagctggacaaggagcgctcggtgcgcatgatgctggaggagcaggtgaggcagcgccctctgctgggcacggcgcgcggtgcagagggcgtggagcctggggtcgcgcctcttgctctgcggccctcggtggagccctatttacaggagcacctactgcggtgccaggcctaggagtggggagcaagccagacacgtctctgcccttgggggccaccgtctgcgttggggtgggggagattagccaaaggatctcaaaaatgtaaccatgctgtgggaggccgaggcgggtggatcacctgaggtcagcagatcgataccatcctggctaacacggtgaaaccccgtctctactaaaaatacaaaaaaaaaaaaaattagccgggcgtggtggtgggtgcctgtagtccccgctgtttgggaggctgaggcaggagaatggcgtgaacctgggaggcagagcttgcagtgagccgagatcgtgccactgcact

SEQ ID NO: 81987 - DNA, 1149 bp, Homo sapiens
ccagtcctggaacagggcaccccgggagggcccctcaggaagaggccggggctgcggcttcgggtggggccggcagcctctgctgagagcccagcatctggaagccatcaggccaggggcggggggagttgcaggggaggtccagggagggggacatgcctcctccaggccacacacaagcccaaccctcgggagcgtggccttgggcccacaaccgctgcctctgcaccctggcccgcagccccgccccctggcgcacacgccccgccctcgtccgaagccacgcccccagccagcagccacgccctcttcccccaggctgccttctcaccgcactggccactgctcctgcaagggtcagcagcgctccccacagcatggtgggagcctcgcttctccggcgcagggtgggtctatctcttggagtgggtgggctgtggggagccgtgtccccaggggttgttggcttggtgtctttttggggagtgagtggtacttgtcttctgtgaagtcttagcctagcggggctggggcttgtggtgggaggcgtggccgtgagggtaggaagggagtggggacgtcttcctcagtcctggggtggcaaagcctgagacgctgaagaggcgctccaggtgcctagcaaatcactcagaagtgttccaggagcggggacagcgtccctgaatgtcgtctgcatcccgcgtgcatcagaatcacaccacgcacgtttctgggccccaccgggcctgctagtcagacgctggggccagcacccgtcgtctgcatagtttctaagctcttggatgttttgatgctcagacacactgggaattctgttccggaggagagactgctccctgtgaggaaagccagggaggggatgggtttttgttgttgttgttgagacaaggtcttgctctgttgcccagactgaagtgcagtggcgtgatcatagctcactgcagcctccaactcctgggctcaagcgatcctcccacttcagcctcctgagtagctgggactacaggcatgcaccaccacacctggctaattttatttttttgtagagacagggtctcactacgttgcctaggctgatctcaaactcttaggctcaatgatccttggccttgacctcccaaagaactg

SEQ ID NO: 81988 - DNA, 1074 bp, Homo sapiens
gaactctgatcgctggggcccggacatctgcattttgaacgaccccctgggcgtggtgtgggggaggtgggcgttctacggcgtgcgcaagtttgggacctgtggcccctttcctgccgcgctgctccaggagcgaaatggctccccagggctggagccacgtgctctgccgcccgaggcagtctgggcggggattgagggaggaggagcccgccggtgtggcacaggctggtggacgctagcgcctgcagaatccggcctggagggaaggttgctgcacacgtgtagacactcctgcccaaccctctgccccgggggtccccaccttaaggctactctgaagttcccagtcaatacctagacttgggccagttgatgggtttggcagctggcagggatgccccgagggctggcccttgcacgaggcccacctggagggcccagtaataataagtaaaaaaaattcttgagctctttttatgttctggggactcactttgctagaattttctcactgagttgtcataatctttctatgagtcaaaagtgtcttttgattccgcttaaagaggcggacacagagactggagaagggaccactacagcaggtggtggaactggaacttgaacccttgtcctggggttgctgctgctgcagggctgggctgggcagcgcggaggtgcagttgagccgctgtgcctactggagaagacattctgggcctgatcctgggcagggttggggggccctctggctgccatgcctgggccttgggtgagtcctctcagggccccctgagattctggcttcaatttatccctgccccaagcgttcctttggagcataccagcagtcccccagggtagctggatcttggtaggccaaggacttgaaggtgtagggccttcgtccagggttggacatggcaacgtccattgcaagacagttgtcagctgtgcattaggcatggagttgggggtccctggatttgtttaccttcagtaggggttgcagggtgaggtgggaagccagtctgggatcaaatgtgttcattaggcaggaccttctggcca

SEQ ID NO: 81989 - DNA, 1109 bp, Homo sapiens
agtggcttctggggattggctggagcccagtcacagcttggagggtgaccggggaaagcccctggcctgggagtctcctgccctgggttcaagtcttggctccaccaccaacttccagtggtccttgggtcagactcctcccctctcccggccttgtctatgaaaccaaggggtcagaccaggtgagctcccagagtccatgagaagcctgggtggaggggggtcagggggaggaaagagggtgtaaatccagcaaaagccaactctcaattatccgagggtggagcccggatgaataactggatgccacagacatcccaaaacctcattgcaaacaatcgtgtgaaccgcgtccccccaaagcttttgtttctgagaaacccagctgcaactgggtagccacagcgatttcttcccccgcctgaactccccttgcagggaggacaagtagagggctgagagtgaacaggccggagggaaaacaaaggtctcccagggccccttcttggggcctggagggaggcctggaccccatttccaaggcccccactctcccctccaccctccttcccggcctggccttggccccgggcggtgggagtgtcctctcaccacctaatcctctcagggtctgggcagccatataggaggaagaatgtgttttcccggcaacaatttcccatgtgtatttctagccacccgctccactcgcctggaatctgaattccccacttggaccagggggtgagggccagtgccggccagggtttggggcaatctctggatgagggagggtggcgacagctgtgactgggggaccagatgtggagctcttgtggggcatcttgggggggctcctggggaggcacttttgtgggtcgcctggcctgacccccagccccagaggctgcctccgaaggttcctgcctctaaggggaggcccaggggtctctggcacctaaggaggaaattgattccatgggagaggccctgtgctgggtggaattggggcgggggtggctgcagagaaaagtgtcccctgaatcccttcctctcctcatggctataattgttactttatttcacagcaggtgactgagaccacaggg

SEQ ID NO: 81990 - DNA, 1005 bp, Homo sapiens
caagcacccccccaaagctgggcagacaggaaaataccagacatagttgtgcaaaggtgcagcagcgggcaggcagcgggggggtggaggccactgcagcaggggcccggagccaccaggatggggaggcctctgtgccaggccggccctgcagctggactgccatggccatctgtgtgagtgtgcgtgtgtgtgccggggctcccggagcccggtgtcaccctccctgctggcgttggagaaggaagtgcctctggtggggcatctcctaggaagcccgggctggtgcaggccagggaagccctccggcccgtcttccagcttcagctctgcctgaattatctgggtgaccttggcaggcccaagttgctgtgcagggaacccccagcctggggccggaaacaagaatcctttaggttaccagtagctggcagcttctttatggcaggcatgaggacaaggccctcccttgcaagatgccctgagtcccagggaccattgccgtggtgtctgttacctacaaggaaaccaaggctcagagacagcagggcctttctgagttcccacagccaggggtggcacagggggctgtaaccaggcagcctggccctggggcacactctgtgaacacgcagaaaaaagatccctggcacatcccatcttcaggtgctttcccgaggaccccacggcagagggcagaggtcagccctggctgggtcacctcggaccccttgtgttcccaccccgggagggggtctgccctcccaaaaggtccgggggtgctggctgagtgccccgtcttgggagggggaggggctgcctactgagccaaaggttcccagggacggtgaatcccccactcttccaggaagtgccgcctgccctggcccctctcctgggatctgctgggccaggcctcaggataagctcctccccctccagtcctgggaggaggcctgtctgcggccagctccttccagggttgatcaggccttcccggggcct

SEQ ID NO: 81991 - DNA, 1096 bp, Homo sapiens
cagggaggctgaggtgggaggatcgcttgagcctaggaggtcgaggctgcagtgagctatgattgtgccacttgcactccagcctgagtgacagagcgagactctgtcagcaaataaaattcagtttcatggcaaaatgaagaatgtgagctttgtcttccccaagagactcatgggaagcagatgcggaatctctgaggaggctgttggctctccccccatgatagctgccggccaggtcgctcggagggtctccctacccaggagacaacctcacactgccccctgctcctgctcctgttagactgtcatgagtacagcccgaggagaagcctggggtctcagtgccacagcacagctcctgtccttccccaggttcctgcgtgaagaccagctgggagcccactgcctgctgccacctccaactccggccccctcaccatgcactccctggacgagccgctcgacctgaagctgagtatcaccaagctccgggcggcaagagagaagcgggagaggacgctgggtgtggtccggccccgtgctctgcacagggagctgggcctggtggatgacagccccacacctggctctccaggctccccgccctcaggtactggccctgggcagggcagggggacttagccctgatccagtcatggtgacagggagaatggccaagtgtgtccaccagcatgtagctgcagcccctctcggcttccggttcatgggaagcccgcacgcttgtccttccatccgcccagcatcgtatgtctgcagggaggtgggagctgcagtgcccagctcacgtggctggcacacgatgcaaactgaggcctctaggcagatctggaacagagctggtcgggcaaccaggcattcagaaggagcggcagtagtcccaggacctgcaccctaggctgtggggtggtgccgctggccaacctgggcagtagaggctgggtctgagcccaggaggtgcctctcagggattcccggtgcttgggcccagggtggtgggcaccacttctgccctgcctccaagagcagagtcacccgaaaaccagattcaccgcttgtctgaaggggaaggcta

SEQ ID NO: 81992 - DNA, 1085 bp, Homo sapiens
cctcccctcgcaccccaggacttccagccactgcgctatttggatggtgtccccagctccttccagttcttcctgcccctcggctccgggggggccctgcacctgcctgcctcctccttccttacccctcccaaggacaagtgcctctcgccagacctgcccctgcccaagcagctggtgtgtcgctgggccaaggtgagtgggggccagcaagagtagtgtggagtctggggcaggtcaccccgcatgggctcagaacacttcccatcctccgcagtgtaaccagctctttgagctcctgcaagacctggtggaccatgtcaacgattaccatgtcaagcccgagaaggatgcggggtactgctgccactgggagggctgcgcccgccatggccgaggtttcaacgccaggtgaggtgggggagagaggggtagagggaggactggggtctccagtgagctgagccgtgccccccgccctccctggagcaggtacaagatgctcatccacatccgcacacacaccaacgagaagccacaccgctgtccgacctgcagcaagagcttctcccgcctggagaacctgaagatccacaaccggtcgcacacaggtaagaggccggggccgggcggcttggcccatgaagggggcgctcagctgagaccggctgggcaggtccccagggggaggggactgttaagtaaatcccgggcctcagagataagggttgatgtcatcgcccaggggtcccttttccaatgcagtttgctaggggaagcatcccctgggggtcagacccccacccagcacctgctcttggagcaccaatgccatttcctggttcccgtgggtatcttctgactaatgccacctctgtgatcgcagaggccaggtcggcttcactcctcactacagcccaggcccataccaggacagctctggttgtcagagccacagacataattttacatttcctaatcgctgcataaaacacagcaaaaataaatgggtgaaattaattgtaatatggttcgttgaccccggtacatccaacgtgttatcaattcattattaaagacaaatc

SEQ ID NO: 81993 - DNA, 1086 bp, Homo sapiens
atcctctgtagcagagggtgcagggcgaggctaggcagagctggagtcaaccaggctgagttttcagcctctgtgccctgcctgggggcagatctcatgccatgtgctggggatgccccctgcccccagaattggggcatctatgttcccagggagtgcttggcccggggaaatgttgagtgcatggggtgagacccaggaaggggagagacccctcatggcggcactgcactgcaccaccctgcaggtgagaagccctacgtctgcccctacgagggctgcaacaagcgctattccaactccagtgaccgctttaagcacacgcgcacccactatgtggacaagccctactactgcaagatgcccggctgccacaagcgctacacggaccccagctcactgcgcaagcacatcaaggcccatggccactttgtgtcccacgagcagcaagagctcctgcagctgcgcccaccccccaagccgccactgcccgcccccgacggcggcccctatgtcagtggggcccagatcatcatccccaacccagctgccctctttggaggccctggcctgcccggcttacccctacccctggcccccggcccccttgacctcagtgccctggcctgtggcaacggtgggggcagtgggggtggggggggcatgggccctgggctgccaggccccgtcctgcctctcaatctggccaagaacccgctgctgccctcgccctttggggctggcggactgggcttgcctgtggtctccctccttgctggcgcagctggtggcaaggccgagggggagaaggggcgtgggtcggtgcccaccagggccctgggcatggagggccacaagacgccccttgaaaggacggagagcagctgctcccggccaagccccgatggactccccctgctgccaggcaccgtgctggacctgtccacgggcgtcaactcagctgccagcagcccagaggcgttggcccctggctgggtggtcatcccgccgggctcggtgctgctcaaaccggctgtggtgaactgagcccatcctgcggacagttgtggtgcccccccggcagct

SEQ ID NO: 81994 - DNA, 1620 bp, Homo sapiens
cctccaggaggcacagcagattctcaacgtgtccaagctgagccctgaggaggtccagaaggtgaggccactgggccaccccaaagtttgagagggagaggctgccagggtgggaagagtgaagggaggcctggccagggaggtccgatgtggaggctgcagctgcacccagctcggactccaactttcgggagccactgttgctcgtgaagttttaggcctgaggcaggacagtctagagacaaagagtgccttccagtagcagctcagttgccctccagggtacccgtccccatctctgcctctcagtggccacaacagctgggtgtggcacacagggtggagaggagtcctgttgcctctctcacgtggccccacatagcctgcccaacatctcttgcctgcagtctgcagccctctcacccgtcccctctcctctgcagaactatgaacacttatttaaggtgaatgataaatccgtgggtggctccttctacctgcagtcaaaggtgagtggtctttgattctgggaggaatgaagtcatgggaccccttcttctcacctggggctcaattcctagttgggggagctggccagctaagggcttggcacacagaaaactgtgccaggctttcccatggtgccccagcctcagggaggccccctgaactgccacccctctgactgcttcagctttgcggggtccagccactcaggctgtgtcaccccagatagagccctccctcccagcagctgggacttcgaaggagcaggagcccccatgggtggggtgctagaaacagctctcagctcacagaggtcacagcatgcgctgggccctgcagcccagctctgtctccccaggccaccccgaccctggggtgccactgaaggaagcattggtatccacccactgcccttcaaaaaatggacctgggctgatgggaataggccatcccatgtgggcaaggggtatggggcggaggcttggcctcccggcctgattatccgtgacccactaggtggtccgcgcaaaggagcgcctggatgaggaactcaaaatccaggcccaggaggacagagaaaaagggcagatgccccatacgtgactgctcggctccccccgcccaccccgccgcctctaatttatagcttggtaataaatttcttttctgcatttctcgtttgcatgtgtccagattccagaaggcaggttgctcctcctgccggttgcagggctgtgggtgctggagatggggaggcagcagcctttaacagcccagaagggccgggctgggtaaggttggcgggcagccagccagtgggctccagctgagtcctgtcacgtacaggatgcagccgctcctgcttccacagcacccgtgccagggtgaggctccctcccatagcgcccctgcccctcccacggggtggcggtctcctggccccagagctcttgtcggcagccaccctgtccctggggcaggtttgaacctagcacctcagtaatctgggcacagtaccccagaatgtggctggggggagaagggcctttgcccaccactctccaaagccgcagcgggcagtagtgggctgaggacttggaccttgggatgctc

SEQ ID NO: 81995 - DNA, 1110 bp, Homo sapiens
agaatctgctgtgcctcctggaggctgaggccggagaggttggaagcggctgcagaccggtgtccagcgcgtcctcgggcatcagctgcggcccggctggctgtgtggacatgtgggtgatcgctcagtcctcagcagcccacacttcaccctgggccttccgagttggtggctcacccctgccaccagcacaggatgagagacacagggacaggtggctaggagctgcctcttctccaggagtggtttcctttttagggggtagaggctgggaaagtgaggacagacgtgcctcactggagggtaagggcaggatctgaccgctaatcctggctcctggtccccaacctagaccatgagatgaccctgtcccccaacccccatatcccaggggaacagcaaattggggagctttaggctacgatggagactgtatagtggggctgcgggcatgagagggctctgcaggggcccagctgcccacctgtcacctagaccaccaaagccactgccttgggtgacctctcccctttcagtgaccccagaacctagaatcaggagctgctaaacttttcctaaaggctcagagagtagctattttaggctttgcgggctaatgagcctacactggaaccattcaactctgccttgaaagcagcctgtcggccgggcacagtggctcacgcctgtaatcccagcactttgggaggccaaggagggcagatcacgaggtcaagagatcgagaccatcctggccaaaatgatgaaaacctgtaaaatacaaaattactaaaaatacaaaaatcagctgggtgtggtggcacatgcctgtagtcccagctactggagaggctgaggcaggagcattgcttgaacccgggaggcagaggttgcagtgagccaagatcgcaccattgcactccagcctgggcaacacagtgagactccgtctcaaaagaaaacaaaagggctgggtgcggtggctcacgcctgtaatcccagtacttcaggaggccgaggtgggcatatcacgtgaggttgggagttcaagaccagcctgaccaacacggagaaaccccgtctctactaaaaatacaaaattagccgggc

SEQ ID NO: 81996 - DNA, 1083 bp, Homo sapiens
gggcaggccctgggcaccctgtctcccctggtctcactgctgacctgggctggtcccagcctggattggcctcatccaggatctttggtcaccccacgctgccccatcttgcctgctgttccagttctggtcaagggccttgggggctggccccccaccaggccttctagagcagcaccagtctcagggccctgggaccagctgccctacttcccaggtttgtagccaggagaagggggcatcacagagctgatggtccaataaggggggtgtgagccccgcagggactggcccgcacctgccttggatgttttcagcaattaaacttttttaagctggccacctcttgtgctgctgtggtctctgggctggctggaaagggaaggggacaggaatgtgggtgacaggggtctggccctgggctcccctttatctcagcctcactctggtcccaaggcccaatcacctgcgcactgctgggagtcattcgctcaccatgcaggttcctggcagtgctctggatggcgggatgctataaaggacaggagagataaggtcttgcaaggaccttcagcttcttacagcctccttatgcaggggaaccagactgcacacgagcatatagagtgtgaagacagcagtaaagaagagaaactggctgggcacggtggctcatgcctataatactagcactttgggaggccaaggtgggaggatcgtttgaggccaggagttcaagaccagcctggcccacatggtaaaacgctgtctctactaaaaatacaaaaagtagccaggtgtagtggtaagcgcctgtaatccaagctacttgggaagctgagggaggagaattgcttgaacccaggagtcagaggttgcagtgagtcaagatcctgccattgcactccagcctgggtgacagagcaagactcagtctcaaaaaacaaacaaacaaacaaaaaaacctgtgggacaggaagcaactgggatgcagcgaggcagggaattcagggcctgagaaggtgactttcagctaagagccaagacttgaaggctgatgaggagccagccagggagagagcc

SEQ ID NO: 81997 - DNA, 1048 bp, Homo sapiens
catagcaagaccccatctctacaaaacaaacaaaaaattgcactagataaggttaaactatatgaacctacaatatgaacctaaaaataatattaaaaaccaaagtaataaacactcagtttatcacttctaattaatttatccaattttactattatttgtgctgaggtcacatgtttctgtgttggagtgcatggaggaaatgcaggatgatgtgctatttacatctcttcccaacaccacattcagggagtggaggtggcacgtagaagctgcccatggtgggagtttgtaaactgtggaaataggaaaacaccacaaatcagggctttccctccagagagcaggttgttcaacatgatcaacacgttactgtccagggacaggccctaggcatggtggtcctaagtgaggggtgccggcaccctggggagactacgtgcccagccatgagctctaggtcccagcggcagctccgactcccttgctcccccagggcctcgtcctcctgcctaagacggagtgcgacgtgcgggaagtggagctgatgcggtgcctgcggctgcgtcagtcctccctggagcctgtggccttccggctgccccgagtccgggtgagggtggggacctgggactcccatgcccaccgccttctcggtgcctagaggggagtttgggtcccgtctgacccagcttccaaacttccctacccattgttcatggggacacctacccccttctgctgagatgctgaaactcatggaagccccaggctggtgggagggtcccaggtcttgccctgtccctccccaacagatgcccgtgtgccctgggcacctggtcaatgtctcaggacagcccgtttctccctctgcagaaagagttcttccaggatgacgtgttcccagacacggctgtgatctgggagcctgtgctcagtgccgaggcctggctgcaaggcgctaatgggcagccctggcttctcagcctgcagcctcctgacatgagcccaggtgcaccgagggactgggtgtggggaggaagcggga

SEQ ID NO: 81998 - DNA, 1055 bp, Homo sapiens
tggggagccccatctccagccactgtggttctgtggctcaggtccttggggacctgtgggggagctgatgccagtcctgggccctccccaggggttcagtcagcaaacggggctcagttcagactcatttcagggcgagaggcagctgtactgttacgaggtggtcccgcagcagccggcgctgagcccaggtaagccttgcttcctcgcccccatcccctaccctcccctcccctgcccatcctgcctgttcccctatggtgtcctcaacagtgacccagtgtgtcctggagagcgtgctgcgtggggctgcccttgtgccccggcaggcgctggccgtcatgagctgcgaggtactccgcgtcctacagctgagcgacacagccatcgtgcccatcggctaccatgtgccccgcaaggtgagggggacttgggcgagggactgcgggggctggggagtcggggggcctgggcctcactagctgcctgcttgtctgcggccaggctgtggagttccacgaggacctgttcccggacactgccggctgtgtgcctgccaccgacccccatagctggtgggctggggacaaccagcaggtaggaccagggctggctcacctctcccagcctccccgagtccctggtagccccgtgtggctgtgtgccaactcagtctggcctgctgggtgccccccatccctacccagttgaccctcccatgggggccctcctgaccgggcagcccatgcccccatctccccactgccggcctccatgcaggtgcagaaggtcagcctcaaccccgcctgccggccccacccgagcttcacttcctgtctggtgccccctgcggagcccctccctgacacagcccagcctgcggtgatggagacacccgtgggtgatgcagacgcaagcgtaagtaccagggccgcccccatcctccctcagcgacactgcagtggctgccctgagtgttcaccggctgaacggcctttttttttttttgagacagtgtctcactctgtcacccaagctagagtgcagtggcgcaa

SEQ ID NO: 81999 - DNA, 1052 bp, Homo sapiens
cgcatcctccctccccaggcccaggggaggctagataatggtctggaggggatccagctgggctgctcatcaccagagcctcttcctgcctctgacactctgtttacagaagctccaggccaactcccctgggagaagagagtaaactcaggggactgctccccatcccccacccgcctgccccagctctgttgggtttttgtcaatagctgggcccatcctggactttgctgccccctggactggccctaatggaccctgcttggaaggtcccagcccggccacccctctatgccctcaacacccaaagtacagtctagtgtgaagggaccttggagattttatccaatccccagccctggaggctctcagcctggggaagggggctctaggtcccgctgcctctctccagagcctcacctgtccttggtgcaaaaggcaggcatggggacacctagacccccaggacctcttccttccaccctgcacactccacccctgggccacagcaggggaggcggtcagtgaccctggtgtggcaatcgttaacgaatgggggagaggcagaatggttggcaccaatcggctggcctgccagtgaccacaggggacctcagcagtcctcaggccccagcactgccagcccagggacacaaaggactaggctggctccaggccactgggtttgcagcccaagcaaagccccttccctggcagaggcagagacccggcaccctgcctgatacccgaagctctaagggccctggccagtacaggtccatcccccacctggagggatgggcatcggacgcccaccagccactccccgcccctccctagggctgcatatctgtagcccccagctgtgctttgagtgacaagggtccagaggaccccgggcagcccttctgcacagcagcacctactgccggaccccaggagggaaaagtgacccaagcctgtggcttggctatccccctcaaaggggtttgattcataaaactggtcatgccggaggcccagccgtgggaggaggaagcatgggacggggt

SEQ ID NO: 82000 - DNA, 1052 bp, Homo sapiens; identical to SEQ ID NO: 81999

SEQ ID NO: 82001 - DNA, 1052 bp, Homo sapiens; identical to SEQ ID NO: 81999

SEQ ID NO: 82002 - DNA, 1052 bp, Homo sapiens; identical to SEQ ID NO: 81999

SEQ ID NO: 82003 - DNA, 1052 bp, Homo sapiens; identical to SEQ ID NO: 81999

SEQ ID NO: 82004 - DNA, 1145 bp, Homo sapiens
catctcaaaaacaaaaagaatgtctaggagtgagacccaggcagagctgtattttggagaagctccttgagcgagtcctccgcacagccagggttcagaacaccaggacagagggttgcaaaggggacagtcaggatgtcagctcgtcttcctgtgcagggaggaggctctgtatcctggagcaggtgtggaccagctggcagggctgggagaggggcaggcacagggtcttccctcctccctccacccaggaggctggcccggccccaggtgggtgccttcagtagcaccgtgggtgacttggcagctgccagacctgttagcccagggcagggagaccagtgactaaggccaggccccagctcaagtgagcccctggggcggtgggacgtgccatcgtagtcacaagaggtgcaacctgtcagggaggacacctgtggccctgggagctgtgcagtggctgcagcccaactagaaatgggccagtccagatgccactttcggcacgcggcaggtgtgatgccaccagggctgggccctcacacggggcctcctcactgccctgtccccacccaggggcaagcacccatctagtaaggccctaacctgcaattaaccctgaacttgccagaagaacaccttagtcaccaaggaaggccgccagccctaagcttcctgggcctgggggtctgagaaggaagtggccctggaaggggtcttgcccttctcaagctccccatgccgaaccccccacaatcacccagggttcttggccaacccgtggcagaaatggcgcccctggggtctgtgagctgatcaatgggcaggcgggatggattcagggaggcagaacaggacctggccactgaaccacaaccctgcccccgcactgctctcaatgcccagccgggctcggggcccagggccagcaggggccccagcggccgccccagccccttcccggtgtaggccggctccctcctccctccttaattaaatctctcaggcagcccctgaggaatgtcagaaccttattgcattccccacgaagagtctggtgggggccgtcccgaaccctgaagaataactggcccctcgcctgcccccaccccctgcccaaaaccgaggtggcctgagggagcctc

SEQ ID NO: 82005 - DNA, 1145 bp, Homo sapiens; identical to SEQ ID NO: 82004

SEQ ID NO: 82006 - DNA, 1145 bp, Homo sapiens; identical to SEQ ID NO: 82004

SEQ ID NO: 82007 - DNA, 1145 bp, Homo sapiens; identical to SEQ ID NO: 82004

SEQ ID NO: 82008 - DNA, 1145 bp, Homo sapiens; identical to SEQ ID NO: 82004

SEQ ID NO: 82009 - DNA, 2441 bp, Homo sapiens
tgtggctggcccccatcacctagactcctggggagaccgctggggccgtccccaggaagagccctccccactttggcacccctagaagtccctgagcctcatacggggtgccagcccatccccaggaagcatcctgcccagtggcgcctgcagctcacacaagagccctttgtgctggagtccgggcttccccttcccccacacaggctgtgcaggtagtccagggaacacgaccccgacccagcctgcactccgccccaggctggggggacccgtccatagggctccctctcccccaggtacgtgggttcctggaatgtgaggaggagcaggtggtcccaggacagattagacaagtcactggtgaggtgaccactggggtctgcgggtagctcgaggtgaaggaagaagcccttgtccccggggttgggcccacgcaggccctgcccacgtgtagtatcgcactgccagagtcgtctcccctaggagctaccgaccctgagcccctagccagttagcgacaacaagcacccttcagaggccagcaggctaagcctccccaacctagcggtgtcccccttgctgtcgtgtgccccctcacctccctaaggtgagacccagcctgcctttgccataggtgtctccaggcccacttagctcaggtctgctgagtgaacagcccaggagggcctggcactgagcactggaagaagttagcaccccaaaccccaggcacgcgtccctggcccggccagcccaccccaggggggctcgtgtctgatgacctaaggccctggggccacacccctagccttctcttcccccatgggacccgctccaccctcactgactcagaggacggcgggtgcggcctggcctccagatgtgggctgtgagtgacccccacccaccccatgtccatatggggggtgaggccacctctgcctgaattagccctcccagcagggccagaccagggtcaggaaggatgcagccaggttccagagtgggaggggatcctccacgtggccagcctggccagcctggccaccactgtggccgcagctccccttgggcctcgtttaaggtcacagttaagagcgctcactccaggcaggcggccctgtgctcagaggtgtccaagctgtgaggccgcagacagtgactttgctctcacacctcggtttcttcatctgagtatctgggacacttcagggctgcagtgggggatgcatgtggagtcctcagccctgcaaggccaggtgtgcaggccagctcttaggggcacgtgctggggggtgctcttcaccctgcactggggagggggaccagccatagctctgggctccgtaatctgttgggtctttaatcagcaaggttgtgaagggagaggggatgctgtgggtccatctggccacagggtggctttccggctgacaggtagtgagctgtggaatgtgcgttcctgttagcaggacaggggtctaggtcaggactgtgggctggggtcctgggctgaccatccagcaggcggcagccagcctgcttcccagccccgtaaaatgtgcggtgagctcttttgcctgagccccaattctacccccacatcaaagggaggagggaggaggcagcgctggagctttggaaaaccccagagtttgtaagctacaggctggcagctctgagggcaccgccagggactcctggcactgagaacccatcagccagccccgagaggaacccagcgagggaaggctgactgtggaggggacggtggcaggggacagaggccagagttcctttctcaactgtgggcctcagtttctcacctctggagttggtgcaagcagccctgccccctcaccctctggagttgtagttttctgttgttctgtttgttttcaaatggggaagttcttttaacaagttctgggagctgtcccgcccgcctggggtctgggcgtgtgcttggtgtgtgcgtggggctgggggctgtctacaggtcacacggtggttgccgccgcccacccaccctcccacccggtgatcccaggacctgggctttgatatttgatcactagtcaggcagggaggtgagaccttttcctctgcctggtgcaggaggtgttccggaggcagccctgggattcctgggattcggggacgtcggggggtgggaagatgacgcaagggtctggggcctccgtcctccacccaagttcctcagccttgctgagtgctgctgccggccttgctccctccctggcacagtaactggcatagggcgacagggtccacagcccggccacgacccctacctcagcccccattgtgcagtgggcgctgctcgtggtgctcgtggtgcctgtgtctggggtgacttggtctgtgctcggagcacttgccaagtggtcggtaaacattcactgcggagggcgtca

SEQ ID NO: 82010 - DNA, 2441 bp, Homo sapiens; identical to SEQ ID NO: 82009

SEQ ID NO: 82011 - DNA, 2441 bp, Homo sapiens; identical to SEQ ID NO: 82009

SEQ ID NO: 82012 - DNA, 2441 bp, Homo sapiens; identical to SEQ ID NO: 82009

SEQ ID NO: 82013 - DNA, 2441 bp, Homo sapiens; identical to SEQ ID NO: 82009

SEQ ID NO: 82014 - DNA, 2055 bp, Homo sapiens
cttacaaaaaccaaagtccttgtctctgagtttgaaaaacatcttcccagaataaatgggaaaggatctcttataaatatatatatattttaaaaaagcaaaacatgttcctaaagcatcttcctttccagtttcttttgttccttcgcttcctggggccaagactagagtcacacagccgcctacccgctctccctctgctctttccgggagcttccttcactggcccccagggtccgcctggagtgggagagcccagcagggcccaggcatgcgttaccagcacatggcagggcccgccgtgcccagggactgcacgttgcggagggcagggcggacactgtcctcataggcactcggttctggggacgttagggctcgtcagctgggccacagcatctcacagatgaggagaccgaggtccagagggaacagggcccagctgtggtcacacagccctgtctgcacacatccccgaggttgggactgagaacttacgtggtgtggcagcaggagggggctggccatctcactggctgagagcccggccccagctgccctgtctctctctggcttagatgtagggctttgcgtggaggggtgactggaggccaggccctgggaagcccatgagtggcacctcacactcagacccgctgggcagggcctctccaccgccctctgttgccttcgggcctggctccaaggggaccttcactccctccagttccaggggcccagcccctggccccacctgccctttgtcctgagccgctgctgccatggcccgcccccgccgcacacagtaggctgcccccaccgcagccagcgcggccaggagcaccgcggccagggcgggcgcaatgaggagcggcaggttgccctcgcgggcctgggtgactggggcgtggttggagtggacggctgggggtgtatgggcctccccgcaggcctcctcgccctccggcacccgcccgggccccaaaggcatgacacagacggagtaagtggcgttgggccgcagctgggtgaccgtgtactcagcgagcgaggcaggcagtcgcagcgtcaccagccgcttatcagggcccgataggttgcgataggtgagacggaggctcctgagctgcacggagctcccctggaggtagcgctgcagccccacgcgcagggaggtggggctcaccggctcgatgcccagggtcagggaccgtggtggcctcggcgtgactggtgtagggctgggccgtgtcccctgccccatctggctctcacagtacaggcccgtgaagccttcggggcacaagcacgccaggtggtgccgtgtccccaggtggcatgtgcccccattgaggcaggtggacggtgggcagtcctggggctgggggacaggccctacagtcggtggggcagtggagggcgggctgggggcctcagtggccggctctgtggggctaagccaggtaggagccaagctagaagacaaggctgtgggctcccgcaccacgggcctcgtggtgggcactgtggctgtggtggtggtggctgggcagccaaagtcggcgtagtcaagctccaggagcagccggccagcgttcttgggcgggaagtggcagcgcgtctcctcagggctggccagtgtgacgtggctctcgcgcacccaggggccaaaccagctcagggggcacacgcagttgaaggggttgcgggcagctgccagcagccgcaggcgggggaagaggcccgagaggtcgccaggcagggcctgcaggcttaggttgctcacatccagctcctgcagggcagccaggccggccaggtcctcgggccgcagctgggcaatgcgggtgttgccggccagccgcaggcgcgtcaggccccggaggcctcggatcacaggtggcactcgctccagctggttgtcggacacatccaggtcgtggaggttgcgcaagcggctgaagagcccctcgtccagctgctgcagccccagaccagccagccgcagcgcctccacgttggcagtgtccaggatgccgggctccagggccagga

SEQ ID NO: 82015 - DNA, 2055 bp, Homo sapiens; identical to SEQ ID NO: 82014

SEQ ID NO: 82016 - DNA, 2055 bp, Homo sapiens; identical to SEQ ID NO: 82014

SEQ ID NO: 82017 - DNA, 2055 bp, Homo sapiens; identical to SEQ ID NO: 82014

SEQ ID NO: 82018 - DNA, 2055 bp, Homo sapiens; identical to SEQ ID NO: 82014

SEQ ID NO: 82019 - DNA, 1006 bp, Homo sapiens
accacgtaagttctcagtcccaacctcggggatgtgtgcagacagggctgtgtgaccacagctgggccctgttccctctggacctcggtctcctcatctgtgagatgctgtggcccagctgacgagccctaacgtccccagaaccgagtgcctatgaggacagtgtccgccctgccctccgcaacgtgcagtccctgggcacggcgggccctgccatgtgctggtaacgcatgcctgggccctgctgggctctcccactccaggcggaccctgggggccagtgaaggaagctcccggaaagagcagagggagagcgggtaggcggctgtgtgactctagtcttggccccaggaagcgaaggaacaaaagaaactggaaaggaagatgctttaggaacatgttttgcttttttaaaatatatatatatttataagagatcctttcccatttattctgggaagatgtttttcaaactcagagacaaggactttggtttttgtaagacaaacgatgatatgaaggccttttgtaagaaaaaataaaagatgaagtgtgtttcttgggctcagccccagggtagaagggctgggtggagggagatgaagaaggagtggccctcgctctggggagccagggcccctcagcagcccctgggcttgggcagccctcccaggtgtcctgacctgggtgccatccaccctaggcttgaatgaggtgaggctgggcccaggtgggagcagggctgcctctggcctcggacaagaacgggtcagggagcctcaccttccccaggccctgtcttctgccagcaggggctctggcccatgtgcggctgggagaggcttgtggcacatgtggggccaggtgagtcccttgtgggttggtctgatgggcagttcactgcctgctttcctccagggacagggccctgggctctctcattccaggcctcatggatggtcccgggagcaagtggcctccgggaccttctctacagcgtcccggg

SEQ ID NO: 82020 - DNA, 1020 bp, Homo sapiens
ctgctgagggctctggcacgaggagggaggaggcgggccgtgggtcatggcgggcagtgggtggtggcagtgggcctgggtggggccccttcttcctgaggcagcggcggcagcccaggtggatttcctgtaggcctgggtcccattaggggagtggctgcggccaggcctgcctcccccggcccgtggctgcatcgtcaaaggggcctttgtgggcctgaggctgctgctgaacacggcggctgctgaagaaatgttttcactgcaaagcaaacctggccgagtgggatggtggcagggggcagtggcgggggggtggcagggcccaaaaaaaggaagccttccctggaacagtgtctggagtgtgccatcagatcagggcttcggggaaggggagaacccagccagggggcgaccaagctgagatgcagcctcgacccgggacaagccccccgactctaggccagggaccaggggcagacgtgggggtgtgcgagcccccatcaccaggtgctgactgcagcaggccctgggccatgtgggtgacacatgctcttgtttcatgcccggcgacctcgtctattgaaaaggagtggccacagggagggaagacaacatgctcacagtaagtggagacaggaccccagcacctgctccccagccacgggtggggctgccggccacgcgggagggcttagggccactgtgagctacagaagcaatacaccctacttctatgggggtagggggtgatacagttcacccagccccctcacaggcattcacacactcatccccgctcaattcacacccagaagcgtggcacccaagacaggtgtatctctgcatctccaagaccaaagcatgagctgttccttcagtgcaggctgccagtccctctcgttatccccccacctccaccctgcgccaagcatggtaccaagcacacaaagtgctgggcagccctccgtggaggctgcctgagcacagacaggaccttggtgttcgaggctggcctgg

SEQ ID NO: 82021 - DNA, 1974 bp, Homo sapiens
gcgggatcttccggggagtccccagaagagctcccacctgagtaccagcgagagctcctgccaagggcttccccgggctgagagccgcccagaggaggggtaggggtcagggtgacagtgacgccctttcccaccctgtcacacccagggaggggctgagaagctggcaaggcccattttacagatgagggaggcaaaggtgagcaagattcggcaccttccctgaagccatatggagggtaagaggcagagtcagggctgccctcagcctcctgcctgctctgggcattggagattcagggaggagtcagtgggacccgccccgccttgaggagtcggagctcccgggccttcagactccacgtctaggatctggccccatgtcccccatcccaggcccggagctgcctggcatcttgtcttctagacctttctaggtcagacagccccttccctgcagggcccccagtggaggcatttgtgtgaagggacctggcaccagtcacttccacccaccacttcctgccttccaggctctgcccccagtgacagggtccccatcccctgaaagcgtctcctgcccggccccagtgtggcctctggaggagttaatgatgcccagacctcacggtgccactggccaaggctgaccctgtaattaccacagttaagaatagcctcgaaggaccagtgaggactggaatttctcaaatcactcccagatgggtggccaggctagggtcctctcccctctgcccccgagccctggcccctgctctgccagcccccatgaagctggtggatgccaaggatgtgtgccagccccccagctgttctgagaggtggcaggtcccctgcacccccaggcgtcctggaagctggagccccccactaactccctggggtgccggggcctctgagcaaatctaggctgagcatggaaagtctggagtgtcatctgtgggcacggctaatggggaggttggcaactgcatccactccaccaccctcgagttcttctgttttacagattttccatcttggcttgggcagaacagtgtgtgcccttatgagagctagaggaggccagggttcgtgcacacaccccgtcccctcctcatcctcacccaggggcctccgctgtggtcccacctatgcccttcccctgacatttgtggagtatctaaggggaagccagccacagtgagaggagcaggggctgggagccaggccagcctcgaacaccaaggtcctgtctgtgctcaggcagcctccacggagggctgcccagcactttgtgtgcttggtaccatgcttggcgcagggtggaggtggggggataacgagagggactggcagcctgcactgaaggaacagctcatgctttggtcttggagatgcagagatacacctgtcttgggtgccacgcttctgggtgtgaattgagcggggatgagtgtgtgaatgcctgtgagggggctgggtgaactgtatcaccccctacccccatagaagtagggtgtattgcttctgtagctcacagtggccctaagccctcccgcgtggccggcagccccacccgtggctggggagcaggtgctggggtcctgtctccacttactgtgagcatgttgtcttccctccctgtggccactccttttcaatagacgaggtcgccgggcatgaaacaagagcatgtgtcacccacatggcccagggcctgctgcagtcagcacctggtgatgggggctcgcacacccccacgtctgcccctggtccctggcctagagtcggggggcttgtcccgggtcgaggctgcatctcagcttggtcgccccctggctgggttctccccttccccgaagccctgatctgatggcacactccagacactgttccagggaaggcttcctttttttgggccctgccacccccccgccactgccccctgccaccatcccactcggccaggtt

SEQ ID NO: 82022 - DNA, 1974 bp, Homo sapiens; identical to SEQ ID NO: 82021

SEQ ID NO: 82023 - DNA, 1974 bp, Homo sapiens; identical to SEQ ID NO: 82021

SEQ ID NO: 82024 - DNA, 1974 bp, Homo sapiens; identical to SEQ ID NO: 82021

SEQ ID NO: 82025 - DNA, 1974 bp, Homo sapiens; identical to SEQ ID NO: 82021

SEQ ID NO: 82026 - DNA, 1047 bp, Homo sapiens
ggggttcctcctggaggagcagggcacggccaggtggggacatgtccagccctttgggcggggacgaaaccaatgggaggcgggggactgagggccagttccaggcctgtccatatacggcctggctgtgctgccgggtctcagagcctcaggggactgacggctgctgaaaactggcagattccatttgtaatagctcagcctgaccccaggagccatagtggccctacagggacccgagaacacagagggaaccgcccctcatcctttgtcacctaagggttcttaaaggggcagaacatgaaaacccagattctctttccctggggtgactcccacccccactccaagccctgctctggggcaggtgccccgtgtcaggctgcaccctcaggcgctggtttccctgggagccccccgggtggggctgagggacaggcccctctgagcccctctctcgccctccctgcagatgcgtgagcgcgaagtgaagctgtgggacacgcggttcttctccagcgccctggcctccctcaccttggacacctcgcttgggtaggagctgcggcacgcaggtgggctggggggctgatgacccaaggcgccgcaggtgagggcacctgatccggcctgtcagtgaggcgggctgatctccggggtgttctggggtacctgatctgggctgcaaggccttgcaacagacacctggccctgtacccccggagcttccagatgtcacgagcagcaggtgctcaggtgcccctctggcccctggtagcagagtgggcccttggtcaccagaggtttcatggctgggggttgacacaggtatgcttggcattcagggagagggtgtgatccagaagtgcaagaatacgcttcatttttctgtggatgttctggcagggctgaggcccagggaggctccaggctatgataggagggtggacgtgggcattgttggacagcctggcagggtgggggtgggggtggaggtggaggtggaggtggaggtgggccttggcttatgcggcccactgaggttta

SEQ ID NO: 82027 - DNA, 1038 bp, Homo sapiens
cccatggcatgcatagtcacagggaatgacacactgatttctctttggcctacatctacctccccgatgtgtttattccacgggcacagggactttccccattttattcaccatgtcatctcgaatagtgtgtggctcaaatacccatatgacgagagaacagatgagtgaggggcactgcttccccccagcacctgccctctatctgagaaccatccggccccactgccagctcctagcacagttctggcccctgggaggccttgtgtgtttcttgaatgaatgagtgacttttggacaagctaagagccacctggtgggctgcacacacgcagatatttgcacaacaaacaccaacgagagggcaggagcctgaatgacactgtgaccctctccgggtgttgagggcagggctggccaatggctcgacccttgtcctgacccgatatcccctcttacgtggagagagggcagtggggccttggttctcaggctccagccccaacttcctgtgccggccacagcctggtgggaagggaacagtgagaaaagcccctcgaaggacgggacctggagccgtttccgatggtctcccacgctggagtcagcctccacgggctggggagggggccccaggccagctcctcgcaggctgcttccctccctcattcattcccaaggagatcgtgggaagttcggaggaagctggccatggtttggggtgagctatttttggtaacagggtccttcgtctcaggctccaggggccagggtgactgggaggagctgtttgcatttcctctggccccctcagctccccactgccagggcccaggaggacagggccccacccaccatgtgagcttccctctcctcccaggggccgggagccttcctgctggcagctccagcacctcgggagggccaggagaggcactacttggcgctctctggacgttgcccagaggtgggtcccaggccctgcctcttgcctggggcagccacagtgatcctcgaaatcccccagtttacacggtg

SEQ ID NO: 82028 - DNA, 1038 bp, Homo sapiens; identical to SEQ ID NO: 82027

SEQ ID NO: 82029 - DNA, 1038 bp, Homo sapiens; identical to SEQ ID NO: 82027

SEQ ID NO: 82030 - DNA, 1038 bp, Homo sapiens; identical to SEQ ID NO: 82027

SEQ ID NO: 82031 - DNA, 1038 bp, Homo sapiens; identical to SEQ ID NO: 82027

SEQ ID NO: 82032 - DNA, 1041 bp, Homo sapiens
acaggcgcgcgccaccgcgcccggctaatttttttgtatttttagtagagacggggtttcaccatcttggccaggctgggtcttgaactcctgacctcgtgatccacccgtctcggcctcccagagtgctgggattacaggcgagagccaccgcgccgacctcagctctctccttaagcgtgttagccttctccaaacctgcagtgaacttgctggttccgaatgggagccgtgctgcccaaaaactaaattagtaaaacttgtgagcgcctactgtgtgtcatgcatgttctagaatatcggggatacagtgatgcctgatacaccatccctgttcgggaggagcaaacaatgactcgagagaggctccttagcaactaacaatgttaaatgctatcacaggaataagcactgttacagtcatacaaggtgaaggagtcattccatttctaaaatgggagagaggaagtttgggatgtcagggcttctaagaggtaagattcaaactgaacatcgatgaaaagtgtgtcaggtagggatggagtattccaagtagcctgaacttaagaaacaaatgtctaagatatgaaagtgtttgccttctttgcttaaaccctaaatttaagagtatgtgatgaggccggtcgcggtgactcacgcctgtaattccagcattttgggaggccgaggtgccggcggatcacgaggtcaggagtgccagaccagcctggccaacatggtgaaaccccgtctctacgaaaaatacaaaaattagccagtcatggtagcacgcacctgtaatcccagctcctcgggaggctgaggcaggagactcgcttgaacccaggaggcggaggttgcagtgagccaagatcgcgccactgcactccagcctgggcaagagaaactccatctcaaaaaaaaaaaaaaaaagaaaagaagtggtggccgggcgcagtggctcacgcctgtaatcccagcactttgggaggccgaggcgggcggatcacctgaggtccggagttcgagaccagcctgacc

SEQ ID NO: 82033 - DNA, 1041 bp, Homo sapiens; identical to SEQ ID NO: 82032

SEQ ID NO: 82034 - DNA, 1041 bp, Homo sapiens; identical to SEQ ID NO: 82032

SEQ ID NO: 82035 - DNA, 1048 bp, Homo sapiens
gagcccatgagggtgtgagtgttgtctctcatctgctacagtattccaggagagttctgtccggtgggaaggcactgctgatcctctctcatttatgtccttataagacactgtcagagtggaagagagaggggatatatttatgatctaaattatgattgtggatcattcaggctgtttttaagtgccatgtacgagtatttatctgtgaacattttcagtctgttgaaagtacgttttcatttaagtcatacattatctcttaaaaatcccaaagagtagggcagaattcgttcagtgagtcctacctatgcttacttggcagagtgcaagtaagtacagtggtgaaagagtgactgaaaatgtgggccagtaccctcctttccctttagagccgagcgtcagttttggtcgttgcaaacaaaagttgacaggctgtcccttggtttctttagtacttcatggagttgacattcaatcaagctgcaaagggggtcaacaaggagttcaccgtgaacatcatggacacgtgtgagcgctgcaacggcaaggggaacgagcccggcaccaaggtgcagcattgccactactgtggcggctccggcatggtaaggctctgcccgagactccacctcccacggcttgcaccactgactgagaagagctggttgtggcactgctcccagagaacgtatgctgggaattgggggagttggtgaactcagcctggctgtctttcccccgtgaccctgaggagacgagcctgtgctcctctttccctgataccacaggctcagcaaccagagcacagcagctccgggggcggggcgggggattgcatccagttgtcactttcttctttatttttctaacaattgctttggtaattcaaggggaaataatcttttttaaatgtactgttcagctcccaggagtcttcaggtacttctgtagacaggcggtatcatatttttcagtgtcgtgtggtcaagttgatgatctggagtgcagaagtttgtgtgttctagaaaatcagatgaacagattg

SEQ ID NO: 82036 - DNA, 1016 bp, Homo sapiens
ttcccacctgggacactccgccaggatttcagagtgtcttaaaacaacagcagccacagcagtggagccgcagtcagcagactccgtccgccgctttagagcaggactccctccaagttatctagccgtgaacagatgcaccatttaccctgagctcagacatcgtgctagcgagtggctgtgttagggatctgtcaccagaacacctgctgtgggcgctgagacaatggcaccccagctgcagcccctcttcccatggggtctggggcctctttcctgggactcctggctcagggcagggcaggctgtgcccaggggtccttggttcaggcggcatgtatttcctcctcattgcatcattttgtttttgtttggatcctgggtggagttctcagaacttgagcagccttagattagtgcatggtaattcgtagcaggtgtttggagctgggggccgattttccaataaagtggaggatttggagctccaggggcaggggcaggggctgggatggaagtccctggaatttcactgagctcctgttgctcccaggggactggaattcctctgttaaaaagcagctgccggccgggcgcagtggctcttgcctgtaatcccagcactttgggaggcaggggcaggtggatcacttgaagtcaggagtttgagaccagcctggacagcatggcgaaaccccatccctactaaaaatacaaaaattagctgggtatggtggtgcatgcctgtaatctcagctactcaggacgctgaggcaggagaatcgcttgaacccaggaggcagaggatgcagtgagccaagaccacaccactgcactccagcttgggtgacagtgagactctctgaaaaaaaaaaaaaaaaaaaaaaaaagggcctggcgcggtggctcacgcctgtaatcctagcactttgggacgccgaggagggtggatcacgaggtcaggagtttgagaccagcctgaccaacatggtgaaaccctgtctctactaaaaaaa

SEQ ID NO: 82037 - DNA, 1051 bp, Homo sapiens
acaatttaggtttgaaatatctttttgcaatagataatcttatttacattaatacagaatcattttacattcctaaatcagacactaatagatgctttattttagtgaattataaaggaaaacaaaaaggaaactgttgagaagtgttcttcattaacctgtctaacgacagcccgaagatcctgaaacacatggaaactgcgacatgctaccagcagaggctggggaatgggggttctgctctcactgaatggtggggaaccttcaactgcttagcctgtgctttccttttctgaatcaacatttacaaaggaaaaaacaatgattagcactgaataatttaaacacacttcagaaaatagatgtcaacagtgtaagtgggagaaccaagcccctgactagcaacagtggcagggcttcagttcccaaggcagctgaagtctggccagcacagtgctgcaatgggctgtggctcagcagaagggcaggagccctccatgcctggcttacaacaacaggactcaatagtcagggacaggcggccatcccggatggggtgggagcaaggactgtacatcctgacaaggatcaccacccacacggtcagagcagaacccccagggactctctgggcctctacgtgcctcccaggcaccgactgtgcagctgcttggtaccccgggaataaaaactaactgagcagagcagctgatgcctcggcagggcccctcattaggggaggacggtgctggtggggcctgggggccccacgctcccagtgaagacaacctgtcaggaagaactcattctggaacctcccggaggtttgctgagaaggaaattaatcacttcgtaacttgatgcagcttaaggcttcatttctaagctgtaagcatggcctttaactaagatatccacaatattcaattccaaattagagttttagccctgcaagagtctaaccatctccctctgcctgagccaggggccgtcacctaccaatggacaggaaactgccaccagcctctggggctgcatcctactgcccggg

SEQ ID NO: 82038 - DNA, 1068 bp, Homo sapiens
ggggtaccaagcagctgcacagtcggtgcctgggaggcacgtagaggcccagagagtccctgggggttctgctctgaccgtgtgggtggtgatccttgtcaggatgtacagtccttgctcccaccccatccgggatggccgcctgtccctgactattgagtcctgttgttgtaagccaggcatggagggctcctgcccttctgctgagccacagcccattgcagcactgtgctggccagacttcagctgccttgggaactgaagccctgccactgttgctagtcaggggcttggttctcccacttacactgttgacatctattttctgaagtgtgtttaaattattcagtgctaatcattgttttttcctttgtaaatgttgattcagaaaaggaaagcacaggctaagcagttgaaggttccccaccattcagtgagagcagaacccccattccccagcctctgctggtagcatgtcgcagtttccatgtgtttcaggatcttcgggctgtcgttagacaggttaatgaagaacacttctcaacagtttcctttttgttttcctttataattcactaaaataaagcatctattagtgtctgatttaggaatgtaaaatgattctgtattaatgtaaataagattatctattgcaaaaagatatttcaaacctaaattgtggtcatttcttctttgaaagaattcagacagcctctgcaggtggcttatgggggttacaggagacttggctggcctcatcctgtgctcacagccacccagagcacatagaggcagatgggtctggggtgccgacagtgctgaccctcacttggattccagagcagggtgcttgccatgacacaacagtcccctgtgagtgaatgttctagaatctggatgtgacttttttcttgggagcccatgctgtgagagctggccaatgtccctgggtccctgcatttcagtctccctcactggattgtttcccttcattctttccagtctttgcatcttttacattcaattttattttattttttttttaaatggagtctcgctgtgtcgccc

SEQ ID NO: 82039 - DNA, 1046 bp, Homo sapiens
ggccacttcacacctgtctgactaaacacgtttaggtcactcgtcccagtcaccaagtgatcccttcagccttggaccctcccttactgctgtgttggtacagccctggagccaccccttactgctgtgttggtacaaccccgggtcccctcacttactgctgtgttggtacagccctggaccccccccccccgctccaacttactgctgtgttggtacagccccggaccctccccaaccacttactgttgtgttggtacacaactaccaccccaacccaagtcctggaagcagagtcctcttctcctggaagccatctgggagaacaatggctttattcagatgttggtgcctctgcccctctggtgcccccgatccccacaaggggccgcgaggcgggcaggtcacagcaggttgaagtcccctttgtgctgttccagccactggtccagcgtcagggccttggggttgagtctcagggtcagctcgatgtcacggtcgggtctcagggcatagaaacggaacatgttggccaggtcccgggcaccgggaaagccaagcttttcgtagtcctcaggagtcatctggaagcagaggagcctgtcgtggccggcgtcctccagtgccccgggaggtggcggggcagggaggccggatgggctggggtctcccgacctgctacacccagagccactattgtctcggtccctgacccaggtcctccgtacaaggtcatttgaaaacttctaagagccgaaagttcagaaactgctgctctcctgagctgcctgacattgtagatcagtttaaagattgttcttggccagatgctgtggctcatgcccgtaatccctgcactttgggaggctgaggcaggcaaatctcttgaggccaggagttcgagaccagcgtggccaacacgataaaaccccgtctctttcaaaaatacaaaaattagccagcctggtggtaggtgcgtgtaatcccagctacttaggaggctgagacaggagaatcgcttgaaaccaggaggtggaggttgcagt

SEQ ID NO: 82040 - DNA, 1012 bp, Homo sapiens
gaaaacctacctactgggtactgtgcccactacctgggtgacaggtccagtcacaccccagacctcagcatcactcaatataccaatgtaacaaacctgtgcatgtacccctgaatctaaaataaaagtggaaattactttttaaaaaaaacttctaacatttttgattaaaaaaaaaaaaaacaaacgaacaggccaggcgtggttgctcacggagactgagacggcctcaaacaaacaaaaaaaaagtaattggatgagaaagcaacagcgtccacctgcttcacagcctagagcaggcagaggcatgaagaagagggaaaggcctgcagtgctccaacctccctgcagagtcggagctcctcccaggcgctctgctcctagcctggccgggcctccctgcagctcctgcctgccctcacctgcttgacctcctgctcctggctgcagctctcccagtaattggtcacgatgaaggtggcgtaagccccattcagggccagctccatgatgacctggtcatcttggtctccctgcactacttctgcaccttgcagcctcagctcctttgctgccttcttcctagggtttcgggtcaccactcgaaccttgaatgtcccatcttccaggagtgtgcgggccacggagccaccctgggcacctacaaagaatcaaaaagacctctcaggtcagacctacctgaaagtcccactgaagggcgaaaccccgaagggagtgctccaccacagcaaggagcatccaggaaaccttctcaacgacgattctcattcaggtatttttattttctttattttatttttttgagatggagtctcactctatcacccaggctgaagtgcagtggcacgatcttggcttggtgaaaccccgcctctatcaaaaaatacaaaaattagctgggtgtgaaggcacatgcctgtactcccagctactcaggaggctgaggcacgagaattgctggaacccaggaggcggaggttgcagtgagctg

SEQ ID NO: 82041 - DNA, 1033 bp, Homo sapiens
ggagttcgagatcagcctggccaacatggtgaaaccccgtctctactaaaaatacaaaaaagttaaacgggcggggtggcgcgtgtctgtaatcccagctactggggagtttgaggttggaggatcacttgagcccacgaagtggagattgcagtgagctgagatcgcatcactgcactccagcctgggtgacagagtgagaccctgtctcaaaaaagaaaaaaataaattatcacaagacaaaatttgtgcttatcaggagttcacagttaagacatatataagcttacttggtgaaattagaaaaagttatcagataaaacattcaggtttaaacactggtgagggtgtgggaatttgtggagccttggaaacacactcattgaatgacctcatctacctggggatgtgaagagggaaatcctgtgattcctccattgtctgacttgatttccttttttccttggctgtggcaacatgttgaagtgctgtgagtcaccaaaagggggaacgtgagcaactctagaaatgccagtgccagtgagttacagacaataaagcattgaccgcctttagctcacccctcatcaagtctgttgaaaacttgtaaaattggacagctagagctaccttgattttttggtttccttttaacagctgactctcttcacaggacagttgggctctacatcaggattgcacccaaaactggaatatcactcctccaggaggaagatatatttgaaaattagaattgtgggcccggtgcagtggctcatgcttgtgatcccagcactttgggaggccgagatgggcggatcacctgaggtcgggagatagagaccagcctgaccaacatggaaaaaccccatctctactaagaaaaaaataataataatacaaaaattagctgggcatggtggtgtgtgcctgtaatccgagctacttgggaggccgaggcaggagaatcacttgaacctgggaggcagaggttgcgatgagccaagattgtgccactgcattccagcctggg

SEQ ID NO: 82042 - DNA, 1033 bp, Homo sapiens
ctgccttggcttctcaaagtgctgggattacagacatgagccactgggctcagccattaattttaaattgcaagtgacatattctttagtttattaatcagcaccatatgatgtcacagttttataactcatttatctcatttaattctcatacccaccttgtggaattgttatcactgtcctttacagatgaagaaagaaactccaagaaattaagtagctggcccaagtccacccaactgggatgggcagaaccagggtttgctcttggttgtgcctttctacagcctgtgccttaaccacatctatgtgctgcctcttggcctctgtgtggccagtagattctctcatggctaggctcatcttaattaacatttgttgggtgcctactatggctcaggctctagagatcattgtaaaatccagtccactgccccagctcctcgtgtgtcttttgaacacattagtattgtgctgtgcagaaaggacttctgtgcatatgcctgctattacacttgttgaacccaatttctacaaactttcattcagatggagggattcagtcttcttatcatataatacatacagaaatacaaatatttaaatatttatctaaattaatagtcacatatgccatttatacagttagtgagttacagccaagtgacagttgtgatgggaggctgtgtctggggagttacatactggtgaggaaactagaaaacatggctgtcgggccggcactgtggctcacgcctgtaatcccagcactttgggaggccgaggcgggtggatcacgaggtcaggagatcgagaccatcctggctaacacggtgaaaccccgtatctactaaaaatacaaaaaattagcggggcgtggtggtgggcgcctgtagtctcagctactcaggaggctgaggcaggagaatggcatgaacccgggaggtggagcttgcagtgagccgagatagcaccactgcactccagtctgggcgacagagtgagactctgccacaaaaaaaaaaaaaaagaa

SEQ ID NO: 82043 - DNA, 1057 bp, Homo sapiens
tggcctgccctgttagtcatcaaaaatagatctcaccagggaacaatcttctcaggttgttgtgtaatttgagtgagccaaggtgagtgttttagggacaagcagcatcaacttcggaatcttcaactgggcctgagcacttatttctcagaaataatagaatcttgctcacttttctttctttttttttttttttttagatggagtctcgctctgttgcccaggctggagtgcagtggatcagtctagctcattgcagcctccacctcctgggttcaagagattctcctgcctcagcctcctgtgtagctgggattacaggtgtgcgccaccacgcctggctaataattctatttttagtagagttggggtctcaccatgttggccaggctgctctcgaactcctgacctcaagtgatctgcccgcctcggcctcccaaagagctgggattataggtgtgagtcaccatgcctggcctcttgctcacttttcatactaaaacaacaaattacaggctgtagtttaacctctctactgcatgcataaatgcagtgtggtacgagtgcctctgtagcccataacttcagtttccttgttgctagcagtctgtggtgacactatactaatctcacatgcaggaaccaatgaggattagccagggacacaggaggagtcaccttgcattcagaatgactcaagtttagtctcaacttgaccattagctctctgagtgatcttgcccatgttaattctcttgatcttagtttcttcagagccagtgagacattgcttgaaagtgacttagcctggtatacccaggtctgtcagacttatagtctggtgctctcttgggtgaacttgagggccttctgccaaggcaggaatggcttcttttaaaaaaaaattattttattattatttttttttttgtagagacggggggtctcactatgtttcctaggctggtctcaaactcctggactcaagtgatccttcagcctcggcctcccaaagtacagagattataggtgtgagctaccagtaccagcctccagg

SEQ ID NO: 82044 - DNA, 1049 bp, Homo sapiens
ggccttcagaccttgatttataaatgttttcttttttttttttggtaaaagtacagctttgctagccgggcgcggtggctcacgcctgtaatcccaacactttgggaggccgaggtgggcagatcaggaggtcaggagtccgagaccggcctggccaacatggtaaaaccctgtctctactaaaaatacaaaaattagccaggcatggtggcacacacctgtaatcccagctactcaggaggctgaggcaggagaatcgcttgaacctgggaggcggaggttgcagtgagccgagatggagccactgcactccagcctgtaatcccagctacttgggaggctgatgtaggaggatttcttgagcctgggagacagaggttgcagtgagtcgagatcatgccactgcactccagcctggccgacaaagtaagactctgtctcaaaaataaataaataaaatactttaaataataagaacagctttgctgtacacccttgaggaccctgagagccaaaatttgtctctggctgctcagttctcaggcagcagagaaaaaggtgctgggatgaaaacactgagctatctagaggagggaggggtgcagtaaagggtcctggagcctctagatgggtgatggaagtaaaggaccaggctgagggcacacacacaccaggctgagggtccaggtaccccaggaccacaggccccatgcttcttacaggcaaaatgaggcaaagacaagtgccatccatggcccaggttaccaactgcagtaacttcagcgtgcttcttgccatttgcacctacttatcatgctgcacaacagtgatagggaacgtgattaaatctcattaactgtgttttactcaataataactgcatgctctgggagagtatagtcttgcttaattaaacaacaagtccttgtgcttctccgaaaaatacaaaaaggagccaggcacagtggttcgcacctataatcccagcatttagggaggccgaggtgggcagatcacctgaggtcagcagttcgagaccagcctggcca

SEQ ID NO: 82045 - DNA, 1111 bp, Homo sapiens
agcctgggtgacagagcgagactctttaccccgccaaaaaaaaaaaaaattggttctcatggcttagatagaataacatagtggtgtgaaggaagcaaaagtatgcgtgttccaaagacttcaccatgccattcctttaagaaacaaaagcttccttgtgtgttaaataattcactacataaaaatggaccataggattgggtctttggggttgggggttgtcacttgagcctctgcatccagctgctcggatgtggtgtgctcaggcatagctggcctcctcctgtcacctccacagctggccaccacggcactttacttcacatactcagccctcgaggaggaaatggagcgcaacaaggaccatccagcctttgcccctttgtacttccccatggagctgcaccggaaggaggcgctgaccaaggacatggagtatttctttggtgaaaactgggaggagcaggtgcagtgccccaaggctgcccagaagtacgtggagcggatccactacatagggcagaacgagccggagctactggtggcccatgcatacacccgctacatgggggatctctcggggggccaggtgctgaagaaggtggcccagcgagcactgaaactccccagcacaggggaagggacccagttctacctgtttgagaatgtggacaatgcccagcagttcaagcagctctaccgggccaggatgaacgccctggacctgaacatgaagaccaaagagaggatcgtggaggaggccaacaaggcttttgagtataacatgcaggtactattgggggctgccagctgctagggctgaagagggaaactttgacagtggtagcagatccatagtggcccatgaaggcacacatggcattaggacagatgagctgcagggtgccgagaggaaggtggccaccagattggccaccagagcttgtgggcccagtgggtggttcccagcatggaggcctggtgtgatagatgccagtgggtagtgttttgggaagggtgagtcctctcgcacatagaggggtctggaagaatggagctggcttcctccctcattgcaggatgctggtcttgaagaatggttaattttctt

SEQ ID NO: 82046 - DNA, 1704 bp, Homo sapiens
cagaagtgtggaagcctggagtagagctgggtcgggggccaggcttgctgcactgtgccgactgctcccagggtgacggcctgtgcccagtgcggaatatggcccatagagaggatgctgtcaggcagaggctctagcatctggcttttattggttgcctttcttaaacccagcattttttaaaaagtcacctgaggtggtagtttagtcagggctggagaaaggggtaggccagtggtcagtcgggaggagggtaccggtgtggcatgatgggtgcttcacatgtagtaccaggccaagagtccagcagctagggccacaccagcggccaggatgaactggaggctgggcttcctcagcacagccatagctgttcggaagggacagctgctgccctccagggcacctgtgtggcagcaccaataggagacatggcatcagtggagtctcctgctacacctgccccaggaggggagctcaggacacacagacctacctttgtcttgttcagcagcgtagaaagggcatttacgcatgtctcctttcccatcgtgtacagggaacccatcctccaaggtctctctggccagtgtggagccggcctggtccagttcattgaatatctgcaggagcagaggatcgactgagccatctttgggctgcccatactttttttttttttttaaatgtcttttgagatgaggtctctgttgcccaggctagagtgcagtgttatgaacatggctaactcactgcagcctcaaactcctaggctcaagtggtcctcccaccttatcctcctacgtgtgtgtaccaccatacctggctaatttttaaattttgtggggagatggtgtctcaccttggttgcccaggctggtcttcaactcctggggtcaagtaatgcccctgcctcagcctcccaaagtgctgggattacaggcatgagctactgcgcctggctacactctccttttagaggacgccctccagagagagtgagctggagcaggtgagcttgctcaggtgtgccaactacacagcaagcagcactggtgggcggcagctgcactgcctgatggtcttccctccctagcaagagctctggggaggtgtggatattggtaccccaagaaggctgccaaatgctgggtctcccctgggaactgaccagagatgtagccttctctgaggtggctcaagccactgaaactaccacagcacagacaggagggcatgagtacatccccatttctaggtgctggttatttttttatcaagaagcaacagaaaacctggaacatgggagaatgagactgtggcagggcatactcatcctgagtgccctgggaggcctcagtggaagctgacaggacctggggacagagtaagcttccccaggttcagcctcatctaaaggctacttgtaaacagagcttatttactctccttggtggcactggctctctattaacttataaagcagggcttctcagagcaaaacttgaaaagaaaattaaccattcttcaagaccagcatcctgcaatgagggaggaagccagctccattcttccagacccctctatgtgcgagaggactcacccttcccaaaacactacccactggcatctatcacaccaggcctccatgctgggaaccacccactgggcccacaagctctggtggccaatctggtggccacc

SEQ ID NO: 82047 - DNA, 1928 bp, Homo sapiens
atggctcagtcgatcctctgctcctgcagatattcaatgaactggaccaggccggctccacactggccagagagaccttggaggatgggttccctgtacacgatgggaaaggagacatgcgtaaatgccctttctacgctgctgaacaagacaaaggtaggtctgtgtgtcctgagctcccctcctggggcaggtgtagcaggagactccactgatgccatgtctcctattggtgctgccacacaggtgccctggagggcagcagctgtcccttccgaacagctatggctgtgctgaggaagcccagcctccagttcatcctggccgctggtgtggccctagctgctggactcttggcctggtactacatgtgaagcacccatcatgccacaccggtaccctcctcccgactgaccactggcctacccctttctccagccctgactaaactaccacctcaggtgactttttaaaaaatgctgggtttaagaaaggcaaccaataaaagccagatgctagagcctctgcctgacagcatcctctctatgggccatattccgcactgggcacaggccgtcaccctgggagcagtcggcacagtgcagcaagcctggcccccgacccagctctactccaggcttccacacttctgggccctaggctgcttccggtagtccctgtttttgcagtacatgggtgactatctcccctgttggaggtgagtggcctgtaagtccaagctgtgcgagggggccttgctggatgctgctgtacaacttctgggcctctcttggaccctgggagtgagggtgggtgtgggtggaagcctcagaggccttgggagctcatccctctcacccagaatccctctaaccccttgggtgcggtttgctcagccccagcttatctcctcctccgcgctgtgtaaatgctccagcactcaataaagtgggctttgcaagctacctccttccctgcctcctggcaccgggtgggtcaagccacctccccataggagagtccctcagaagcaagggcatgttatgtctgtgtggggagtggacatcgtccatcatggctcccagcagccacctcctgctctgggtctactctccagcacctctagtctccaaagcaaagtcactctaaccgtcttgcaaagatctttaaagtgtatccagcactgctattttttagctcagaaataccttagaggtttcctacttaaaaggtttttttaaaatatatatatatatttaaaaataagggttttaaaaaagcacatatttgtatttaaacaattcattctctaaaagagaaacatgaacttaaataattttattaataggaatctactacctgtaaaagttttatttcaaaaagggttaaaaagtagggaaactctttaaactactgaccaagactgccaccttcataattcagatgagttagtgcagagatggccagggccagaggtcgcccagaacctgcgtgtgcagactgcgctctgttagtcttctgcctgtcagcctcagcccagtctgtgttgcttaagggtgcgcctccccagggctggatgatgctgtgctcaagcctgcgggtaggagggctccagcttgcagatcccatgcgtggatgccatatatagatggttgaaaccagcatcagaggaaggaaggtgaccttacagccactgccgagaccaacgtgtgccctggcccagtcacagctggaaatcccagggctggtctacacccgactctggtttggtttaattaggtccttacgtgttggtgttgtcccaggcagttggcatggcatcagcactgagggtgtgagaccctgaggactcagcctcccgtcctgccagtagactgcctgcagccccaccctctttccctcaaaaaagaaggaagccaggcaagaga

SEQ ID NO: 82048 - DNA, 2115 bp, Homo sapiens
gccacagtcctggtcccttcaggagctgccaccacggtgacagtgctgcagggagagatctttgagggagcgcctgtgcagacggtgtgtccccactgccagcaggccatcaccaccaagatctcctacgagattggcttgatgaatttcgtgctgggtttcttctgttgcttcatggggtaggtggtgtgggcactggtagggtgggggctgcaccagggtcaactggctgcctctgcctcctccgcagcaggcctcagcctgttcttccctgtctctgattcagatgtgatctgggctgctgcctgatcccctgcctcatcaatgacttcaaggatgtgacgcacacatgccccagctgcaaagcctacatctacacgtacaagcgcctgtgctaacggagctgggactcgggactcccccgcctgtcagtctggccccctgtgctttgctccctgtgctcagtggtcactttcccgctcccacttggggctgggagccgtgccaccatcccctagaagtcctgtcctcttcaccctgccctacctgagccgctgactcttctggcaaaaattctgttgggatttaaggccaagggtcagtgggtggcagggggctgacaatgagcttgtgtgttgttggtctgcttggtgtgtgtgatcgggaagataagctgggaggggtctcctgctggggtcctgatgcctctgtttccaaacaaggtacaggttcagtccagactctttccccctgggaccaacagcagccagagcagttagccagttagtccccaggcctgtggccacaggcgtttctgacctgctgggccgagaatgggtaagttgtctggagtcaggtgggcccacgtaggacagggtcacaaagcctgggtttgtttctgggtactttgcgcctctggggtgctagaggtggggcatggtggctggaagtaaaactgccaactctggccctcagaactctcaggtatagaagcccaggatgtctaataccctgtcccagtgcccgagagctgcctggtgtcaggtagagaggacactgtacctgggtgaatgatcagaccctggtagctaagaaggaacttgtccctttgagtcagtgtgcagaccccctttcaggccatgcctctgtgaaccctgtattgctggggccggaaggagcccctgagcctagccccttcccgtctgccctgtgtcctcactgcgtgtgggtatgacctctgcctggtggctggtgtatcccaactgggcaagagatggcagagggtcccccttgtgggtgcgcttggatgtgcagagccttctccatggattttcttccctgtaagtgccgggcccctcaccccagctgacaggctgttgctgtgcctgctcacacctgctcctgcaggcacactgggctagggacgaggaaggagcagccacaagtggtagaactgccttggtggacaccagcctcgccctgtctttatttcctgaatggtttgtgaacttgctcacctggaccactgtatcctgccactgtccttcctggtctcgcactgccactgcatggcctcctgtcactgtgaatcgtggcccagtctcagtttgtagtttctcattaaattggccctttcactcccccgccctgggcctctgctctcttgcctggcttccttcttttttgagggaaagagggtggggctgcaggcagtctactggcaggacgggaggctgagtcctcagggtctcacaccctcagtgctgatgccatgccaactgcctgggacaacaccaacacgtaaggacctaattaaaccaaaccagagtcgggtgtagaccagccctgggatttccagctgtgactgggccagggcacacgttggtctcggcagtggctgtaaggtcaccttccttcctctgatgctggtttcaaccatctatatatggcatccacgcatgggatctgcaagctggagccctcctacccgcaggcttgagcacagcatcatccagccctggggaggcgcacccttaagcaacacagactgggctgaggctgacaggcagaagactaacagagcgcagtctgcacacgcaggttctgggcgacctc

SEQ ID NO: 82049 - DNA, 1031 bp, Homo sapiens
cctttatgatgctaagtaagagcaaaagcttcccacctttctgagctgtgctcagagagtttggtgacagaaatgagggaaaagatttcacttgactcttcttccccctgacccccacctcaacaaacaaaccagaagggcacaggccagagcacagcttgcctggcagtccagtcctcatgcatgggagctcaggcctggtgggaggggaggcagagggcccagccgtggcccttgggtgccagcagtcctgggggagggaggaagcagacctgcgacgggaccgaggaatggaggggtggtcgggtgtgtggatggcagagtgacagctagggagaagccggatgtggaaggggaggaactgtgtggtatgcccaggcccctgggcccagccctggcttggcagcccttgctccctgctgagggccctgcctttccttcccctgaaacagctcccggagccctgcctgttccctgtccatccaggccagcagctgaaggagcctcacctgcctcccttctctgagtagcacggatttgaggtaagaaatcccccagaacccccattcccagtgcagcctgtggcagagatcggtccagtgtctcctccgactgccttagtgcccgctaaacgtttggggaggggagagctcggtgccaaactgctctcgtgtggggcaagtgctgagttaggctccttgggggactttacctcactgggccctgcttcctgggttctgtccttgcccttcagcttccaaacagggaagagcaggtgactactgagaggtgaggatggtggctctgggctaggtggccctgggaaaggtgggggatccccagtgcctggaggcagacccttctgaggatggtcacacgccttgtgcagcatcttggccaccccacagggctgaaggagaaggaacctggctgggagcttagttcatgtctgggttttccctccatgtccaggagaagcagcgaagatgtccagcgagcctccccctccttatcctgggggccccacagcc

SEQ ID NO: 82050 - DNA, 1058 bp, Homo sapiens
ctgggaccacaggtgtctatcaccatacctggctaattttatttttttgtagagatgggatcttgttatgttgcccaggctggtcttgaactcctagctttaagcagtcctcccaccttggcatccaaagtgctggaattacaggtgtgagccactgcacctgtctgtgctgtatatttgtaatgacacttgttaatacttaacctgaaaataatttaccaataattaaccagtaaaccaagttttattactcatgtggaagatgtgggaggtggtcagttagttgctggtgtggtgtcccatggctgtcctaggcactggcctccatcccaaggccctcatggtgaagcacagctactggagccatggcatctatcttccaggtggtagatgggaggaaggcaggaaagatgaagggcctggctccgggctgagtcggcttgccctgaatgccttcttatggtctggacacttctgcttacagctcattagccaaagctttgtcactctaagaaagctcggggaccctcttggttgatggacttgccctgagtgaaagtggagttctgtattcaagaatgggggagagagtggatttgggtgcagctggcaatctccagtctgtacttcattaggcggaacattgctgtttgagatcttgttattctgccttcttcctttgcagtgtgatgtggaggagcacagcacagctctgtatgggtggtggtatctgcgtagtaattcatggaaggcgtctccagcaatacagcctggacatctacatgtgggattttgttcagccttccaagaacctcattttgcacgtggggaaactgaggctcagagaggttgaggaatttgtctagggctgcaggccatcagcggcgaggcagggtcccagggagacctgtgctctcccaatattctattgacagtcaagcaaagaagaccgctgtctttgtttccaagtgccacaatgcaacaaggctgaatggtgccggaggtctcctggggaagcctaaagcctgaggagaagggcctgggacactgtccagctg

SEQ ID NO: 82051 - DNA, 1044 bp, Homo sapiens
cgtaattacaggcatgagccaccgtgcctggctaggctggtgtcttatttccgctgagactcatcatggtcgaggaggagcatgtagggttgggtgggaggagagctggcagatgggaaaaccagatctgttttctggtcctttctgtgacttaagttgagcttgttttgaagtgtttagaattcccaaggcatcagatacacccatcttcaagtgtaaaaataaataaatggttcagagccacccgcgatgttatctgagggagggactgtctcgtcctgcctccatcaggacaatgggaaatgggccatgttcaggattttccaggcctgcctgtgctagaacttggcagccgaggacaacggtcccagagaaggggacacattggcaacctccctgagtcttgggagggctcagcctcactagaggctgctctgcaactgagtggacctttgtggagggcctcctctttcctgctcatcacccagcgttgggaatagggtccctctggtcagctgcgaaaggccacagggaatcctggcctggtcccacatggacttgggtggctggattagccccaggtttggatagggcatggtggagaggggagtggagagggtttggggcccaggagcagtctcacagcaggggctcccttttgagcacctcctcacttggagcacttccttcatgtccctgtgctgggcacctgcatccaaacagtgcatgctctattaacgttcactgcacgccatcgtcctcctcagctcctccttgagccagtgctcatgctgaaatgagcactggagttgcagaagaatgtgtcctcgctccaaggcaaccagctgcacttctctcggggcctgttttaactacggaagcatctgctccagccttcccgccagggagtattccccatgccttggcctctgtactggctgaggctgtgtcatgtgacctaaagaaagccatgatccttttgatcatggatcacttgaagagaacttgtgttccttcagacctaaggaactgtagagatatatt

SEQ ID NO: 82052 - DNA, 1007 bp, Homo sapiens
agacaaaaaatgtgttacgtatgtaaatacatctaaagaagaatcacactgtgctactgcttttttattcttcactcactgctatattaaaaccatttttctatgtcaataaaaatctatatcattggccaggcatggtggctcatgcttgtaattccagcactttgagaggccaaggtgggcaaaatcacctgaggtcaagagttcgacaccagcctggccaacatggtgaaaccccatctctactaaaatacaaaaattagccaggcttagtggcgggtgcgtgtaatccttgttattcaggaggctgaggcagaagaattacttgaacccgggaggcggaggtcgcagtgagcctagactgcaccattgcattccagcctgggcaacaagagcgagactccatctcaaaaaacaaaaacaaaactatatcattttttaggggctgaatacagttacattatatagctaatcacatgcatgtaaccagttccattttcttgaacatcaagacagtggtgcatataaacatctttgcctgtgaatctgtgttcacatgtccatttacctctagaacgaatacattgaagtggaattgagtccataagagtgtacaggtagcaaggctgtccaggaaagttgtactgatccactatgctgtggccccgtgctgtggacggagtgtcaccaagtgagagtggtttgccaggaggttttactaaaattcagcatgatataaattgcacagtaattgtcatcatcatagttcctagaggccttagtacttttaggtttagaaccattctttgagtcctgtctgccttttgattttgcttctgcttaagagcaacagtgtcaccgggtgcggtggcacttgcctgtaatcgcagcactttgggaggccgaggcaggtggatcacgagatcatgagatcaagaccaccctggctaacacggtgaaaccccgtctctactaaaaatacaaaaaattacccaggcgtgttggcg

SEQ ID NO: 82053 - DNA, 1597 bp, Homo sapiens
ctccacctcgtgggttcaagtgattctcctgcctcagcctcccgagtagctgggattacaggcatgtgccaccacgcccggctaattttgtatttctagtagagatggggtttctccatgttggtcgggctggtttcgaactcccgacctcaagtgatccgactgcctcagcctcccaaagtgctgggattacaggcgtgagccactgcacccagtctatatactgtttcatataatgcagtgtaaactactaattcagtttgtttcacacccaaccaatgtaagtgaattcttagggtcagatgccaactaagagtgatagaaactcagttaactaatttccatatgctatatactgttgcatctaatgtagtgtaaaatacaaattagattcccactctcagttcctagagcgctttcttcacccatcagaaatgtcttcaaaataattgaaagaatgccctgtaacatgagagatctaaatgtcgcagggatgagccactgtcctcactgttctgagggaaaattgctggagggggagcttctgtgtacaggtatgtatggtgactgacacatttggaggaagaaagcctagaggtttgcttttccacatcccaccccgacccacggaatagggggactcaggcaagacctggccgcgggcagagcccagctccctggctaaggacggccaggagacatttgtgtctgaattaagactcttccacctgggtggccgtgagtggccacgtgtcttgactgcacttaacggcctggtgcttttttgtaggttgcagtggtgtgtcttgatctcatccaacagacagctggttgaatagagtcaacccaagactgtccattttgtgtctgctcagtacaggcagacagaaggattttttttaagggctccattttgagcacttaaatgatggttctttaggttcatgctgtttctaaaattagtcagccttgtagttaccaaggcctgcctgtgggacaggtgcagatgacttgtttattcacttgtggttgagctgtgtctgattttttccttttgctctgcatttcccctcctgtctgtgcttccttcattttctctgctagcaggagagcatgcaggaacaagctcttgagcagcgttctgcctgggaggtagttcagagtcctggcgagatcactgggcgagttgggaggccggggctgtgtcctcagcatgggctctatcactcgtttttattatgcatccaacggggactttcttaccagccctctttggtcaggtgacctcctgctgggtctcctggcggggtctcctaggctagcaggactgtgaggtcattacattccaactttacagatctaaactttccatttgcctggagtaccgggaggtgatctggcagaactgactcatttgaccaaactcatgggagacctatggccataaggggctggctttggagaggaggccactaaccagtccaggcctctggcttgctctgcagagcattttctcctgtaggtgaaattagattatagtctgaggtgtgtttctggattgaggagtatgaggagtagtatatatatatttttttga

SEQ ID NO: 82054 - DNA, 1070 bp, Homo sapiens
atctgagatctgagaagtgctcacttgaggccttctcccctgaacagggcaggactcttcaggttcaaggatgaggccgtttcactcagcagagccatcaccatccaagttcctctcttttttgtttaagtgactacctgtttgaaaagactcatcagaccctccatggaggtcactcacctcatggtccctgccctcagggagctgcagatctacctggcaagacaagtgacacttgagaagaacttataaaaaatacacaggcaagcccagcaggagctgtcgcctctgtgacagcaggtgctccagcagagaaaaggtgaggcctgtcatgggcttcacagccctgcagggaggtggccagggaattctgggtctagggcaatggagtcactcataacatgcagaattagaaagttgtgatcaaggccatctcccagtcagacccatagctcctgcagggcagggtcagaccttggggccagtttctccagggcaccgggcagcctgtgaaacatgggttagtgggtggatgggctgcagcttggctgctgctctaggcaggaactctgctctccagccagaggacccttctgttcacttcactcccattgccaaactggatggctgagaggcgctccagacctttctcgtctccttaaaccatgaccagtcagcaagtcctactaactccatggttcaaaggccctcagatccactatctcatctaacagtcaagggtgacagggaagagtctggacttggaccatatcccagatctaccaccggatcgtaactcacactcctccaaactatctcatccccccacccttcccaagcccacccccgtactctttccctggcctccaaacacgcccacaccccacttccctgcaaacctgggccttcctgaggattctgctgccaggggattctctgtcccttgtcttatctcccctcaagaatcctgggactctcccacttgtattgttgggccctgcttggtgcctagtccatgtgtgttgaagaaatgagtgcacaggtttggggttgacctaagtggacctcct

SEQ ID NO: 82055 - DNA, 1055 bp, Homo sapiens
agactgtttcaaaacaaacaaaaaagaatggcacaggaggtccacttaggtcaaccccaaacctgtgcactcatttcttcaacacacatggactaggcaccaagcagggcccaacaatacaagtgggagagtcccaggattcttgaggggagataagacaagggacagagaatcccctggcagcagaatcctcaggaaggcccaggtttgcagggaagtggggtgtgggcgtgtttggaggccagggaaagagtacgggggtgggcttgggaagggtggggggatgagatagtttggaggagtgtgagttacgatccggtggtagatctgggatatggtccaagtccagactcttccctgtcacccttgactgttagatgagatagtggatctgagggcctttgaaccatggagttagtaggacttgctgactggtcatggtttaaggagacgagaaaggtctggagcgcctctcagccatccagtttggcaatgggagtgaagtgaacagaagggtcctctggctggagagcagagttcctgcctagagcagcagccaagctgcagcccatccacccactaacccatgtttcacaggctgcccggtgccctggagaaactggccccaaggtctgaccctgccctgcaggagctatgggtctgactgggagatggccttgatcacaactttctaattctgcatgttatgagtgactccattgccctagacccagaattccctggccacctccctgcagggctgtgaagcccatgacaggcctcaccttttctctgctggagcacctgctgtcacagaggcgacagctcctgctgggcttgcctgtgtattttttataagttcttctcaagtgtcacttgtcttgccaggtagatctgcagctccctgagggcagggaccatgaggtgagtgacctccatggagggtctgatgagtcttttcaaacaggtagtcacttaaacaaaaaagagaggaacttggatggtgatggctctgctgagtgaaacggcctcatccttgaacctgaagagtcctg

SEQ ID NO: 82056 - DNA, 2390 bp, Homo sapiens
aggttttccacaggatgggagaaccagggaagagctttacaggttctcttacaaaggttcatttatttatttagagccagggtcttgctctgtggcccaggctggagtgcagcggtgccgtcacgacgttcactgcagccttgaactccttgtctccagcgatcctcctgagtacctggaactacaggcatgccccaccatgcccggctaatttttttttttttttttttttgtagagatggcatgtcattattttgcccagctggtctctaactcctgggctcaagtgatcctcttgcctcaccctcccaaagtgctgggattacaggcaggagctaccgtgcccaagttcttacaaggatttaagagcagccagccgtggttctagaatcaccataagagcagaacattgactgtatgatgtaaagtaatacttcagggaacaaaattgttttgagaaggagctaacggaatgcgtcccgaaggccagcttgccccagcagatcacgttggcaataattgaagctagtcatcagcttgcaactccctgtcggctctttacactgtaagcttgtccaggttgaacctaccagttcagtgtgtgttttctaaggtctaggggaactggggtgtgtagtgcaatttagctcatggtgttgatggactagaggccgtggctttgagacccttgggcccaggtactttgttccttagccacaaacaccagcccttcaccctactcagttgcctgagtgggagagaaaagataggccctgtgaaaatttgtctccactttgaggaacatggttccaagggtaaggacatgtttttactcatagaagacacagggaaatatggtagttaaagttgtggcattttatagcatgtcactgtcctgtaggtggaggaagtgctggtgagaaggtggcaggcagggagagctctgcagaggaccttggcgctccatggggaggatggagagagagagccaggccggcagtggtgacaggaggttccctttcccccacgaggggacttggaaatagattactcaaaatggaaatgtgcccctttctaggatcccacaaaaagtttctgtttctgtctctgcctagtcaggagtctccaagccacagtctctgtgggaggtggtaaaggctaccttgcaatacagtgcagcagaggtggaggcgcctagggcctgggccagaacctccccatgcccagagggctgtccactcttggagacactggtctggtggctcctgaacccgtgggcctgatggccccggtcaccacttctcctactctgtgagtcatcaggcagtggtccatgacattggtggtgtcctgggaccagggctgcctagacgtggagacctctctgtcatgttgaagctgtgtgacagacaggccttgctggccgcgtctgtgataggtgaagagcatcacccaggccacaggaaggcctgcatctgctgttagcgctgaagagatgaagggtccctgacggcagacaaagcaaaaccaatacagagcctgcagtgcagggtgagggggtccaggagcattctgattctttccttgaaagcagttgtgatgcatttttggtaatactggaccatttttccaggaaacatttcttgtcaccttttcagtgctcctgatttgtgggtgagacctggcttggtctgtacattgagtgattcagtaccatcgattcttactgcaaggaggtgtaatgggggttcagtaaacactgagggtcttcctgagatgtaattgttcaatcaatgctaattaagtctgaattcagatctagtcccagtgtctgggtttttcccccaagaaggaaaagaggccaagaaaggtggaagtaggtagagaagagtgcgagagctgccttgggagggtttagggagaatttcaacccgtattacttcaggaagaaagcgagcttggttgtcacaattctgattaacatgcaggccgggtgctgtggctcatgcctgtaatcccagcactttaggaggccaacgggggcggatcacctgaggttgggaatttgagaccagcctgaccaacatggagaaaccccgtctctactaaaaatacaaaattagccgggtgtggtggtgcatgcctgtaatcccagctactccggaggctgagacaggagaatcagttgaacctggcaggtggaggttgcagtgagtcgagattgtaccactgcactccagcctgggtgacagagcaagactctatctcaaaaaatcaaacaaacaaaaaccaaaaaaaaaaaaaaaaaaaaaaaccatgcaaacagcggcctcacaggctggggaagcaggaggaaatggggttctttgcagtgtaccgccctatgaaca

SEQ ID NO: 82057 - DNA, 1044 bp, Homo sapiens
gaggaggcgctcacagggacggttctttccctattctccagcctcgtgtacattgggcaaacaggccccgaccatcccacgtgctcagccccagctctaggccaaatcgcctccgctcccactgacgtcatcacggcgcatcacgtgcctcccgagaccccaccccccaccgtgacgtcccgggcctcggccctggtccaaagtctacccgcctccttgtgacagaagtgcgactgccagctgccgaggcgttcggtcctgctgttgcggccgctgccccagggctgcggggacggtgagtcgactggacgcattcggagacggcttcgcgcgggagccctcctccccgggggaagggtctgggcgccagctctcctcaggtcggggcgtgacctcggaccgtggcgccccctccccgcccccgcccgcggcgcctgggcggtgcatgccgggcaccgtagtccccagcctctcagagcgggttgtggtggggggggtgaccgggcggactacaagtcctagaagcctctgggcggtggggtgggcggtgggttggggggtttcgttgtgcgcgcaaagccgcgcggggctgagggtcttgttctgccggcgcctgtccggacccgggcccctctccgctttcggccggcctcgggcaccgggcttctggaggtaaagcggggccggcggttggggcgcggcatggcggggcccgtcctcccctcagggcgctgccgagacctagcgcggccctggggatgtcgaagccgctgcggtggcggggcccgggcgggcgccccgctgtgtgccgcggggttgtgcgcccggaatggcagcctgctcgcccgcacgtttttccgtcagggaaggttgtggaaattgccatctccgtcttgcagggcgagacggggaggggaggggtgggagttgttttctcaaggaaagggggtcgaggaggagccccgtggccgagccagcccctgccgagccccgcgggtgaccttggccgtcccggagcccagcagtgtcctgcacccgcgcccg

SEQ ID NO: 82058 - DNA, 1291 bp, Homo sapiens
ggagcaagactgtgtcaaaaaaaaaaaaaagagaaaagccttttgagaagagtgcaagttcttttatatatttacaaaacctttattcactcaatttttttgtttgtctttattttttaagattgtattacttgattttattttacactaggtggtgggcacacaaagcaatccttaataaagttgacaattagcttcattcaacatttttaataatgcacatataaaaaaagtattcatcttacaaattcttctgcaatccaaacatataatagcttggagaacatttagaaaacaaaagccaatgtaaaaagacagattaaaacaactagaacagtacaggttttatttatatggctcgaattttacaggtttcttactgtatcatcagtgtcagaaatctgttctgtcagctggctccattgttctggatttaaagaaataccttttcttcctggtttcatttcaccttcaggatccatccaatattctccaatatcaattagcactttgcctttaaaatcttgaacgccaacgtacctcattttcccaatctgaaacatgttaccatctctgctgctgctcctctgtcagaagatgacagagctctccaagtttcgcctgtcttttgcttctttacaggtttttctggagcaacttgctttttcctctttaagtttttgtcaacctcactgtcagaatcactgccagaagagtttgaagaaacaagttcctttgctttaggcatcgcttcgctcggctctagcagtggaacaccctcttgctcgttcgctcatgactgactcgtttgtttttatttttaaggcagggtctcactctgtcgcccaggctggggtgcagtggctcgatctcagctcactgcagcctcaacctcccgggctcaaccctggaggcaatcctcccacctcaacctcctgagtaggtaggactacaggcctgtgccaccacactggctaatttgtattttttgtagagacagggtgttgccatgttccccaggctggtctcgaactcttgagctcaagtaatcctcccacttcagcccaaagtgctgggattacaggcttgagccactgcgcccaccctctgttaaccttttttttgtttgtttgtttgttttgagacggagtctcgctctgttgcccaggctggtgggcagcagcatgatcttggcttactgcagcctctgcctcctgggttcaagcgattctcctgcttcagcttcctgagtaactgggattacaagcgtgcaccaccatgcccagctaat

SEQ ID NO: 82059 - DNA, 1105 bp, Homo sapiens
tggtggtgcacgcttgtaatcccagttactcaggaagctgaagcaggagaatcgcttgaacccaggaggcagaggctgcagtaagccaagatcatgctgctgcccaccagcctgggcaacagagcgagactccgtctcaaaacaaacaaacaaacaaaaaaaaggttaacagagggtgggcgcagtggctcaagcctgtaatcccagcactttgggctgaagtgggaggattacttgagctcaagagttcgagaccagcctggggaacatggcaacaccctgtctctacaaaaaatacaaattagccagtgtggtggcacaggcctgtagtcctacctactcaggaggttgaggtgggaggattgcctccagggttgagcccgggaggttgaggctgcagtgagctgagatcgagccactgcaccccagcctgggcgacagagtgagaccctgccttaaaaataaaaacaaacgagtcagtcatgagcgaacgagcaagagggtgttccactgctagagccgagcgaagcgatgcctaaagcaaaggaacttgtttcttcaaactcttctggcagtgattctgacagtgaggttgacaaaaacttaaagaggaaaaagcaagttgctccagaaaaacctgtaaagaagcaaaagacaggcgaaacttggagagctctgtcatcttctgacagaggagcagcagcagagatggtaacatgtttcagattgggaaaatgaggtacgttggcgttcaagattttaaaggcaaagtgctaattgatattggagaatattggatggatcctgaaggtgaaatgaaaccaggaagaaaaggtatttctttaaatccagaacaatggagccagctgacagaacagatttctgacactgatgatacagtaagaaacctgtaaaattcgagccatataaataaaacctgtactgttctagttgttttaatctgtctttttacattggcttttgttttctaaatgttctccaagctattatatgtttggattgcagaagaatttgtaagatgaatactttttttatatgtgcattattaaaaatgttgaatgaagctaattgtcaactttattaa

SEQ ID NO: 82060 - DNA, 1068 bp, Homo sapiens
aaaccgtctaacagttcctggcccacaatagatgtgcagtaaatatgtcagttcctccctccgccatcatctcgtgggcctgtctgccgccccagccacctctcggagtgcctgtcttgcgaagggctggccatgtccaggacaatcttaggtccctgggcctggaggatgtgtctctgcaggaacagggttcccaggctccagagtggcctccatgcggggcggcctccctgcggggcgcccatcctgctcacctcatctgttgccgctgcaagtactcgcagctgttggcgctggctggccgcagccgggacagcaggtgggctttgcggatggtgatcagctgtctgttggaggacaagggcacagcaggggctgtgggaggcgtgctaggccagcagagggctcgtctcccacccctccaggaagccttcccagcaggaggaaggaggtgcagactcaggtcaccaccctcgaatgccagaagcgtccacagcatagaagtagaaggggcccccccgaaaggcatctcaggacctctgatcatcacagtaagacacaaaaaacaattgttctatttccaaaagtaaaaaccaggctaggcgcggtggcatacacctatgatcccagcactttgggaggctgaggtgggcggatcacctgaggtcaggagtttgagaccagccttgccaacatggcctttttttttgatatgaggtctcactgtcacccaggctggagagcagtggcacaatcctagctcactacagcctcgaactcctgggctcaagccatcctcccatctcagcctcctgagtagctgggactataggcaggcgctatcatacaaggccgcatatttgtatatttttgatggctgtagaacagtgtatgtggacatgtgtatcttgaaggctggggaaccctgtatatgaatgtggatacacatggcacatacagaacagtgtacatggatgtgtatggacttgacggtacagaacagtggatgtggatgtgtagatacctggtgcatagagaatggtgcatgtgggcgtgtatggacttgat

SEQ ID NO: 82061 - DNA, 1020 bp, Homo sapiens
gggcagaaattgcccaaaatactcatctgtggtataggggtcggggtgggggccagggctacaccagacagcacccccaaggcagcttggataggtgtcacccaggtcaagaggggcttggcctcatttggacacagtctttggagaaagaaaagagcagccagggtggggggcgtgggtcgcagtgagctgggccagggaccttgaggacaataggaacagagtaggcatgcagtgtccccagactccgatggccaccggggccgggggagagactggagcccaaagtccccccctaggcagccaaagggaagtgaaaggggagcccccctccagctccctcctggcagctccccaccagcccctcaactccccagcaccaccccagggatccagtggacactggggactatggcggcgggtcaggcttcacccctgcacagggacattgttttagtctccgagatgggatagaaccgtcaatagtacagaaggagagagcaaaacgagacagcgttaggggcgagaaaggaaagagggaggaggattgaaagggaggaaattgaagggagagacaggcaaactgtcagaaggggaagaaatgaggccaggagcattgttgggaggggggcctgggggagccctctgctctgcgtgccaaggccaatccctgaattgccgcagcaagaccgtgtgacctcacagttggctctttttccaccaaacgcatcggtggtgagcacaggaaccagaaaggcttgaaacaggcaagtggcacctggccctggaagggatggccatcccagaatatcccacgggcgccgcaccagcctcctcatggatcagccaagaggcaaatataaacaatcagattttgtttaaaaaaattaataactagttactggtagaaagaacatgaaataaaaaggatgcacacagcccagtctggttcccgtggggaactggtcttggaaataatggcccccaaatgaaaggcacagtgccaggaactgtaattgg

SEQ ID NO: 82062 - DNA, 1534 bp, Homo sapiens
catgacttctctaagcctggaaaatcgaaagcaaaaccaaccggaggccagacacggtggctcacacctgtaatcccagccctttgggaggccgaggtgggtggatcacctgaggtcaggggatcaagagcagccctaccaacatggtgaaactccatctctgctaaatacaaaaacttagctgggtgtggtggtgcatgcctgtaatcccagctactcaggaggctgaggcaggagaatcgcttgaacccaggaggcagaggttgcggtgaaccgagatggcaccactacactccagcctgggcaacgagcgaaactccgtctcaagaaaaaaaatcaggagagtttatgggaaaagcctcacttccgacttatcttggaaactggaagatttggtgcaaattcccttaaggccataactggctgaaactgaccatggcactggggacacggcgtggcctgcccctgccagcctgctctacgccaccacagccatgcacgagtccaactcctgcgtgggaatcggctggaatccctggagggggtctgtcttttcaccacggggagcttcagaagtaaatgccctgtccagtggggtaggatgaacggcggtgggcagggctccccctggaaacggccgtgaaaacagacggcttgttctgcaagatgctctcggtcgagagggactcaccaggggctgctgagtgtccccagggtctttgcagcggtccagccagggttctctgagaacaccctgcggtcagccacagggaaccaggctgtctccgaggctgactgcggggctgggtggggctgctgtggccctggaggtctctgaggggctttcacagcagtccctggcacaggacagatgagtcctttgactccggtcttcttccccgaatacgggagacctcctaggttggccggaatggagttcttttgacacaaggctacttctaattcctgcgtttggaaagttctctgggtttttgagcactgctcatatttggacaacggatgtatttcaacagagccttaaaagaacacggctgttttggaggtgaggggctaccgagtccttttagggagggcagaaattgggggccccttccaggatgaccaaggacttgtcagtggcacagcactaggcaccgaggagcctgctggtgaaattctgctctgcttcccggggtcatctctcatctcctggggaattgcaaagccacgatcttgatggagtcattttgtcctcatcccagtggagccacgagcaaggtgagggaggcagaggagagaaacccttgtctgccggttgtgtgtgtggaaggtctctgcttagagctcgcacatccatggagagtcagaagtcaagccagccaggacagtgggtgtggggggttggagggagcatgtgttggttcctgcgtccctaagaagtcgctgcatgccacgcccttctgtctggtgcctgaacttccaccctgggcagtccactttcgggtactcacagtgcccttttccaacacacgtg

SEQ ID NO: 82063 - DNA, 1114 bp, Homo sapiens
caggcaccctccaccacgcctggctagtttttgtatttttagtagacacggggtttcaccatgttggccaggctggtcttgaactgctgacctcaagtgatccacctgccttggcctcccaaagtgctgagattacaggagtgagccaccgcgccccgcggggagttccatttattaaacaccatgagccctggggtggcctgtagtgaaccacaccctcactattcaaggcatggttcggaccccagcatcagccaggagcttgttagagtgaggctgcagcccagactccccgaatcagaaactgattgaacaggagcccctggttccagatagacatcaaagtttaggaattgtccctacacttcatccctacatcgtcactaataccggggaaactgtcccaccaccctcatttctgtttctgggggccactgtgggctgggcctgggggtctcaagtggtcacattaaggacgggagagacttgaggttcctgcagggctggctttttcagcgtggtcactgttgacattgagggctgtgttattgtcctgcagtggtgctgagcagtatccctgagccctccccactgaatccaagggcagcccccttattaggacaatcggaagtgtttgcagccagtgctcatgtctcctacaggccaccatggtcccagtggagtgcctctgtgctagttctgtggctctcatacctggctgcacagcaggtaaaataaaactggcaaaccacaggttcgttggcctcatgccatcagactctctgggccgaggccgaggccgaggccctgacgtacaatcgtggaagctccctgggtagatgatggtgattgatctgtgactgtaccaaaagccactcaatggcatgctttagaaatgtggacgttctggtgtgtcaattatacctcaaggctgttattgaaaataaaacaggctgggcaggtggctcacgcctgtaatcctagcactttgggagggtgcagcggggggatcatgaggtcaagagatcgagaccatcctggccaacatggtgaaacagccgtctctactaaaatacaaaaaattagctaggcgtggtggcgggcgcctgtagtc

SEQ ID NO: 82064 - DNA, 2124 bp, Homo sapiens
gctccgtgggtcctgcacttaatcttgcctgtgccagctccccctgagacctggggggcgctggcctctggggcaatgaagctccttaccctacagcccccggggatgctgtggctgatggaaaggggtgggctgggaaagcctcgtggccccaggcaccgtgggctcctgagagtgaggctgggtcggttcatctcaaggcttctcctctgggaacccctgggcggcggacaggcttggggatctggggaaggaacacagagccttccgagaatgggccagccacgcatctccccttgggaggcagtgggggcccctccaggaaggggtgctcaccccatctctcctctcttcccctcacagatgtgcacccccgccaatacccctgctacaccccccaacttccctgacgctctcaccatgttctcccgtctcaaggcctccgagagcttccacagcggtggcagcggcagcccgatggccgcgacagccacgtcacccccgccacacttcccccatgccgccaccagcagctctgcggcctccagctggcccacggcggcctcgcccccggggggcccacagcaccaccagccacagccgcccctgtggactccaacacccccttctccggcttcagactggccacccctggccccccaacaggccacctcagaacccagggcccaccctgccatggaggcagagagataagggaggcccctcccccctcccggaggccaggaccccgtggggcgggggagaggacgtctctgcgggcccccttcaccccttttctgtctgcaccccttgttccccggagccctggaggggagagcgcggactctagccaggcagggacacgtctggtgccagaacacgcagctgcccacacgcaaggtcatggccccagcggccccggcacatggagtggttcagcgcggcctgggtgcctggcggacagaacttcagagaccacgcagccttccttcgaagacgcacctgcccagcccagcccaggggtgccgtggaggaccaccctggcagagacattgctgatccctggcttggagctccttgggggccggcaggcctcgacccccaccctagggaatgcagagcctctccgcatgtgtgcgcgtggccgtgtctgtgtatttctacgtgtgtcgctcttcagaagcaacctagttcctggggcagctggactttgcatgttagtgtgagcccccagccccctgcccgccgccccctccccagggccctgcctcctccccaccccctcgtcagccagcgttgctgttccttgcagagaaaaggattgtgggaaactccaggactcttcccaccgcctcccagcgcctgcctgctggggctgcctgcatgcctcccctgcacctgggggtacccgcatccacttcctttcccccttttaacaaaagagaagaacgaattccaaaccactgccaggctctgtggtcttaccttgtatacgaggcttgctgccagctggttctgggggccgccgcccagaagacagggccaccccgagcctccccggctccacactgctgcctgtagcccttgtcagccacagcgtgctctggaatcttcctgcccacccagggcttttcctgtgaagttagttcctggcctgggtccccatcctgtcggcccacccctgcccctgcttggctggacagatcccggcgcccagttaggagttcgcagggctcacacctgccttctgttgtcctgggtttcatctcaggacttttctcggtctcggctccagtggctgggcacaggctggaccctctgagcccggcctccagcacacactgggtagggcagggcctctgggcagagggcagacagagccagggaagcttgcaaggggcagaggacgaggcaggggacaaggatggggcggagtgctgccagcaaagggggcacagatgttgggtcacttaggagactggcaacccgaggctgcctgggatgagctggagcagctttgggagaatgcaccctcagcctcacagctccccaagagtgggcttggacttggggcagaagggagactggggcctctgcaacacccccacgggactcagctcacag

SEQ ID NO: 82065 - DNA, 1097 bp, Homo sapiens
ccaggaagtcaagctggcattaggggagtgggcctgaggggtggcggtaggggcacctcggcggcttgaagctccaagtctgggcctgggacttggcagggccccgagaacccctcaaatacttgtggggctccctcactggcccttgcgcaagagcagcctccgtttcctgggacaggcctccccacccctgcagggcctcagccaggacatagcaaatcccagcgcctccctctggggctcctcagttcccagtcaccaaggacctctggagcctgctgagctgacacacacaggaaagggctccaggctcgctctgtctcccccacctgtcctggcctttctgagcgcccccatctctgtcttctgccgaccagctgaccctgagcaagtcacttcctaccttcatttccctgcctgtaagacagcagtccctgcctgtggggttaatgatgacagtccacggccccgctgggatggagccctgctgggtgcccgcaccgtgctcagtgtggcatgcggcccgggtgtggagggagacggtggagcatcccgtgcctagcgtggtgccagccaagggcgggtggctggggagctgtgctgggagctgtcgtaaacccgtggtggctttgatcctagggccgtctttctgctccacttcccgggcactgttccgagggaggctcaggtggggaagcgagtgagcctaaagcccaggcttgtctccttggtgccaggccctgcttgctggaatctggtgatcttaggaggtcactgttgcaagggaggggacccaggagccacctagtcgaacctctttgtggtacagatggagaaaccaaggcccaaacagtggcccccttgatcagccagaagcagagctgggtggggcagcaggggatccccaccaccaggctcagactccttcaggatgcttttgcttcgcagatgaggagaccgaggcttagagaagagtagagacttgctacccgttgaggtggtaacagccaggctagaatctcctgaaacggggcagggtggggaggtctggttgggctacctggggccgggcgcctttcccccaggatggggtgtac

SEQ ID NO: 82066 - DNA, 2977 bp, Homo sapiens
cgcaccgtggggactacatatcccagcatgccgcggcgccggcggagcgaggcgaggcgcggtgagtcagagccgcacagtaaatatttgtattagccggagccggctcgctaatggtggacgcgtgaggcggaggcgcgggcggaggagggaggccggagcgggcagcgcggcggcgccatgtccgtgaacatggacgagctcaagcaccaggtcatgatcaaccagttcgtgctgacggcgggctgcgcggccgaccaggcgaagcaactgctgcaggcggcccactggcagttcgaggtgcgcggcgccggagccgggcgagggccggggccacgggcggagtgtgtcccgcgtggccgccgggcgggggcggacggcgtggacgcgtgccggctgtgcgccccctccgggccgcagacccgacccgctttcccgacggcggtgcccggcgtccggatcccaagggctcgcggcgggcggaggtgggaaccgggccaccggtcggggatacgccgcccccgcggggccgcgagtcccccgggatcgagacggggaccccccccaccccttttgtccgggtaacggccgagggccgggcggccccgcggtgcagacggacagtcgggcgggcggccggaaggaggacgccccaggcctcggcagagctgggccggagggcggagccgctccgggcgagtggtccgagggtccgcgtgcctggtgggcggtcggcggcgtgcgcacacgtccatgtgcatttgtgtttacgcacgcaccgcgccacggcgtcggccgggcaccggggaggtggcggacctgcgggcacgttggcgcgcgtgtgaacgcgcagccccctggtgcgtttggtgtgtgatcaacgcgtacacatgtggcgggtgtgcagatgccgcccgtgcccggcacggtgtgatgtgtgtacacggcctggagtgtaggggtggcgtgtcggagccccacactacaccacagggatgagcgtgtatccccttcagaggtgtgcctggggactccgtgtgcgcgactaggtgctctcctggggctggcaggggcatctgtccctttaccggtgcaatggggagggtgcacacggttcaccagctttcgggctagctgggtaggaggtgatgctgccccggtctggcacccactcccccgggcctctcctaacccataggacagtagtgctcctggcttgtgctgcccagaggctacctggctttccctaattcaccgaccccaggattaaccccatggtggttggtatcaggggatgaggccagagccctttgagctgtgcccctcacaggggtagggtcatggcctcagccatcccggtaccatctgtgcccagccggggactgggaacctggtttctccatgaggagccatcccagggcctgcaggagggactagaagccagaggactctgaggctccgcttcctggggactgcagggggatcagaatgtcccaagcttgggacagtctgggaaggcagtggccatcccatccagatgagtacatccctctctccttgcctacttccctcctaccagccgtcgcggaggccactgatcctgtgtggtgttcaccccaggacgtgggaggctgctctgtccctctggccttagtttccacatctgtatggtggggttggggggcatgagtcagcttctgttggccagcttactgccccctgtgccccaaggcagccccacccggaggaagctccctgcttccctcctggtctccacagccctcatcagccctgtttgtgtcaggggctggatgtggcaaaacttgcaaaaccgcattcatggcagttacacatctgcacgcagggttccctcgctgcctggggctgggcaggtaggtgtccggtgggaagcgggccctgcctgcaggactcagcccagccctcaaaacctggcacccagctggcacccaggccacatccctcagcggcacagttaattgaaaatgcagctttgaggagtgcaatgtctggggaaagactgttcccagaggggcaggagcatctggggcctctggtggctcccagggtccccatgggaggagccctgtgccctccactcccaagtctcagttgtgccatctgtaaagtgggggccgccagggaggctggaggaaggtgacgggacttcaggccttggaatggggctgagtgaggggttcacatggccaccccatccctctccacgctccacccgctggctgcatccaccaggcggtgtttctgggtcacatttgctgcaattcaggtgctaatgggggcaggaggctgcagggggaggggccggtgtctagtggggcagatgtttctcaatggagaatgctcacagcggcctgcagagggggtctggtgtggcctggggctcctggggttgggatttacacagtgagcctgggctttggggcacagctgctgctgacagagggtcttggggtctgggaaggtgcttaaagcccggcccccatgcctgagctcccacacccctgtttagggacacccagatagggtgtctcctgcaggaaattccccacataattcatttatttaaaaaatattttttgccgggcacggtggttcatgcctgtaatcccagcactttgggaggccaaggtgggcggatcatgaggtcaagagatcaagaccatcctggccaacatggtgaaaccccatctctactaaaaatacaaaagttagccaggtgtggtggcacgtgcctgtagtcccagctactcgggaggctgaggcaggagaatcacttgaactagaaggcaaaggttgcagtgagcccagataacgccactgcactccagcctggtgacagagcgagactccgtctcaaaaaaaaaaaaaaaaaaaatctaaatagcctcccacccataccccctgatcgagggcaggccccaggagccaggctggattt

SEQ ID NO: 82067 - DNA, 1093 bp, Homo sapiens
cgcgccttaccgcccccgggcgctcgaagcgggctaaagcctcactagctgtcagcaacgtcaaccggaagcgccatgtgccggtctgtaaacaccgcccggtcgccccgcccccggctccgcccccggcctccccggcccagcgcccgcccccgccgcctcttcattgggcgaccagctttgtttaccttatatggccaggtcctaacaccccgaggctgtccattggtcgaggcacgacctcactcagctgacgtcaccgggaccaaacgatgcaaataaaccgaggcattctgggaaagggagtttggggccgctccggaactggctctgccgggccttggcgcccgcccgctaagggccgagatttccggcaaagagcacgagattttgcgtgggaaagcgggagaactgctgggagggggaccccgaagcaccagaggctgctggccccgccagcctgtcccaggcgccgtccagagggtcatggggctacagtggggcaggcccagagccaggctaggaaggacccatgccacgagtgggcgatgagagattgagtgaggagagctaggaggctagctataggcggtgacgtgcggcggagcttttaagtggctcattcattcattcactgaacgagtatttgtcggcgcctacagtgtgccgggcctttcagcctagaccagccgatttgggccaaaattcctagagacccctctcttaagggcgtgcctactatttaacacagagcgatgccaatcacagaggggttcagggtccctaggtcttagcaaagacgcctgtggcccggcgtttgcgcccatgcacagatctgtatgccccaccttgggaccccaattcgtgccagagcaggggcacgggtgccaccgagagcaatgagggcgacatggacgtgcctggctctggtcacggtctggacagctgcgcacagtaggcacttagcgttcagtcacagtccccggggcatggcaaagacgtctgtggcctggcgtttgcgcccatgcacagatctgtggccccggcctctgggctcctaattcccgccagagcaggggcgtgggtgccaccg

SEQ ID NO: 82068 - DNA, 1063 bp, Homo sapiens
ttggatggaatggagggaattgcctcaagctgcggctcctacccgggcccctcaagcctgaccaaggactctcccattgggtggtgggaggaggacagtaggggaactagtggactggacctgaaatgtcctggggtgggagggtagggtggtggggaaggcttggggcactgagatagcggagagggctggggagggaagggagtcagggtgcagtggagttggtctctgagggctggggctgggagcctggcctataggcaaggggcggacactgagtcttggcttttcccaggcaggcacttagcctcggcagaagccatctgaccacgggaaatacagtttaaaattctttcctgctgtttgcggatcacttaggggccacagtattttgtaaaccctgatggttccaagagatgtttgctcttgctaagagttgctccttaacctttgcaaagctcatatgcatgaattaatatgggcaaagtgctccacagggtaggcccacagtaaaaaccagctctgaatatgattcccgctataataattaccactaggacgacaacacagtgtggtagaaggtgggcaggttcgggagctagacagacctgggtgtcaggcttgactccgctgcttaatgacttaatgcttaatgttgagcgagttaccagagctctgggcttcactttctcactggcggggctgagttctggcctcactgctgtggaagattaatgcctgtaaaatgcagagtgcagggcctggtgctatttgcacggttctagtgctctcacctgtttgcctccatctggaccactctgggaagccctagccctattttacagataaaactgaggctggaatccagccttaccctctgacattcagaacctgtggagaagagcgggcacccatggtgcatttctggcaagggaggagggacactgtcccggcagggcccactaagggcttgccttgcatagggaggcaggaagtgccttcacccctccttccaccatcgtccaggtaccactcagctgcctgcccaggcttgcccagctca

SEQ ID NO: 82069 - DNA, 1023 bp, Homo sapiens
gaccagcctggctaacatggtgaaaccctgtctctactaaaaatgcaaaaattggctgggtgtgatggtgcatgcctgtaatcccagctactggggaggctgaggcacgagaatcgcttgaacacgggaggcaaaggctgtagtgagctgagattgtgccacttctctccagactgcgcgacagaacaatttaaaaaaaaagaggaagactggatcctggactgtggtctctggaagggtataagaagcatttccacatggactgtggtgaattgaccattggagactcagtctgccttgccctccctagctgctttcttggtacagcaggcttgacttgggaaatcactctgctcagaatccaagttcctcaactgaaaagtaggtaaaaagcgatctatttgcagagctgtgtgtgactcaaaagccagggaacaccttgcacactgcgaggttttcattctgaaagcgattcttgcaatcttgcccgcagcgccatttcatgcggctctctctcctctgtgcctcagtttccctgtgtgtaaaatgtgggagagtctactgccttccgtggaggctgtgaaattatgtctttaaactaattggtccagacgtggggccaaagtatcgggattacaggtgagccactgcaccgggcctcagccttgtcagggggccggaggttgcttaaccccctggatcccagcttcctcatctgtaaaacgggctgatgcctatacagctctcagaaccacacctggttcagaagtccccaaatggtagtcctcaaattctggccaaggccaaagcaggtgcttcacttcttccgtgcacaccctgcaagtgggctccgggtggcaggtgcagctacgccctctgccggtcggggcgggagacaaactcaggggagtggggagaaccacagcgactcagggagctatttcagagggggcaagtggaaggcgctggggctccaggagagtctgtaagcgaacagatgaggaaatgaccaaagagttaata

SEQ ID NO: 82070 - DNA, 1022 bp, Homo sapiens
agaggacccagccgatactcgggcctctgtgttatggctgagggacgtaagacaccaaggaggaagtgactgccaagatctcagctggatggaagcatagttgggaccgggaccagctgtggggctcccacgtagctttgttcccagctctctttctgcctctattgatgagttatgtgttgactgggagcatctagctccaagtctcaccctccatctcctcgtggggttctttgtggtggaaaggagagaaggaagaggagagagaacttgggcatcatggggacatctagattgggtcctcagatcctggcgtctcatctgatctgatgtctcagtctcctgggtgtctccggacacccacaggccagatttctctgagtgtgggccaggtccacaagtgggggaggactgctagacatgccagggcctgcctgggaccccttggggcctgggaacctgcattttcaacccattccccatgtgagttttacgtccactcaggtttgaaaaactgctctgcccaggttttgtaaggtgtgactaggtgagggcctggggccactgggatgaagtgaggggaaccagcacagtttgggggcactctgaaggggatggactcagagctaggcagaacgcactgttgcctgcctgctggggagagcacagctgtatcccaggcccagcagcgggtcagcctggcctttgggtggttccaccctggggtttccctagaggttccgagggctgatggccctacatcagatggagcagtttgctgttgtcctctttcatctctgatattcttccagcctgcctctggctgagtgaccttggtcgaggttgcttaaccccctgggtcccagtttcctcatctgtaaaacgggctgatgcttatacagccctcagaaccacacctggctcagaagtccccaaatggtagctgctacaattgctcataaaggaagataagtgactagctaatgaccataatcatagtaagcagtggcatgacacagata

SEQ ID NO: 82071 - DNA, 1039 bp, Homo sapiens
gggaggctgaggcgggcagatcacctgaggtcaggagtttgagacaagcctggccaaaatggtgaaaccccgtctctactgaaaaaaaagaaaaattagccgggtgtggtggcacgtgcctgtaatcccaactactcgggaggctgaggcaggagaatcacttgaatctgagaggcggaggtggcagtgagccgagattgcaccactacactccagactgggcaacaaagggagactgtctcaaagaaaaaaaaaaaaaagaatatttactttccctagaacagtgggcaagagacatggtccaaaggagagatgcagacagctggctaacatcttcccctcgttgccagagaagggcacattcgagtactgtcatagtactcgagtactgtgagctgtctgttcagcacacatgtggcacctgctgcgtgcctagtgctcttccagggcttggggtgaaagcagaccctgcctctgctacctggtgggggcgtagacaattaatacgggacaaatgggtagaagagagaaggggcagaaagggaggctctactggagaggccatggctgaaccaagccatgataggtgggaagggggcccctccagaagaagctagaaggcagggggcctgggaacagaggaagaggtgagagggtgcaggcctcaggggacaggaggccggaagagccagtaaactttgggggccctggggcgggttgctgagctgtgctcgtaggaagctttggggatggaaagggtggggactgaggaaggggctgagggtgctcggggcagtgatggatatgggaagcctgggagagcaggttggggatgggcagccccagcgtgcaggggtctggcgttgaggctgcctggctggatttgctcagggtgatttggtcctggccgttgcgtgtgctggctgcgtggcctgcagcttctacctgtaaatgagaacagtgcacccagtatagcccctcccatgggactagatcccagggataccctctggggctgtggctgctgcaccctgacccg

SEQ ID NO: 82072 - DNA, 1334 bp, Homo sapiens
tgtaagttgtctatccgctgccccccagtgctccagctgtcaggggctgggtgaccatctcaagtgcacttgaagagagggtcccgctgctaccagaaaggctagagagagcagagagggtgccctgccagccctggctggtgtcaccctctcctagacccctgcgggctagtgatgagagaaatgccacagtccccccctctcaggacctggcacaaggccagcttcccctcccagcaggaatcacagagcaggaacagctccagtgccactgtccccctctgtcaggacctggtacgaggcctgcttcccctcccagcggggatcacagagcaggaacagctccagtgccactgtccccctctctcaggacctggtacgaggcctgcttcccctcccagcaggcatcacagagcaggaacagctccagtgccactgtccccctctctcaggacgcggtgcaaggccagcttcccctcccagcagggatcacagaaaaggacctggaggctccaggacctggaggctgtgcccaggcacccggacaccatccagcctgccagtgctccatccatttgagctgcagggcaagccaccctccctgcctcctgacaaggaaactgaggctcagacagaggggtgtgtccaggcctccgcatctcacaggagaaggctggggtccacctgagggtggcgtcttaactgtgccttttactgaggctgagcccgggcctcccctgtagtgcctccaaccatgctgggctctggcggccatggcaggcctcttctgcctttgtgtgtacagtggtggcccccccacgccccatcccatttctgagcttggtgtgcctttgtccaggagagcctgtggagccctggccacaggcaagcagggcggtggggtggaggggaggggctgtggattgtgaattgggttcctgcatggagttttatcagaaatgaaactgcttgaggcacctgtcttagggatgcactcgtgcctgtggctaagacatgcagaagggcggtccttgaagcagtgttgggaaaagtgagatgttggtgaccatctgctggtgtcccccaggggccctgactgaatcagtaaaaccaaagcgggacctgtgtggtggttcacaggacacagcccctgatgtgtgcagacgcatgaaagagcagtgttgacgcctaccccgtctgaacgttgaggaagagagacccgcgctgcatgtgggcaccattgtgcctccgccttccgggagtgatctgtgggtctctgctggggcggacagcaggcctctgggagcaggcgtgagggttggggaagatgcatt

SEQ ID NO: 82073 - DNA, 1012 bp, Homo sapiens
tttttttaaacagggtctcgctctgttgcccaggctagagggctgtggtgtgatctcagctcgctgcagccttgacctcctgggcttaaggagatcctcccacttcagcctcccgagtagctgggactataggcatgcaccaccacgtctgtctaacttaaaaaaatttttttgtagagaagaggtctcgctatgttgcccaggctggtctcaaactcctggcctcaagtgatcctcccaccttggccttccaaagtgctgggattacaagcgtgagccaccgtacctggccaagaggcttttcaaagggtacttggagtgtgttgagggagaacattgtagactgaggccagccctgtagaattctgtagagcctgctgccatgccacgggctggggctcccacaaggagggctgtctgcggtagactgccttcgccctggggtgtgcagagatcagcaatgttgttacctcctcgggctgtagctttttcctaccaggctcagtgtccttgggtgtcacctggcacatgtcacagacccccagtcctgctgctccttccgccacctgcctgcggcactctgaccctgcaggctgggcaggccctgcttcctacaggagccttttcctgacaccactcaggacaaacatctgttgttcccacttgatgttcacgagggcagcactgtcctcttgggtgtcttggcatccccagagctgagtttgatgtctggcacagagcagacactcagaacactggcaggatggacgaggggttgctgcccacctggcatgggtttctgctgagaacctggcggaggtggtgggacgcacgcttgtttgatagtgccttggtgcctcggtggccccgcccccagtgtgcactgacgttcatcagcaccctgccgttgcaggtctgcgtggcaccatcctgctgcctaggagtcggagggggaaaggatcccgtgtgacaaggcccagcctgcctgctgcgggcttcacgctgcctctgg

SEQ ID NO: 82074 - DNA, 1370 bp, Homo sapiens
acccacctccagccccatgtgcagccgcagcccctgagagctctaagtgcagagtccagctcttacctgtgatctgggtctttctagagcaccccagggtcgggggttctgttagctgggtagaggaccctctcctctgtgtgtcctgtggcgaggctgggtctgttctctcccgggtccaggaccacagactgtggtgacacaagtgccctgggcagagggcagccttctgcctttttagtactgggctccccagctgctctccccggcccggactcgtcagaagccacggtgactattgacacatctgcatcctctggcagaggcagatgggacatctctggcaaaatggtctattctgtgcttgaagtacagaacccagtgggaaactgctttatttttggagtccaacattctggaaatttctgttagaacccaccagcctcactggaaaattctgagtgctgatggtggttgactgagaagggataatgagtgttgttgcgaggtctccgatctcaagccgtaattaaccttgttgaactctgagcggtggtgtgtttccctggataccgccgggtgtgcttgttctatttcgttcctgcgtttttagagctttgcggttccctgtgtgtgcaccactgtgcgtgctcccgctctgtctttctaactcagccgggcctgggagagcaggaagctgttttgtctgtcttgattcttgctgccaggtgatacttctcggtgtgcaggaggcccttgtccatcatctgaacttggctgattggcattcagcttgagtgtgcttgagaccaaccgaggagagttgggttctgtgggtcagcagagggtccccgggctgtgtgttctggaggcctcagatagttgcacagccaggcctgaggccgtgttttcagaaatcccggctctttcgctgtcaagtggccccacccttttttttttttttcttttttctttttccagctgtgggcatggattggctggggcagggtggccaacccaggcggccacgcaggggtgctcagaggcgccagcttgaccaccttaacctctttgtctttctcccctgcagcacatggacggcagcttctctgtgaagcctttaaagcagaagcaaattgtaagtcatcagaggaaatatgacgtgcttgaattaaaagacacacatatacaatcactcacacgcatactcatacatagacacacactcatacacacgcacatatactcatacacgctcatacacactcatacacattcacttgcacatatatacggacacacatacataccatcagacactcacattcacacatatatagacacataaacacacagacacacacatacac

SEQ ID NO: 82075 - DNA, 1050 bp, Homo sapiens
ccattaacttggttttttttaaaccaaagataacgggtaccctgaccctcaggaagatgtgtttcttaggtgcatctgttcctcattttttctttaggtctgaagaacagaaagagaccatgttctcatgatttgggtgggtgaggggcacagaccctccccctctgccaggtgctgagtttgcactggatttgagcctggtgattctgctctggggcaacctccccctcccctctggacttctctttgtcatgacagcccccagggtagggtggagtggggtgggacagctggggacaggaagcaggagccgtactctggcctttgggaggctgctgacccacaagcccttgtcccggcagccctcggacgacgagaacagcgacaacagcaacgagtgtgtggtgtgcctgtccgacctgcgggacacgctgatcctgccctgccgccacctgtgcctctgtacctcctgcgccgacacgctgcgctaccaggccaacaactgccccatctgccggctgcgtgagttccccggccggctgttctgtggaaggttctggaaattagggactggccacaccacggtggtcctgggatagggggccacaggtccgttgatggctaagaaagaagagttgtcattcatctagtctgtgctgaacgtgggcgtgttggctgtcggagtcagtcaccgtgagagagctggcagggacgctagcacggggcattcagatcttcacgtctgcctccagccaggcaaggcttgcagaacaaagggctacagaggcgctccagggcagatgaactgaacgaaaattgatgagtgaatgaaatctttattcttattttatttttattattttttgtttgagacagtttcgtgctgtcgcccaggctggagttcagtagcgagttctcagcttactgtaacctctgcctcctgagttcaagcaattctcctgtctcagcctccctagtagctgggattgcaggcaactgccaccatggccagctaatattttacttttattagagatggggttttgccat

SEQ ID NO: 82076 - DNA, 1050 bp, Homo sapiens
agccacggagatggcgccaaacagcccccaaaggcacatgtgctctccgtggctcagaactgaggccgtgcaggctgacctgctggcattcagcagcagccaactccaagagcggggcccagggcccaggagttcacctcaggctgccccgatgtagactcggcctctcctctaccgcctccacagatgacgactgcctgcccccgtctgtgggcctgaagaaggcccgagaccctcccctgtgggtggggcatgagactcggagtcctggcctcctctgtgtgggcctcctctgtagctgtcccaatccttcccaggcctggccacagaggggaggcgcagcctctgagatgctcccccacagggccaccctgcaggatcagatatcatgttcgtggctcccagaagctgaggtccttctggcctcttccccgatcaccccccaagtttttaatcagaatgaaatatttgagatcctctgaaagaccttactcgaattctgtgtcactttaaggtaagctggtcctaaacacaccttctgctgtgagttgttcggggcaggccgctgtggtcatcagggcaccagaggcagtgcctgctcctgcacctgcgacctgtcacgcccagcccatgagcacaggccactgctcagccagagtccgggggcacaagagcccctttccaactaaagcacgtcacaaccacccaatgtcaggcccaggtcaccaggtgactcaggaggattgagcaatggtgggccctggggccaggaagcgggtgaagcctggcagccgcgagggaagagccacactccctaagcagtggctctggggtcatgtctgaaagcaccgtggctgtttatcgcagttccagagccgcagacagcctcgtggcaggtgctgagacactagtctgagagcccccattccctcccggtctttagagcttaggattcgaaactgaggatcttatcccagcagagcagagcacgaaggtgcttggctgatggggtctggggcccgagcctccgggaaaggtgagaagagcaac

SEQ ID NO: 82077 - DNA, 1500 bp, Homo sapiens
ctgcttagggagtgtggctcttccctcgcggctgccaggcttcacccgcttcctggccccagggcccaccattgctcaatcctcctgagtcacctggtgacctgggcctgacattgggtggttgtgacgtgctttagttggaaaggggctcttgtgcccccggactctggctgagcagtggcctgtgctcatgggctgggcgtgacaggtcgcaggtgcaggagcaggcactgcctctggtgccctgatgaccacagcggcctgccccgaacaactcacagcagaaggtgtgtttaggaccagcttaccttaaagtgacacagaattcgagtaaggtctttcagaggatctcaaatatttcattctgattaaaaacttggggggtgatcggggaagaggccagaaggacctcagcttctgggagccacgaacatgatatctgatcctgcagggtggccctgtgggggagcatctcagaggctgcgcctcccctctgtggccaggcctgggaaggattgggacagctacagaggaggcccacacagaggaggccaggactccgagtctcatgccccacccacaggggagggtctcgggccttcttcaggcccacagacgggggcaggcagtcgtcatctgtggaggcggtagaggagaggccgagtctacatcggggcagcctgaggtgaactcctgggccctgggccccgctcttggagttggctgctgctgaatgccagcaggtcagcctgcacggcctcagttctgagccacggagagcacatgtgcctttgggggctgtttggcgccatctccgtggctgtcagccttgtcagcacaggtttctgtgtgtttttaaatccatgtggtggcccctctgttccactgactttttcacatcacagagcccttgactgtctatccgtgtctgtgcgtaaggcatgaacacacgccagagcctttggtttctcataggggtgcagccgctgcctggcggggtgggcggcatcactgaaccctgctgtccctgtagatgggagggcccatgagatggtgaacactgggggccctggtgtcttggacttggccctgagctcggtcctgtctagcctcagccccccacccagggccttcactcctgaaaccagaggtggactgcgcccgttaggtccttcatgcgcccttccctaggctgcggcagcgggaggtatgggagggaggggcagggccagtgcgctcctccgcgttgaattctggctgcgctctgcctcccagctgtggttctccttgtggttctctgtggttgcagcagagtgtttgtttctagacggcctcgaccgtgtccccaagctggtgcccttgctgtggctgtgctggctgctgcgcgcttgctaaccgagcttccgtctgtctctccccctctccgcgcagccctggggcccgactcctgctctgttggtatagacgagtaagccggtacgtgacctcccagacgcgctt

SEQ ID NO: 82078 - DNA, 1045 bp, Homo sapiens
agattgaaacagtcagcacctttcagacggccccggcctgcgcatcggtggaaggtgccgtgcgaatgtcacgattcaggtcaagcttccggagctggggagtgcaggtgtgatctagaacagggctcacagcctcggaaacctgctctcgccgcggcccccgaagaaaatagacgcccttcaccggagagtggggcctgggccgtgtctgctgggagccatgtgtcagggctggtggctgggtgtcaggcagccctgaggccatgctggccccgtcccaggctctgcaccagcaccattgcccaagccccagggacgccagacccatctggggacagcgcccggcggcgtcgtgcaggccacagtctgggcattggggctctgtgggaggctcctctctttgccttgcagtagccatccgggggctactctgagcacgggcttgttctcacccagggccgctccccacccctgcaccctgggttgaccgagttccaccctaacccagccgtaagaaccttggcaggacagtggctggccacatcccaggaaaccggaaccagggcaagggcaggaggcccagagggcatccaccgcggtgccgtgtcgcgctctgactcggggctgcagatctgctgtgggtgtccggggatctgggatcgtctgtcccaagagggacacagcgtatttggcacagttagggagtccccgggcccttggtgtgctcacatctgagtgaatgctgttgtggccacaggcggcgggagtgggggtgctggatggcccagcccctctggggctccagatcggtaggagcgggtggcgtggcaccaggcatccgagtgtgaccctcctccctctgctcccacctgcaggacggcccacctccatggagacggcccacggcctcgccaccaccagccccacctggcctccacttggtggccccagccccgatcccagcgccgccgagctgaccccactctgagagcctggccgagctggcagcatggagccctcggctccccagactttgccgaggggc

SEQ ID NO: 82079 - DNA, 1056 bp, Homo sapiens
gtggtcgcgcgagtgcaccgcgctgatctccacggcgtgcagctgctccagcgtcagctgccgcgcgtacaggtgcgccacgacgcggtgtgggccctcggtcaggtgcgagctcaggtagtcggcctcggtgaggcgcaggcagcccaggcccaggcccagcacccggttcaggccgtcctccagcgaccagaagcgccggtccacgaagcccccggggaagcccagcagcccgtcgaaacgcatctgcatctgcaagggagcgcgggtcacagccgcggggtcgacggacgcccccgcccgggcccgcccgcgccggcaccctcgcccgcgccctcgcccgtcctcaccagcaccgagaagcgcatggggatgcggccgaagagctgcccagggttggcggcgtacagcatggcgtggcacgagtggctccagcccggccctaggcgcatcgcctccacccggctgatctgcttcagctccggaaccgccgccgtcgacatcttggcactgaccccgtccccgccgctgccacttaagagcatgcgcgagcccgcccccgccgtgcctcgccaatccgcgggcggccgcgcccccgggtccggttcccccgccaatcgccggcgcgccccgggaccgagcccctcgcagcgccgcggtgcgtcgtcgagaggtgctgcgggcggtgtgcaaaggagggcggtgcgcgtcagccgtcacccaatagtcgcacaccctgggcggcggccccgcctccgacgggagagcctagacgactggtcggtgccgtggtggctcaaggttgacattgtgggcgacgaacatcttccttggcgccccaaagcggacagccgaaattccctgcggtttctccaccctcgatggcgccgatccccttgcgcccacccgtttctccccaggaggccgacccggcccgcatggccccgtccatccgcaatggcacccttggcacgaccacacgagccagagatgccccggagccttgctccgccagcgccaccggacccaagcccggagggagatggccttcgcctg

SEQ ID NO: 82080 - DNA, 1844 bp, Homo sapiens
ggacggggccatgcgggccgggtcggcctcctggggagaaacgggtgggcgcaaggggatcggcgccatcgagggtggagaaaccgcagggaatttcggctgtccgctttggggcgccaaggaagatgttcgtcgcccacaatgtcaaccttgagccaccacggcaccgaccagtcgtctaggctctcccgtcggaggcggggccgccgcccagggtgtgcgactattgggtgacggctgacgcgcaccgccctcctttgcacaccgcccgcagcacctctcgacgacgcaccgcggcgctgcgaggggctcggtcccggggcgcgccggcgattggcgggggaaccggacccgggggcgcggccgcccgcggattggcgaggcacggcgggggcgggctcgcgcatgctcttaagtggcagcggcggggacggggtcagtgccaagatgtcgacggcggcggttccggagctgaagcagatcagccgggtggaggcgatgcgcctagggccgggctggagccactcgtgccacgccatgctgtacgccgccaaccctgggcagctcttcggccgcatccccatgcgcttctcggtgctggtgaggacgggcgagggcgcgggcgagggtgccggcgcgggcgggcccgggcgggggcgtccgtcgaccccgcggctgtgacccgcgctcccttgcagatgcagatgcgtttcgacgggctgctgggcttccccgggggcttcgtggaccggcgcttctggtcgctggaggacggcctgaaccgggtgctgggcctgggcctgggctgcctgcgcctcaccgaggccgactacctgagctcgcacctgaccgagggcccacaccgcgtcgtggcgcacctgtacgcgcggcagctgacgctggagcagctgcacgccgtggagatcagcgcggtgcactcgcgcgaccacggcctggaggtggggccgccgcccgggccccgccccccgccccggggtttggctctggccccgtggaaggcaccgatgggtaacacgtctcctgagggtcccctggccgggctgggtcgggtgtcgctgtctccagcaatggggtggggagaggggtctggggctgggaggccgggaaaggaggggcgggggtgggggccggcgctggggctccctcagggctgtgttacatccgccttgctgcctgccattgccaatcctgggagtgggggagtgggatcggtggggaggaagggatgggggaggagcggggattgcttggggagttgggaaacttgagcacagcgggggttgtaaaacttgggaacctcatgttgggcgtgaaggctcttgggatttgtactttgtggtctggaagggctggactgcgggtgttcaggcttcgttgggtggacggggggagcatggggtgcggaccccggggtggggtggcctgggtacgaggggggggagtgcatggggtcagcctccacacttgcttggggaggagggggctgcactgctccgagggagctggctggcttctgccaggccctgcgtgggtctcccattaagtccttggcaaagctggctgctcataccctggcctcatagcttccaggcccctcctgctggaggtgccattgtgtggcaggcctggccccaacccctacctcctgtctgcgcaggtgctgggcctcgtgcgggtcccgctgtacacccagaaggaccgagtcggaggcttccccaacttcctgagcaacgccttcgtgagcacggctaagtgccagctcctctttgccctcaaggtgctcaacatgatgcccgaggagaagctggttgaggccctggctg

SEQ ID NO: 82081 - DNA, 1139 bp, Homo sapiens
gctcccggcctcctcttgagggctgcctgagctggtggcaccctcccctgggccggaagactgggaattcctgctaagtgtggcttctagagtgtttgtgtgtaccccgcttctgactgcctagggcgagtgggcatcctgtcatcatctccactgtcccaagcagtcactaggtggcggccgggccagctggaacccagcccatcctctcaggcagagcagggtggtccgggcacactgggcctgcctctccagcctcaggatgctcttgtttattctgggctcagaccctcctcttgtacgtctcatcacagctggtagagacccaggagtgcctgattgtcccacaggggtggcgcacagctctgggaccactcagaagatgggatgtgtgggtggaggatgccttgtctcggtcagctcattcctgcctccttcctgagccagttcagggcctgggggagagccagcttggggtaggaagttaataatactgttaatttgggttgttgttggatttactttgctagattttctctttcaccacgtgtgaactgtgggtgaggtttcaaagtagcttcaccccacgtggcttggttcccagggacagtcagggcctcgggggcccagctatgtacaacgaagctgtcgaaggagaagacaataaagtcgctccgcagctgctctgtgtgtttctcagctgccctgtgtgtttgttttggttctggatggaaccagctcaggccccctgccctaggtgggggagggaggagctgccccagccaggggcacgtttgttccccagtgtttactgggggcactcccagcatgaatgctgtgcccatcagccaggttggggcgtctgggccgagaccttcagggcaggctccccttcctgatcctggtggccctggctgcacctgggctgacctgctttgctttgcaaacccaccattccccactgtctgcaagcagctccaggggatggtgtagaagtgcaggcttactgtgcagaaggacagcagcagagccatccctcgtggtctcctacagccccacatctggaaagactccagcggcatcgtcagaaaatttgcacagcccatgcctggcccggtgagggaggcagtgtgcccagc

SEQ ID NO: 82082 - DNA, 1040 bp, Homo sapiens
tccgagggaggcaaagggacccctttccagggaaagcgggtttgtgtctctctaccccaaggctgacctcggggctggggccataacgggtgaggggcaggtcacatcctgcagctgagaccccggggcagcaccacccagccctcctgagcctggccgggagaggctcaaggtcatcattcctcagggcaagcactgtgcttagtgacccagagcctggagaagctgcaggtgctgaacgggaagaagtggcgggagacctagcctgcgggccggtgagtgtctgccagcctggatcccgcgtggtgggagcagcagggcctgtctgggcggctgcaggtgtgggtatgcacccacctgtccccctcccttctcaccggggctttttctttcagaatctgacgttgggtgattggtccaccctgaagctgtgtgccagggagtgaggaggacagtgagcaggtagctgccatgtgcagcccaggcccagtgggggccagaggatcaggccccgggagcagccggcagacagaggcaagacgggggctgcggccctggctcggcagctcgggccagcactgaggcgggacgagggcctcacccagaacctcgtggtgaggcccagagttcatgggctgccctggcccataccaggcagggccctggggggaaagtgtatccatatacacgcacaggtgccaactgaggtgggaccttaggaatgaggactggggcacctggaaaatgccattttttggaaaataaaatttaagaacagctagtgaagggctcagttctggtcacatgacatgaggcactggccaatgcagcaaccctgactgccctgtcctctgctgttcaggggtgtgtcttttgctcctggagcccagacaactcaagataaggctttgagagccaagaacatccccagcccgccgtagcacagggcctcccccgggacatgctgctctcacaccgagctctgagatggagctgggcacactgcctccctcaccgggccaggcatgggctgtgcaaat

SEQ ID NO: 82083 - DNA, 1871 bp, Homo sapiens
cattttccaggtgccccagtcctcattcctaaggtcccacctcagttggcacctgtgcgtgtatatggatacactttccccccagggccctgcctggtatgggccagggcagcccatgaactctgggcctcaccacgaggttctgggtgaggccctcgtcccgcctcagtgctggcccgagctgccgagccagggccgcagcccccgtcttgcctctgtctgccggctgctcccggggcctgatcctctggcccccactgggcctgggctgcacatggcagctacctgctcactgtcctcctcactccctggcacacagcttcagggtggaccaatcacccaacgtcagattctgaaagaaaaagccccggtgagaagggagggggacaggtgggtgcatacccacacctgcagccgcccagacaggccctgctgctcccaccacgcgggatccaggctggcagacactcaccggcccgcaggctaggtctcccgccacttcttcccgttcagcacctgcagcttctccaggctctgggtcactaagcacagtgcttgccctgaggaatgatgaccttgagcctctcccggccaggctcaggagggctgggtggtgctgccccggggtctcagctgcaggatgtgacctgcccctcacccgttatggccccagccccgaggtcagccttggggtagagagacacaaacccgctttccctggaaaggggtccctttgcctccctcggaaacaaaaggagcgctcagtcgtctggtccccggagactcacccatctcacggacacggtcctccagggctcccgagagctcggggaggctcatggcctgcagggacgcttgccagcccttggagtctgtggtgcaggtgcagggaccgagttagctgggggtctgcgtccccacaggccctgctttattctgagcccatgcaaccaggagaacctgcttggatcagaacctccctacccgcctgacagtgtctaagcaacctcccaaggccgaggcagggaagccctgttgtgcccttcctcccacaggctgagcaaacactacgaggcccgggtcagcccgagagaaggcaaagctctgccggtggggacccgggtctgggccctggctggaggctacagaagtcactggcggtctcagcacagcacagccagccaaggcacagggcctttctcgagtacctcctacccctgggggataggcagttttcctgtcacaggtgaggaagtgggcttgggtccccagggccccctcttttccttggactctgggatcatgtgcacacagggacctgggagagtggctgccggccggagaaccaggccaagcccactgggtcaaacctggcttcagggctcccccaccttcccctctgcccagtgcggagtcaggccactgctcttaccagctggggggacggctaggcccagagtggctgcaccagggggctggtcctgcctcactcgagatgacagctcagcttgacaggctctgccagacacagaaacaaatattggtgagagcagaggcctggccgctgcagagcccccacctcagaccttctaggggagggaggggctcagccctgtccttgcagctggccctcatgggctgggccagtgccccatgaggctgcactaaagagcaggagggcgaccggtgcagattcccggacccaactcctgcctgggtctgcctgcaggaaggaagggcctgatgaaatgggggtggggtggctccagaccctgaaatccacccctcagttacaaaatcaggaggaaaggatgtgtgggggcccaggggccaggtggctgaccactggagacccagcccagggcagctca

SEQ ID NO: 82084 - DNA, 1081 bp, Homo sapiens
atagtgcccaccgtgtgccaagcactgctccgggtgcttgggatttatcagtgaacaaaaaagacagaagccctgcccgtctgtatagaggggagggtttaggacaggcaggaagtttgaaatataaggaagcaaccgctgcaggccccaaggagtgccctggtggaggcggctcagcccggggcacgcccatgcgcagcacctcggtgagggctgcaggcggacgccctgtcttcccgccctcagaggaacatgctttctgtgccaacctggggcccgtccagagcagcagcagcagcgagggcctggccagagcccaggggctcagcagcgaagcttctgtggagagcaacgaggtacggattctttctttcttggtctcccatagccggtccctggctgggatgcctgacatcccccagttactttaagatgagcatgtatgtaagaagcagctgctgcacgtgtgtgctgcactgggacgtgctgtgtccagggtctggcttctcagacgacagcgaacgcaccggaagcccctgtgtggcgggtggggggtttcacgaagcctctcaagcccctgtgtggcgggtgggggtttcaccaaggctctcaagttagcccgcgcactctttcagatgcacgcctctcactgcaggactcggatcatgcctgtaaaagctcagctcgcaaacaagctaaaagttacatgaagaccaagaatcctgacagccagtggcctccccgcgctgcaactgacagggaaggctttctcgctgagtccagcccccagactcagagggccccctactcaggaccccaggtaagaccgcttgtgaaactggaggttacactcagagacggcactttttgtgacttaggaggcatgtgttgtgtatatgacgtgccaggcgctgctaggagaacagaatggcggtggcatccccatggcctgttaggctccacaggctcacagccggctccatggctggcagccccgctgcagcgcttctactctgttcctctccacggaaaggacctgtctccctgctttccatactggagttggcctccctgagcctgg

SEQ ID NO: 82085 - DNA, 1050 bp, Homo sapiens
catcccgcctggcctagcctcgccaccagctttggtgaaccccacatgcgaggcggctggccatgtctagcatatcttgcgtttgtttaggagagagttagatttgaataagaagaatggtggtggctggaccccgctgatgtatgcctcctacattggccacgacacaatcgtgcacctgctgcttgaggcgggggtgagtgtgaatgtgccgaccccagaagggcagactccactgatgctggcctccagctgtggcaacgagagcatcgcctactttcttctccaggtgagctacgagggaactcaggcccagaaacctgaggggctccgtggccaccctgacagagatgcgaaccactgcaggccacggtgttcgtgtgtgctcgtgtaatcacttctgattcttgcagcatggccgcctggagggcgcccgccccacgcagaggagatgaggccgtaacgcacgttctgtgttctcttgaagcaaggtgcagagctagaaatgaaagacatccagggctggacagccctcttccactgtaccagcgccgggcaccagcacatggtcaggttcctcttggacagtggagccaatgccaacgtgaggtgattgccacatctttagtggccacaggagtggcctaggtgtcatctgactctaaggagggtggctctggaggcagctaaccagagtttagggccaccctgcttcggcacgagaggctcaagatgaggggtaggaccagagtccttccaggcacaggccttttcgtacatctgtgagatgcatctcttcaagccctctcagcttccttttctttatctgaaacccacctgggtcatacagttgtaagaattacatgttttattgtatgccaggggcctaacatactgaatggcatttaaatgtcatacattacatgcaaattccttccattttcttgctttttgtatggatgaggtgaggtgatgctttgaaacagtcatgaggccgggcgtggtggctcacgcctgtgatcccagctctttgggaggccgaggtaggca

SEQ ID NO: 82086 - DNA, 1462 bp, Homo sapiens
cgttgttccttccccccgctgacttggagggaggggggcttctggaaggagcactgggccgggcctgagtgggcgctaccagctcccctccttccctctgttccacaggaggcctctctgcgcttcactctgccgggctccggcactgaggggcccgccaagcaagagaacttcatcctaggcagctgtgggtgagcctgggctaggcggaaaccggggaaatgggtaccttggggggtaggaggcatggccatagccctgtcctgcagaccagctggttgtgcgatgggacaggaggggcagcccgccgggagggagggctgggtggtgggggggtgaccacaggcaccgctctgacgccacatgttacagcacagaccaggtgaagggtgtgctgactctgcagggggatgccctcagccaggcggtgagtcccccggccctgtcccctcccatcctgccaatggggaagagcatgggagctcccactttctctctgtacaagccctgcgactctgggcgggacccttgatctctctggcctcagttttctcctttggaaaatgacagcaaccctcacaccttctcccgggatcggtgtgcagattcagtaagaggtgcaggagaggggttctttgcacacggcctggcctggcgtccggaccagtgaaacatgggcattggtggattaggctggccacacatcacagttgaatcagccaatgcctgaactccagtctgcacccgactctgtgccaggcaccaaggcgtggggggaggcccccctcctgggctccatctgttgccctttgtagacactagatgcaccccgttcgcacagagcctcacagaggctgcctttcctcttccccttcccctttcttcacctctttccatttcacttctttgtggctcttcttgggcctggtttcctgtttcctgacctccctgttcaacccccaaacggccaaggcattgggagaccctctgccctatacagcggccaaggcctgaaccaccacacaccccatttctgccctgggcttaagggctcagagtggctgtggcaggaggtgcccccccactgcccagctcaccccactcttgcctgtcaggatgtgaacctgaagatgccccggaacaaccagctgctgcacttcgccttccgggaggacaagcagtggaagctgcagcaggtgaccccgcccctcctggctagtgctcagccacaaggacaggcggcagcaggcctgccgcggggcctccctggagagggactagccctggggatctgtggccacagcaagcctgggagggtgtttcctaacagcaaagctgggggcaggcgtttcctgaagccctggaggctgcgccatgtggggaggtagagaacctggcctgagagccccgagggccacatcgggactgtggagtccccacagcagctggctggatgagatgg

SEQ ID NO: 82087 - DNA, 1179 bp, Homo sapiens
cctacatttgtccttggataggggaccggggggggcttggaatgttgcaaaaaaaaaagttacccaagggatgtcagttttttatccctctgcatgggttggattttccaaaatcataatttgcagaaggaaggccagcatttacgatgcaatatgtaattatatatagggtggccacactagggcggggtccttcccccctcacagctttggcccctttcagagattagaaactgggttagaggattgcagaagacgagtggggggagggcagggaagatgcctgtcgggtttttagcacagttcatttcactgggattttgaagcatttctgtctgaacacaaagcctgttctagtcctggcggaacacactgggggtgggggcgggggaagatgcggtaatgaaaccggttagtcaattttgtcttaatattgttgacaattctgtaaagttcctttttatgaatatttctgtttaagctatttcacctttcttttgaaatccttcccttttaaggagaaaatgtgacacttgtgaaaaagcttgtaagaaagcccctcccttttttctttaaacctttaaatgacaaatctaggtaattaaggttgtgaatttttatttttgctttgtttttaatgaacatttgtctttcagaataggattgtgtgataatgtttaaatggcaaaaacaaaacatgattttgtgcaattaacaaagctactgcaagaaaaataaaacacttcttggtaacacagctgtgccgcaggagtcctgcttccctcgtcctcggcgagatgggtgggaggagaaggcagcggcggggccggggtgggttttcgggacctccgcgtccggggtgagacggacttgggagtggcggcgaggtccgcggcagggttggaaccacgaccaatggagccaagcgggccaatagggaggaggagcggggacagactgtcctgccggccaatgagtgagcgcgagtggagcagagcgccctatcatatcctgggggcgccccgggagctccgcccccaagcgggcgccccaggctggtgccggccgcgtccctggccagccggagcaagcctgactcgtgcagccgccggccgcgtccctggccaggcggagcgagcctcactcccgcagccgccagtctggttccagggctcccgc

SEQ ID NO: 82088 - DNA, 1178 bp, Homo sapiens
ccgccctcacccctccaatcccccctctgaccccctcttcctcacatggggtcgggggcctgggagttcattctggaccagcccacctatctccatttccttttatacagactttgagacttgccatcagcacagcacacagcagcacccttcccctgaggccggtggggaggggacaagtgtcagcaggattggcgtgtgggaaagctcttgagctgggcactggccccccggacgaggtggctgtgtgttcacacacacacacacacacacacacacacacacacacaggctctcgccccaggatagaagctgcccagaaactgctgcctggctttttttcttccgagcttgtcttatctcaaaccccttccagtcaaggaactagaatcagcaacgagagttggaagccttcccacagcttcccccagagcgaagaggctgtagtcatgtccccatcccccactggattccctacaaggagaggccttgggcccagatgagccagtacagactccagacagaggggcccttggggccctccaacctcaggtgatgagctgagaaagatgttcacgtctaagcgtccagtgtgcacccagcgctccatagacgcctttgtgaactgaaaagagactggcagagtcccgagaagatggggccctggctttccagggagtgcagcaagcagccggcctgcaggtgagcatggaggcccggccctcaccgcctcgaagccatgccccagatgccactgccacagcgggcgctcgctcctccctaggctgttttagtatttggatttgcattccatcccttgggagggagtcctcagggccactagtgatgagccaagaggagtgggggttgggggcgctcctttctgtttccgttaggccacagactcttcacctggctctgaagagccactcttacctcggtcccctcccagtggtcccaccttctccaccctgccctgccaagtcccctgcatgcccaccgctctccatcctccctcctctccctcttcctcccgtggagacagtatttctttctgtctgtccctttggcccagacccagcctgaccaacgatgagcatttcttaggctcagctcttgatacggaaacgagtgtcttcactccagccagcatcatggtcttcggtgcttcccgggcc

SEQ ID NO: 82089 - DNA, 1141 bp, Homo sapiens
tgcccagagagcgctgggagaggggaggcctccagaagctgtgacttttctttccaggtgattgtgtccaggggggggcgctttctggaagcccccgtctcagggaatcagcagctgtctaatgacgggatgttggtgatcttagcggctggagacaggggcttatatgaggactgcagcagctgcttccaggcgatggggaagacctccttcttcctaggtaacacgcctgcacctgtcaggcctggagcctggggccacatctcctctgtttcacactgatgacagcgtcagtcccacacggcctttctgccggggaccctggggaaggtttcctttcacctgcatagtcagtgcgtggaaggaggaagagccagtctgtcgggggcaggtgaagggggcctcccctggagagaggtgggtctgagcagaggtgagggtggacagagaagccctgtctgtggcattcttgggctgtgaccgtgagtctttaccctgggcaggtgaagtgggcaatgcagccaagatgatgctgatcgtgaacatggtccaagggagcttcatggccactattgccgaggggctgaccctggcccacgtgacaggccagtcccagcagacactcttggacatcctcaatcagggacagttggccagcatcttcctggaccagaagtgccaaagtgagttgtttttggcccctcttcttgcatttggtgtttgattagagcagggtactaggtcagggatttagtgagcgtgaaagatgcccctccccagtcagtccctgaccctggccagaggaggttcagaaacacagtgggcgggatttggggatataggctgggagctgcagccctcaggtgtctaagggtgagtgaggagccaagaggcctaggctatgtggaactgagccctgagtatgttttaggtactgacacctggtggaccgtaagtagtttttagtttcaggtccttggcttttgtctgatactggctttttctcctcagatatcctgcaaggaaactttaagcctgatttctacctgaaatacattcagaaggatctccgcttagccattgcgctgggtgatgcggtcaaccatccgactcccatggcagctgcagcaaatgaggtagg

SEQ ID NO: 82090 - DNA, 1066 bp, Homo sapiens
taaaaagaaatgcacacactcacatagattctttttaaagataaatgggagcatgcgggaagtacttttctatcccttgcttatttcattgttcttcccttttcagctgatagaaatcaggaaatgagccaaaacagcagcaggattctgatctgaggtctgtagggctcctgagcatctgcccgggagcctgggctattgcttctcccttgtgtccccacagctggtgctgggccccagtggtgtgctgcaagggatccgccctgggaagtgctacgtggacatgtcaacagtggacgctgacaccgtcactgagctggcccaggtagcagccttccttgggctggctctccagcatcttttctatcagagcccaagacccaggcttacaagagtgggcagttaagttactctagagccaaagccagagagggaagaggagaggcgagtagccttgggactagcctatcccgtgctccaccttcaaaccgcagctagtctgaacagccatgggcagtcgctgcatggctgggatgggcatcaagtcctggagctgccagccttatgatgagaagcaacccaggccgcccgcctggcattggggtttgagcagctgtctgcatttgacactggcaaagcatccctcctccccgagcatctggcccaaataagggagtggggactttgggacccacatatgttctgaggggagggcagcatccacaggggaggtgtgtgttcagccgagccattgacatggtcacatctggttctagttgttggtctctaagaaattccagtccgggcgcggtggctcacgcctgtaatcccagcactttgggaggccgaggtgggcggatcacgaggtcaggagatcgagaccatcctggctaacacggtgaaaccccatctctactaaaaatacaaaaaaattagccggacgcggtggcgggcacctgtagtcccagctacttgggaggctgaggcaggagagcggcatgaacccaggaggcggagcttgcagtgagctgtgatcgtgccactgcactccagcctgggcaacaga

SEQ ID NO: 82091 - DNA, 1083 bp, Homo sapiens
gcactccagcctgggtgacagctagactatgcctccaaataaataaataagttgtgtctaccacaccagtgactgactcggtgaccttaagcaaggttacttaagctctgtgtgccttagttttctattctgtaaaagaagattataatagggctgggtgcagtggctcacgcctgtaatcccagcactttgggaggccgaggcgggcggatcacgaggtcaggagatcgagaccatcctggctaacatggtgaaaccccgtctctactaaaaatacaaaaaattagctgggcatggtggccgcgcgcctgtggtcccagctactcaggaggctgaggcaggagaatcgctggaacccaggagacagaggttgcagtgagccaagattgtgccactgcactgcagcctgggctacagagcaagactccgtctcaaaaaaaaaaaaagaagatgataataattctgtttcatgaaggggcaagaattacatgagaatgtatgtataaaataggacttattgtgatgtctagcacatagtaagccctatgaaggcatttgttctcattataatccacatcagcatcatgttctatgggcaaacataaaaagaggtcaggtgaagccactctgataaggtgacatttcagcagagtcccaaagcgagcctgagccaaggagataactgtcagaagaacgttccaagtagcacaagggtgccagggcaggcacatgcttggtgtgtttggtgcgggggggaaagccagcagggtgctaacgagctagagagcagtgacgggggaagaaataggacttgaggttggagattggcgtgggatgggtgggagacggcagaacttgcaagaccctccctgtagaccatgctcatgaagcccgtagctttactatgtgagactggaaggcagtttaaggcaaagaagcatcataatctgattggcccttttggtagctgactctggctgctgtgtagagactagactgtgagtggaagcagggagatttatttttgcaattgtccaggtggcctgagcttaggtattagtagcagggatggtgagaagaagg

SEQ ID NO: 82092 - DNA, 1029 bp, Homo sapiens
tctttgtgcttcacctggcccatagtgaaaggacgtatgagcaggagaggacagagctggcatgtggtacaggacagatagccgtttcagttcagcaccttcagacaggtagggaatcggtgcctgggctttggaattttggtgtgttttaaatgcgatacatcccgtagtctcagaggagggtgtttgtgtgtgtgttgctatagtaattgtcatttggctggcgagctcctctcagaaacactgagcagtcacataggctgataactgggcaaagcccagctgagtgccattccgggacataatctcctgccccgtgaggattaatggaaaaagctgaccttgatggcggaggcaggcagggaaaggctgggtttgcgtctggacctgcatgtaagagctgcaccccagcagcgcccacctaccctctttctggggatgaactctgggcacagcccacccagatcaaagtagcgctgttagttctgtgactctcccaaaatcccatactcacacgaggagcagaagtttaggagttggggcccttccttagtgccaaactgagagttacaagctgcctcctccttgtttccattgggtcattgtggccttaggtgagtcctagggctgcaccacccaagacagctgtgctgccccagccacaattggccatttaaattgaaattaaatgcacattaaaatgcagcttctccatcaccctattgtgtgagatgctccacagtgacgcttgactggcgcctgctctatcacacagtgcagatggagtacacgcccatcattgcagaatattcttttgggcagctctgggctgggccttttcttttcccccaaaaacctctgcattcaacaaatgtttattgagtaattctcctataggccaaatgcctggagagaaagcagcataaaagtcagacgaggctccttcagtaagaattgaacctggactgtatggcagcatgggttgtagagtaggccagactggcagagttcttgcttttctaggatgtg

SEQ ID NO: 82093 - DNA, 2581 bp, Homo sapiens
tggcatgcctgatagtggttcgctgcctgacatctgcaggccgatgatcccaggtctgtgtttttgcacagaccccattatcacaactaccagcagcacactcaaagtccaggtagctggtggagggttagtaacattatttttatgtgcaaaggttaacacttgctgttagtgaatattctctagctttctatgaagaaaacaacctgaagcttgtgagatagctgggtttctgtatccttaacctgacctactttttctgaaggttatgctgtgaaacctgtatcacaggctaaaacatgtaaactaactgataccttgtaaagcctataaaattattttgtgcttggattctataagctgcatgccattcagggaagccatagaaagccagctgcagcagatttgttcaggttagtgtgacagatcagaaaccccagaattgacagctgactactttcactttcatgtgttacacattgatggttgaaattaaaaattacatatcggaggtgtatgttcttctacctttaatctcaagcatcttgtttctatttttttttttttttgagacatcataaaacagcatgccatcttgtttttaaatgcctccttttgtaactgctgcccttattccaaaccatgtgttccgtgttttgtgtggtttagtagccatggttaccatcatttatgaacaaatataggctcagtggctgtgaatatccataggaaccacaaattttagaagatgttgcatttcttcagctctgtaacatccctgactctctgtggatcaacagatcataaatctggttcccattgttgacaggcagcaggcattttcctgcatagtaatgctgctatcatctatcacatttccaggtaccctgattcccagggatctgtgtgtggccatttgtgctgcctggtgagaatgggaaagggtctccagatttctttctgccctgagcaagtggcagcgtatatgtggttgggcattggaggctgatagacgattgtggaaataaataatctgcaacacagtgctttcactggaggaacttgatttgtggttgctgcagtggtggtgatggttgttctgcttgacttgtttcaagaaaatatactttagacataagactctgagatggttgatagcatgttttgaaagaaatggcaaggcctattgcaaagtccagttaaaccaaatggatatttacaccgtgccatagtgaggttgttgatactttagggcatatgctatatggttcacaccctttttgtgtttgttttctgctagtgcctggatcaaagtggaacagctgaagccatatcatgctcataaagaggaaatgataaaaattaacaagggtaaacgattccagcaagcggtagatgctgtcgaagagttcctcaggagagccaaagggaaagaccaggtgagagacacaatgttcactttctaccaatgccagactggtgatttttgcatagcaactaacagattaaatgtcacccaaacgcaaacctttgttcttctgaaatgctactggagaaagctacttcagttctaaggtgtcagcgttttgcttatcagtttgaaactccatgcagctaacctttctggagtaggttgttgcttttaggaaaattgcttggacccaggagaaatatctcagcatttgagtctagcacaggccatttcttcctttcatagcacacagattaggagcatagcctctgaaatacatatactgcctagatttaaatcctttcttctagttttgggacatagggaaagtgacttttgatatatatattttttaaatctgcttctcccaatgtctgggacgacagcagaatctatttctagggtcattgtgaggagaccacacagagtgcctgtagcagcacatggcacctgtaaatgatggtggcgatggcggcagcagctgtggtggtagttatcattattattattaaactttcagacgtcatcccacaattcttctgatgacaagaatcgacgtaattccagtgaggagagaagtaggccaaactcaggtgatgagaagcgcaaacttagcctgtctgaagggaaggtgaagaagaacatgggagaaggaaagaagagggtgtcttcaggctcttcagagagaggctccaaatcccctctgaaaagagcccaagagcaaagtccccggaagcggggtcggcccccaaaggatgagaaggtttgttttctctctgcagcttccgggattagtgatgtccttttagtacaaggtagagttaagctctacagtatgcttatgtagtatgcttatctatactctgctcatggagtgggagcagaattctgtgctcaagaatcctgcagggcaggtgcggtggctcatgctttatcccagcaactcaggaggctgagtcaggaagatggcttgagccttggagctcaaagttgcattgagccgattgcaccactgcattctagcctgggtgatggagtgagaccccgaatcttatttaaaaaattaaaaaataaagaatcccatagaccaggtgagagacacggcctgga

SEQ ID NO: 82094 - DNA, 1003 bp, Homo sapiens
tctcactctgttgcccaggctggagtgcagtggcacaatactggctcactgcaacctccgcctcctgggttcaagtgtttctcctgtctcagccttccgagtagctgggattacagctgcgtgccactacacccagctaatttttatattttcagtagagacgagatttcaccatgttggccaggctggtctcaaactcctaacctcaggtgatctgcctgcctcggcctcccaaagtgctaggattacaggtgtgagccaccgtgcccagccaagctggttttttatggctgttttttgatgtaacaggatgcttctccagcaataagttgattccttaaatagattaacatttcttggatttaccatcctattcatactgtcagttcatttagccattttaatgtttcgaagatggttgtaaagaggaaaattttagtatctcaaatgctttaaagtgagtggaattttgactgtacagttccttctagcagaaatcagtaaaccttgtaagatgcttcaacaaaaaatggggttgattccttggcacttcacagacatcctcacctttctgttccctcagaatcgggttcctgtgaggctgggtagtgggaggcagggatggaggtagcaggatggcgtgggtgggattagcaagtctcggagtctgttgtcccatctcaaggggttccataaaaatcacctttttggtcctatattgggaacttgtgtggttctcagcttctgaccagaagctcctaggaagaactggctggtcacgactccttaagcttcatccttgatactggttgtgtcatctcagacccacgggttagtatggtagcttcactggcttttggggctgggtctgactttgcatctgattgctctggcctgtcattagcatccctgtaaggagagggaacggagtcagttcagggatattcttgccagaaaatctggggtcgaaatctccttccacttttcctcccagcagattgga

SEQ ID NO: 82095 - DNA, 2048 bp, Homo sapiens
ctactcaggaagctgaggcagtagaattggttgaacctgggatgcggaggttgcagtgagctgagatcgcgccactgcactccagtctgggtgacagagcgagactctgtctcaaaaaataaataaagattatgtgcagaatgaatgatggcagataattgttaattctaggctgggcacagtggctcatgcctgtaatcccagcactttgggaggccaagacaggaggattgcttgagcccaggagccggagaccagcctggacaacatagcaagaccttgtctctacttaaaaaaataaattttttttttcaatagccaggcatggtggcacacaagtgtagtcccaggtatgcagaaggctaaggcaggaggattgcttgagcccaggaggtcaaaactgcagtgagccatgatcacaatattgcactccagtctgggtgacagagctagaccctgtcttaaaaagaaaaagaattctagaagagggagagctcagtggagagccatgagaaccaagaagactgactgaagagatgggatttgtttttctgtttgtttttttttgttgttgtttttttttttttgaaacggagtctcgctctgtcgcccaggctggagtgcagtggcgcgatcttggctcactacaagctccacctcccgggttcatgccattctcctgcctcagcctcccgagtagctgggactacaggcgcacaccaccatgcccagctaatttttgttgtatttttcagtagaggcagggtttcaccatgttagccaagatggtcttgatctcctgacctcgtgatctgcccgcctcggcctcccaaagtgctgggattacaggcgtgagccatcgcactcagccagagatgggatttgaatccagctctggaagatacatagaatctggatggatggggactataggggcatttcagacagtggggataccatgaacaattggcattaagctgggtgttatggaaaggaagaggctccctgcctgaggtaacttgtgcttaggaataacagaggcaatatggttggcccaaacttcattagctaaatgaataattacacaagtctgaaacaaaaatgggaactcagtctcataaggagcctgaaagccattgtttccttatgttttttgttgttgttgttgttgttgttgttcttgtttggtttcttgatttttttttgagaaagggttggagtgcagtatcacggacatggcttactgcatccttgacttcccaggctcaggtaatcctcccacctcagcagtccgagtagctgggaccacagttgtgtgccaccatgccctgctaaattttttactttttttttttttttttttttttttttttgtagagacaagttctcgccatgtttcccaggctggtcgcaaactcctgggctcaagtgatcctcccacctcggcctcccgaagtactggcattatgggcatgagccacagcgccgagccccgattttttttttaatgctaaaagactagattaataaactgtgatccttgtttataacaagtgctagaaataggacacagaaaattggagttgagttaatttcagagcttaaccaggcaaacaggtgaagccagtggtgatgtgcttgctcaagacaaaaatagcctggatggtggtggtgatgatataatttctaactgacgaaggttctttggagggttgtaaacaagtgggatacaaagcaactgctaaatgcaatatttttaactttttaaactcctttgctagagttctacattttaaactataaaaatgaagtcactgtggtactaatgtgttatctttttgtgggtaggcagttaacttagagaaaggaaataaagggtaaagatgtacagtacttctctaaagaaggaacacttccttagtgatcagtgctggggcagattttattttgtgtttttctatgaaggtaagatctccagattggctggtggcagcagattactttggggaaagagctctggattggttaccagcctaatgtgcattcag

SEQ ID NO: 82096 - DNA, 1027 bp, Homo sapiens
gttttcactatgtcctgtgtcaacccttcctgcacaggaagtatttcaaagagtgtcgtctgcattttttcagtaataatggggtcacattggagcaggggtggggtggtggggggcaggggatgctgttgatcttagttttaactgcttgtaaaacagggccactgcagtaaaagggatattgtgtctactgagcactgtgctacatgttaaatattgggaacttctagaatatctacacatttccatacacctcaatagaaaaatgggagatttagacaagtactaggccttgggttctgttttgtatataaataaatttatttgtaagtaagtccttttaatttacttttttcttagcaacgtagaactgtagagcaatgtggagccactagaaagtgggctgctgtgttgccagccaacctttttccccccttttatcctccagattgttaatccaccaaaggacttgaagaaacctcgcggaaagaaatgcttctttgtgaaattttttggaacagaagatcagtgagtagtactcaccaggagtctcccttcgcctttctttctgtgttacctggagtctgagctgctttgaaaatattctaaggatccttagttcagtcttcttataatgtgtaatactggcatctcattctgccttcatacctaaataaaggtgcaatttcttgcagaaattgccctagacaactgtcctaggtctataactaagtcaggcaagaactaggttcatttaccttctaactataacaatcacattgaaacagtttctcacatgtttctttacccaactccaaaggcagttcctttttgtttgtttttgagacagagacttagtctgtcacccagcctggagtgcagaggcagtctcagttcaccgcaacctctgcctcactgactcaagcggttctctcacctcagcctcccgagtagctgggaccacaggtgtgcaccaccatgcccagctaattttttgtagagggggttttaccatgttgcccaggat

SEQ ID NO: 82097 - DNA, 2067 bp, Homo sapiens
ccaggccgcgccgagctccgtcagggtagctcactggcgctgcgacggggccgaccagcgcctcgggctcgggaatggccccggggcccgcgccggaccaacgggcgtaacggaagcgccgagaggggaggggcgcggagtccaagacccgggggcggggcgagccgcgaggccggctccctctcgcgctcagccggtcgcaccgtcgccgccgccgccgcctcagaccgcgggcgcttcgttgtcacgagccgaagggagggggaaggagccgggagtctctgcgctccggcgcgcggagaccgcggcgctcgcgtcacgtgcccctcggtcgaccaatgatccccggcgggcgcggtgacgtcagagtagcggcgtggccagtgacagccggcccccgtcacgtggtcgggcccactccaatgggcggcgccggggcgacttgctgttcccggcggcccgtgcgtcggcggtggttgggtggtaagatggcggctgtgagtctgcggctcggcgacttggtgtggtgagtccgagcggccgggccaaccgagacgcgccggggagctacccgcctgggcgcggggttcgctgccggccctggagctgcctttttatgcgctccaggtcgcggagagaggggaagagaaggtgccggcgcttgcgagcggcgccaggcggaaggggcagtccagtcccgggggaccgaggccgagggtggccacgtcgggcaccggctttgatccccgaggccggccgggtggggtctgcactcggggcccagatactggcggcccccgtgaagggagccgccggtgccgcgaggcttccccggacgaccggtccccggggtcttgttggggcttcccagaaagcagaagcgccggggaccggacctgcgagatctggccggtgccattcggtcaaagcccaggttgcgatgcagccgacctgtgcggccggctcagccggggttgtctaaaccggactgctggcgttgccccgcgaagaaacggcggggggacttctcctttacaaccgatggcttggcagtgaccagtgcacgcttgggtgcctcccgcggtctgcttctgtgtcccagacaaccgcccgaaccaagactttgtcgccgcctccctcgagctgcgtagcttgtttctccacccagaggaaggcttccattagcatttgtcaaagccaggcaggtctcctgttgaattaaaccagacttagggagggaaagtctgtgtttacagaggaagctgtcctcccacccccgtcattaagaagctctagacaagtgacttttgacagttgtgttgttctgtattccttgtcaacagaagaatggatatgcgttgtgcacataagtatacaattttgcattttacttctgagggtgttgggcccagctatgaaagcttttgtttcggcatttgaggatgccagcagagatttaggaaaataaattgcgtattgagtgggttgaaggagatggactggcttttgcagggcaagtgttgactctttgtgttttctctagggggaaactcggccgatatcctccttggccaggaaaggtgagtgtcttgctactaaaggaagagatctgaagttgggtttgaagaggtggagaatgtaagatgcattcctctcagtttctagtattgagttaaattgggctcattcagatggcacttagaattttttttcccctagtatcggttattttttaaaaggcaatgcagtatacaccagatcattaaatcttctctaaacccttatttctggatttagaggaggtttatgaagtttcttttttaaccccggaaataattctagtctgaatttagctttatgcttaaatgtaacaaaaggagaagaaaatataaattatccaggaagaaagtctaaatgtaggttagtgaaaagccaaagtatttttgtcccaactaagtttaaatcttctttccatgttaccatatgtgctactccagtgcctctttgcagaagttggcattccagattttgcatgaggtgatccatcattgctttccaaatgttgtg

SEQ ID NO: 82098 - DNA, 1040 bp, Homo sapiens
gcgccgctcgcaagcgccggcaccttctcttcccctctctccgcgacctggagcgcataaaaaggcagctccagggccggcagcgaaccccgcgcccaggcgggtagctccccggcgcgtctcggttggcccggccgctcggactcaccacaccaagtcgccgagccgcagactcacagccgccatcttaccacccaaccaccgccgacgcacgggccgccgggaacagcaagtcgccccggcgccgcccattggagtgggcccgaccacgtgacgggggccggctgtcactggccacgccgctactctgacgtcaccgcgcccgccggggatcattggtcgaccgaggggcacgtgacgcgagcgccgcggtctccgcgcgccggagcgcagagactcccggctccttccccctcccttcggctcgtgacaacgaagcgcccgcggtctgaggcggcggcggcggcgacggtgcgaccggctgagcgcgagagggagccggcctcgcggctcgccccgcccccgggtcttggactccgcgcccctcccctctcggcgcttccgttacgcccgttggtccggcgcgggccccggggccattcccgagcccgaggcgctggtcggccccgtcgcagcgccagtgagctaccctgacggagctcggcgcggcctggaactcagcctccgccgggtctgggctcccgcgcccggcaactctgcttggccgcaggccgggaggccccggtgtccgcgcccgtccgctcccgccgcccgtgttctttggagcgctcctcccgacggccgctttcggaggcgccgtctgagcgcggggtcccgcgccgcaagttctcctggggcgaccggaggctgctcccccgaccccctggtgtccccggagtggctgcgcggacgtcgagttggcatttcttcgcttcctcctgggccggcgcgcggcgcggcacaccaggctcccctgggctcggggacccggccatgggccgaggcgcgggccgcccgcccgctgggagccacggcttagc

SEQ ID NO: 82099 - DNA, 1074 bp, Homo sapiens
ggattataggcgtgagtcaccgcacctggccgtgtttttgtattttatgtagatggaattgtatggtatttgagtaccgcctaggtgaaaagctgtttttttttttgagacagagtctcgctctgtcgcccaggctggcatgcagtggtgcaatcttggctcactgcaagctccgcctcctcggttcatgccgttttcctgtctcagcctctcgagtagctgggactacaggcgcccgccaccacgtctggttaattttttgtatttttagtagagacagggttccaccgtgttagccaggatggtctcgatctcctgacctcgtgatccgcccgtctctgcctcccaaagtgctgggattacaggcgtgagccaccgtgcctggcccgtgaaaagcatttttaagcacctgtgtctgcctttgcactgtgctaggctctgaggaaaaggtaagtgggccccacactcgcagcattgtggtctctagcatgtctcttagtgaaatggggatgaggctggtaattggttcacagttgtctgagtgtggaacgagaatgaaatcatgttgtgaattttctagcagtatgcctcagtgccaagtgatcagtcggtcttattcacaggtgtgctgttcggagggtatttttggttagaaggattaatctttttttcctgagattaaaaaaatgtgttttcttggcctggcatagtggctcacacctgtaatcccagcactttgggagtctgagacatgaggatcacttgaccacaggagttcaagactagcctgggcaacatagtgaaactccatctgtgcaaaataatacagaaattagctgggcatgatggtgcatgcctgaagttccagctactcagaaagctgaggtgggaggattgcttgagcctgggaggtcaaggttgcagtgagccgtgatcacaccaccgcactgggtgaaagcaagaccctgtgtcaaaaaaaaaaaaaaaaaaaaaaggctggaaggcctggcgcagtgactcatgcctgtaatccccacactttgggtggccgaggcaggcggatcacttgatgtc

SEQ ID NO: 82100 - DNA, 1050 bp, Homo sapiens
gagaagtgcaaattcagacctttctaaacagtatggcagaacggctctcaagaacttgcaccacattcagtgggattttcacgtttttgagcccttgactattttggaagtcaatggactctttcttagaatgtttttaaatgcctgaagaaaattttaagagttacaaaggaagtccactttattgaacgtggttgtgtagcgactgggcatctccttctaaaggccctttgctgtctttgagtcctgcagcccctcatgctgtggtggatgattgtaggcattcaatcaagttttattaacctacattaagggaaattttactttcttaattaagataaacattgatgagatggtagcatgttttctaccttgcccttttctggaaaacattgtttttatagaggtattgagtaatcagtgaagtttctatgaataagaacatgggaatattttctgacttattttttgtggaacgatctctttacagaagaaagatctgtcagatcctttcaatgacgaagaaaaggaaaggcataaagtagaggcccttgcccgaaaatttgaagaaaaatacgtaagatttctctcttgaataacaaaacaacctcattgggtgggagacgtttccacactgtattcctttagtggatcatcatgtaataaacactgatctggaagtaagccttaagcatggagagaagagaagcagttattaaacctaacgcattaaggtacagaaaaggggcatggcagagctagtgtgaagagctaactggacaaataaccgagaagggcctgtggtcgccttagaagaaatattttggtacaaagcataagaagccatttagttcatttttctgtcctaggacattttatacaggtacaaatatgttctatgttaaaaggttttcaggaaaggaggttttggggtttgtgtgtatgtgagagagtgactgttttagttagtgcattacctctttgagtcatagctgatgaagttcaaggccacagttaattctgtgtgtttattcaaaaagcatgtaatct

SEQ ID NO: 82101 - DNA, 1025 bp, Homo sapiens
cgagctccatatgccaagaggagggaggaggaatgacagggtggactgtgacaggttctcctggagaccatgaccctgggagcaggggtgaaggcctctggagttccctttggaggtgtcctatagtctgagtgaccagtttccctcttgcttgcagcttcacagccctcaatgccagtaaggagaagaagaagaagaaatattctggggctttaagcgttaaagagatgctaaagaaatttcagaaagagaaagaggctcagaaaaaaagggaggaggagcataagcctgttgcggtcccatcagcggaagctcagggcctgcgggaactggagggtgcctctgaccccttgctctcactctttggctctacttctgacaacgacttgctccaggcggccactgccatggactcgctgacggatttggacttggagcatctgctcagtgagtctccagaaggaagtcccttccgagatatggatgatggaagtgattcccttggggtgggattggaccaggaattcaggcagccctcttctctccccgaaggcctgccagcacccctggagaagcgcgttaaggagctggctcaggtatggtggcacagtgcggctgggctttcctggaagcagtttgggcagattgctgttggttctgcactgcgtgaagcttgcccagagaaactcttagtgagttggcagttaaggtgtcagctttttccaaaccctattctcatcctgagggagaaaacagtgtaagccttgcccgtcaggcatcattttaggcctttcttggtttcttcatttctggaaaatttgctttcttctggggagattgttctctttctgttttctgtcagtttgttttccacacggcatcttttccttcatgtgatagacggatgatgttggcagcaggcagctgaggcagagattaatcttagaattcttacgaaggttttgcaaattcacaaaagtttgtaaacatacaagttacacgtagagtagatgcttcgttgccac

SEQ ID NO: 82102 - DNA, 1844 bp, Homo sapiens
ttttcttctgacttagttttggttgtttggtgttaagcttttcttcctgtggcgtgccgttttacagtagtatcttcatttgttgattcattcactcagtcaacatttagtaaatattatgtgacaggcagccatgggaaatatactgatgaataagactcagttctatattttattttattattattttttaagacagggtcttgctctgtcacccaggctggagtgcagtggcacgatcttgccttactgcaacctccacgcccagggctcaagtgatcctgccacctcagcctccagagtagttgggaccacaggcatgcaccaccatgcccagcttttttttgtatttttagtagagacagggtctcatcatgtgcccaagctggtctgaaactcctgagctcgcgtgttccgcccaccttggcctcccaatgtgttaggattacaggtgtgagccaccgcgccgggccaaggttccattcttgtctttcatgagctcgttacataaatggacccgatagatacgcagacaatggactgtagtacagagcagaatgaagtaagctttgtgatgtgtggacggccagatagccggacttaaggggttaaagagaggctcttggggggcatataggaagcagactggaggcaacaggcttcgccggcctcctggggaagatgccctaagagaaggcagggagcagagctgaagatgggcgagttggtggatggctgggccagatcgtggaggaccccaaatgccatgtgaaggagtttgggtttgataccaggcttggaaagagctgctgaagggttctgaagaagggagtggcggtcttaaggttggagtgcaattattagaagtggggaacacaggggaagagcagaagccagtgggtctggtgtaagttgagtttgcaaaccagagggtcatccatccacagaagtgcagttgacccttgaacaacacagggtttaactgcgtggatccacttacacgcagatgttttctaaccaaatgtgggttgatttgagggatgctaaatctgtgtatagagggctaactttttgtataggcaggttcctcagggctgactgtgcagttggattttggtatatacgggggtcctgtaaccaatcccctgcctataccaggcgttgactgtaattgggaaatttctcagagataactggaaattctggtccagagcttagatgagaggatttagggcttagtttagatttgagtgtacaattgtctgtgttattttgaagccctgagggggaaagaagttattgggagaagtgggttctagtgagaatcctggggtccgcctatggaaaggagctggtggaggaggcagatggagcagttagagtggttggaaggggccccagaggatgcagtgagaggaaggtgagtgggggagatgatggtgaggggttagcagtgtctgcaatttcagaggggttgatcccttcattctagatagtcaccttatcacccttgtttgctgtcgttactgtatatcatgtctgatttcagaaattttatttcacccaaagccttcagaccagcagctcttgggttgagaggaatggttcccagccctttttgcacatcagtgttcccagggttgctttgaaagagtacttgggccacttttgagagtgtgcattcctgaatctcctttccagagactgtgatttgaatggcctgagttgctccaagctgcccagggaattccaatatgcaaccaagtgtgagaaccctgatgcagacttccacagggtctgcttttttgtgttcccgctgtgtcgtggctgcctgccgtggttgc

SEQ ID NO: 82103 - DNA, 1023 bp, Homo sapiens
gtggcctcgggcctgctctgccttgggtgttgcttggcgtccctggctgttccgctcgctggcactcctgttcctagtgccacgtgcatcatccctaatgctgttcccacatgcctgagcctctgagacaccacgctgtgtgaatcgggttaaaaaacagatgagcaaacatttgtaaatccagactgggaaaagtgaatccttgtggcctggcctgcagtgttgccgcttttctcctggttgcagtttgtggcaggggaagcttgttgctcaacagctgaggagtttgtgtgtgtaagaacagttgtcaaaatgtgggtgttctaccacatggcctcgcctggccgggacctggattggccccttgggtcaggaagtgtgagctgcagagagcacctgagcattggtgcggacgataggattgtgtcaacaaggaacctgcttgagcgtgccaaatgtggacagctcaaggcattgaagagaaatatttttttgcttatctagatggagaaactggaggggtgaggctttccctgacctcataatggttgataaacgtggggactgggggaaaaaaaagaaatgctgccgggaagtgtctcctttgaaccccaagtaactcatgactttccactttgaaagctttcatgttttctctatgaaatttagtgcttcagagcttgttctcctgggctctgttttcctggtattgtgacctaagagccttggcccacattacctagccatgttcatcaggcttgggagttgttgttgtttgttgattgctgaggatgtgtttccttgggcattcagttacattgtgtgaccaacaagacagggtttgactgccgttggctcctagctttcctctccacgtacggtgagctgatgaagacaggagttgcagtgagctgcagccggtggtgactgtgttttgttcttcagcatagaggcgcagactcgggagctgagcagtcaggtccgctctggggtgtatgcctatcttgcgtcattcctgccctg

SEQ ID NO: 82104 - DNA, 1065 bp, Homo sapiens
gagccatccagcaaagccacattcagtcagctctgcaggctcatcttacaagaataatccctttgccagctcaatctccaaacatggggtttcttctggcagctcttcctcgggaggaacaccagtccagagttctgtttctgggagcctggtccctggcatacagcctccctccgtgggacaggccaccagccgacccgtcccaagttcagcagggaaaaaaatgcctgtttcccagaagttgactctggtagcccctccaggcggtccaaacggagattccagtggtgggacccagggagtggcaaagttgctgacctcgccgtccctaaagccctctgcagttagtagtgtgacatcgtctacctccttgtcagtgagtatctgtcatagcagcctgccctgccccactcacaggggccttggggatgaggttgcttgccttgccccgggtggagagtgagatctaaaaccacaggtcaggtaggaacagtgggctcagacgtaggaagggagactgggctccctgttctcaggtattcacttttctggtgacaggaagcccaggatggcctaaagcttcttctgaggagggcagagggacctaaaggatggccagcaccaagcaccatgcctcttcggaggctgtctgtgtggcacagaatgagcaacagcccttgccttccgtgaccccttgcctctccatctctctaaagggggctggaaatgctgtcttctatcagttgagtcatgtggaggtgttcatggaccaggaatagcaggaccttctaagagtgattctgttggtttttgaaggacagagtccaataattaatgcatctcgcttgtgtgtaatcacagcaggttcgggaagagggagtgagcattttcttttctttttttcttttttttttttttgagacgaagtcttgctctttcaccaaggctggagtgcagtggcgctatctcggctcagcgcaagctccacctcccgggttcacgccattctcctgcctcagcttcttgagtagctgggactacaggcgtccgccaccacgcccagct

SEQ ID NO: 82105 - DNA, 1056 bp, Homo sapiens
atataaatatatatacacatataaatatccatgaacatttatggatatctatattacatttttcccttcacaaaggaggctttttttttttgagacagagtctggctctgtcacctaggctggactgcagtagcgcgatcacagctcactgcaacctctgtaggagacatatttaatatcctgcttttaaaaaaattatgttccctggaatccattccatgttggttcataaagactgtcctggatcctgtctttggggctgcagggtcggagggtgcctcccagggccatctgacatggatgtgtatgtcctcctttgtggacacacaaggaggatcctttgtgttgccaggtttggtgtgagtgagccacgaacaggactggagttcttaccgcttgctgtgtttcttccctagaaaggagcgagtgggactgtgctgctggccggctcctctttgatggcttcaccctacaaatccagcagcccaaagctgtctggggccatgagctcgaactccttgggaattataacccctgtccctattcctgtccatgtgctctccttcagcgctgactcctctgccaaagcaggggtctccaaggatgccatcgtcacaggccctgcccccgggtccttccaccatggccttggccacagtaagtgcttctttgctgcctctggtcactcaggaacctctagattgtggccaggggtcctgctgttgtgtactctggttcctgtgtttgagtctggtgtgtgactgtggggaacatctccgggaactgtgccaagcccccactgcccctttgggtgtggtgcccagactggcctggcaggttatcgggggcttttggctgctggagctgctttcctgttcctgtcttcaatgtgtgtgttttgttcttttctcccctcctgttttctctcaggtcttctggctggcttgcactccagcccgccccatgcagcgcctctcccacacgctgcggtgcccacccatatcccgcagagtctgccaggtaatcacccgacggtcagtgtgccacgcgcaccgt

SEQ ID NO: 82106 - DNA, 1850 bp, Homo sapiens
aagtgctagtgttctataccactgtagggtgactgtagttaacagtagtatgtagtttcagttaggaggaggatattgaacgtcgccagcaaaaggagatgaaaaacgtttgagatgatggatatgctaataactctaacgtgacactacacattttagatgttgaaacatcactatgtaccccataaaatatgtgtcattattatgagtcagtttttaaaactgtttaaggctctcagaggctggatgtggtggcattgagaggcaggaggattgcttgaacccaggaatcagagggtatagtgtgctgtgatcatgcttgtgaatagctgctgtactccagcctgggcaacatagtgagacctcatctctaaaaaaattttttttaatcagtttaaaagttcgaggaaaaagaaaatcaatcagaaaagcaactataccaaaacagggttatccaagtgagcttctctcacttccttagatggacttcagcttataggatgacacgagatgcgagtaagaagctatttgcgcatttcagctgcgtgacttgtgtctgcgttgctttcctttctttcttctgtggactgagaatgctagtgcctttgaatttgtctttacaggacctgagggtcttttgatggtaagagaatgaatgatcattgctgccttgagttctgtgtgatcgtcaggcctcgcctcaggatggcaattgtagcctgagatgacgtagcccaagttgcacagcagagttgctgttctggaaacactgtgctgagtgaccaccgaccttcacagtgctagtgtgcttgcaggctgtggccaggagtagtgtacacgaataactgctggctggtgtctcatggcttgtttgagctctagaacactcagcatttggggacttttgctatttaggtgtctcccttgaagtttggttactactgccttaaggaaatcagagagcatgaaaaacttgcgttctaatttttcttactcttttccaggtgcttctcagcttcacgggaaagggcctgctgtaccacggaaattgtgaccgcttcagaggcaaggcttgccacttgggtctgggtggaatcagaacgtgcaggtctcccaggatgtacactcactgcgccctttctgctgcttggtgttcttctggaggagcgtgagttctcagcggagcgcttctcggcacttctgatgtgcctcccatggagggagccgggcccttgctgctcaggaggtgcagactgccccgtgctctgggccttgcagctctgtcgctagacggttgttagaggggcagctctaggctggggcttgcgctgggccgtggtgggaggcacagtgtttacaggctctggtggcagagcagttggcacacctgtgggtgaatctgcctgatcccctggcatttggtcagagtacctcagagcaccccactgctcaggggctccttctggctgcagtaagctccctggatggtcacagtgccgccccatccccaggctgtgtgctcaaagcggacaaaactcaggccagagccacagctgggagacctgcactgtccctgcgaaatactaagaacacctagggtgtgctcactgtgggggccagtttctcctcggaacatgacaatgaagctcttttagagaaaagacctttgtagattcaacaattatgataggatttttacagacacctattttgggctcagttttcatcattaccattaaatgcattggatagaaggggactgttcttcacacatcatattataggaagacataattccagtgcctttatggtggagcagaattcgacaacacatgtccattcagccctct

SEQ ID NO: 82107 - DNA, 1200 bp, Homo sapiens
cccaagtcacagatagacattccagtttgtattcttaggaatcattcttaggcagtgcggcagaagcaggcctctgtgaagtgtctgccgggtagaaataggccttgaagtcctggggctctccaggcagtggggttatgtgtcgactgaagggtgatgtgcagaagagcttggagagtggatcagagagactaggacagttactgcagagctcctaagtcaccactcaaccagtggctgtttcacaaggatttgagggcacttgcctgtcttgtgaggtctgtgccacaaggtgagtctgaactgactgctccagctaagtgatcaggcacgttgagagtatacggtgtcctcagcacatacacctgtgggaaaacggaccgctcttggctcctgactcccagggtacagcgcccagtaactcatccttcattcagaggtttgctggccttcccggtttcccaaggagcaagacctctgtccgccctttggcccggcctctgctctgtctcctttttttacataagaaccaatccgtgtttcacattgggctaagtggattccttatccctttgttatatatattttttgcaacttggatttccagtttgtttacagagtagtcttaggtagtagcaaaagagccaaagaagagatttgtattgctgagctcaaagccaagcagaggccggcagtggaggctgagcagggactctccaggcttctctgcccataaacacccgggtcccaggccctccttcctttccctttggtgctccctcctccccacgtaccattgcgcgtgcagctggagcagaataccctcatttttaggaatctagtgatgcctcttgcctcagggaaacgtttctttgatggggagtttgagatttcttttccttgtttatgctttatttgtggtaatgaaagagcgaatgactgaacagccatggcaaggcagacctacaggcgaggccgcagcagagggtggggcagagcagcctcggggtctgggggctgcaggggtttccctggcgcagcgaaagtctctgagcacttaccgggcgtgaccgtttcttaggtgtgagaggggctgtggcttttgtgcagcgactatgttggtgttaggggtggtgtggagattgttaatcttgtataaagcaattcaataaattgtttcaaggtttccaaaacattttt

SEQ ID NO: 82108 - DNA, 1018 bp, Homo sapiens
gtatctgggcagaagtaggcacagctcttgcaactcttcgtaacggcagacgctggccctctcctacgacgcagtgacctccttggtgtcgtcctctcccttgccctggtgcaggccaagcattttatacataccctcgctgccaggctgctcagagtcccgcccacatatgagacaggcactggctgaagacaggcaactctcgtcccaaccatcattcaccctgagtgacgtacttcatcctccaatgactggacaactgcgatgccttttcctcccttttcctgtacactcccagcaacaaactcctcatgataactgcacacaatctgaaaaccactgaaggacaagccaaccacagcagccaagcccactccttgcagcatgggtactggtggcacaccagacagtgacactgccccacaaaggcctgggcccgtgggggctgctgcctggcatgacatctctccagatttctggcttaaaaccaactttccatccgagaagcctcctcagtagttactctgctcatgagacagatctgggctccaagccaggaaaggtgaacagaaaccacaagtgtccagccctcggtgctggagtggacgttaattgtcagccaccagactgtcccggcacctacagagaatgtttcacagttctggcatttaaatcctttgatagtggattgtgctgctgttagccttagtttcagtgctttacaagtctcgcttattatctcactggtatttaggtatacaaaacagttgattattcaccacgccaatatctgggtctctgtatctcatgtagaacataagaaaatgggaactaatagggaaatttatttatagcatgaaaataaacctggtggctggagtctgcttgtacggtccacatgtttcttcttttgcatgcaaggcttactcccccgccccccccccttggctttcagccaaaatggatattccatctgtaacagctcctacaggaagaactacttacttccacatggtag

SEQ ID NO: 82109 - DNA, 1025 bp, Homo sapiens
gagcaggtgagagcatctggcacatccacccgcccgtctggatagatgaggacaccagcatccagtctccccaggtttggaatgcccaaattgggaactgcaaatggaggcccacagcacaaatccaagctattcacgggatctgtgtgacttacgggatttcgggtgccagcattttaagatcaaatatctgcaatagccagtgtagtggcacatgcctgtaacaccagccattcaggaggctggggcaggattgcttgagccttggagtttaagtccagccgcctggacaacgttgcaagaccctatctcttaaaaaaaaaaaaaaaaaaaaaaaagcataaagcacataacaatccatgttcccagtatctcttgctgagcagagctggcatcctgggctgcagctcagagggcaagtcagtgggcagaggagcagctgccttctcggcctgcttacctcgcagttgccacgggcccccttcccacactgcctgagcacaggaaacattcaagtctgtgacctgaggccccttattcacactcccatctcacgacttgcttttgccacagcctcatgaccagacagtggcaggctgttctcgcgcagggcacgagctgcctgctgcagggtttttagaagttagcttttcagggctttgttcattgttaaaaaacagaagatggcagaagtgacccaggtttgggatgtacagagcaaggctccggtccttcctacctgtggccttgcccaccctcctacagtcagtggcccaggggcttcagtgggtgtcatcgcctggctctgggagctctggccgtagcaccgccgtctcctcctctgccccgccaggccatggcctgtgagttacaggcccagaagtccctcctgggtgaggtggagcagaacttgcaggcggccaagcagtgctcgagcacactggccagccgcttccaggagcactgtccggacctggagcgccaggaggccgaggtgcacaagctgggccagcgtttcaacaacc

SEQ ID NO: 82110 - DNA, 1047 bp, Homo sapiens
acgcccatgcaggagagctgcctgatccagcttcggcactggttacaggagacccacaaaggcaaggtgggtgcagggggtaccctggagcagtggatgaatgggcaatgactggtactcagcctccgtgcatgggaaggaaaggcgagatgataatgctgacacattatctcttgcttatttatttatttattcatttatttctgtgagacaaagtctcactctgtcccccaggcagtggtgtgatcctcactgcaaccttcgcctcctgggttcaagcaattctcctgccctagcctcctgagtagctggggttacaggcgcacaccaccacgcctggctaatttctgtactttttgtagagatggggtctcaccatgttgccccggctggttctgtaattttatctgctgggtcaggggataccgttctgtgggctttttacttctttgtctctcagattcccaaagatgagcacatccttcggttcctgcgggctcatgacttccacctggacaaggcccgggaaatgctgcgccagtccttgagctggcgcaagcagcaccaggtggatctcctccttcagacctggcaaccccctgccctgctggaggagttctatgcagggggctggcattaccaggacataggtgcgtgcctccacccacatcatgtatagggcatactttggtcactgccaaatgcactttatttattattttgagatggggtctcactctgtcacccaggctggagtgcagtggtgccatctcggctcaccataatctccgcttcccgggttcaagcaattctcctgcctcagcctccccagcagctgggattacaggcacccgccaccacagctggctaattttttgtatttttagtagagatgaggttttgccattttgaccaggctggtcccaaattcctaatctcaagtgatctacctgccttagactcccaaagtgttgggattacaggcatgagccaccgcacccggcccaaatgccctttaaatgccatgcttcatgctaacatcttact

SEQ ID NO: 82111 - DNA, 1099 bp, Homo sapiens
ggaccgcctggctagccctcaccctggcgctggccttcctcctgctgatcagcactgcagcaaacctgtccttgctcctgtccagagcagagaggaaccggcgcctgcatggggactatgcataccacccgctgcaggagatgaacggggagcctctggccgcagagaaggagcagccagggggcgcccacaaccccttcaaggactgaagcctcaagctgcccggggtggcacgtcgcgaaagcttgtttccccacggtctggcttctgcaggggaaatttcaaggccactggcgtggaccatctgggtgtcctcagcccctgtggggcagccaagttcctgatagcacttgtgcctcagcccctcacctggccacctgccagggcacctgcaaccctagcaataccatgctcgctggagaggctcagctgcctgcttctggcctgcctgtgtctgctgccgagaagcccgtgcccccgggagggctgccgcactgccaaagagtctccctcctcctggggaaggggctgccaacgaaccagactcagtgaccacgtcatgacagaacagcacatcctggccagcacccctggctggagtgggttaaagggacgagtctgccttcctggctgtgacacgggaccccttttctacagacctcatcactggatttgccaactagaattcgatttcctgtcataggaagctccttggaagaagggatggggggatgagatcatgtttacagacctgttttgtcatcctgctgccaagaagttttttaatcacttgaataaattgatataataaaaggagccaccaggtggtgtgtggattctgaatcatggacttaggtcactgctagggcttagcaggtgtggcttatcctgaaacagaagtcacaacggcatcctggagccaagtcctgttccctgcttgtttaatccagtgcttatcaaactttaatatgccacaggtcacgaggagatcttgttaaaatgcagatttgggcctggggtgaggccagcaattctgcgtttccaacaagctctctgacgatgctgatgcttcaggtccccagaccacacttcttgtctt

SEQ ID NO: 82112 - DNA, 1018 bp, Homo sapiens
aggatgaaatttatccaaattcttgtgtcactatattttgaaattatctttgaatcctgaagagagttcttagatcccaatacagtaacagctttactttagtcggggaaatacactggtgtgtagggaatctggtgtatgtgcgtgtgtcctactactactaattcttggccccgaggggctcctgggggttccccgggcccctgttagggaaccgcgtccacttctcgccctctcggcccacttcggaggctcggtctgcggctgcgcacagcgcgaggaagcgcggtcacgtgactgctgcgggccagccaagatggcggcctcatgcttggtcctgctggcgctgtgtctgctgctgccgctgctgctgctgggaggatggaagcgctggcgccgggggcgggcggcccggcatgtagtagcggtggtgctgggcgacgtgggccgcagcccccgtatgcagtaccacgcgctgtcgttggccatgcacggcttctcggtgaccctcctggggttctgcagtgagtggccaagggtctgggagggacgatgctctctcagccgttgatcctcggttctaaccgccccggggagtcgaggcggaagtgctcctttagtcgccgcctttgggcagctctccgagattagacgagcggttctgccccagcctttcctgggtgggtctctaggtatagccggcgttaatcttgccacgtgtcagaagtgtgttaagtgaatccattgcgtggtctcacgtaattctcctagtaagtggaacccaggtgcgtggaactccagggctagtgctggtagctacgtccctgtgcagctacccttgtcaggctatgtctgagctgacaggatatttcattcctcatccctcaacgcagagctctgcagacagatgttttcatttgttcttcatgtccagcttttccccacagtgtgcagggcagcggtgtctgctccctcattattctccacgttggtatcttgagagggtagctcaacccca

SEQ ID NO: 82113 - DNA, 1022 bp, Homo sapiens
cagtggcacaatcatagcttaactgcagcctcatcctcctgggctcaagtgatcctacctcctcagcctcctgagtagctggggctgcaggtgtgtcccaccacacctggctaatttttaaattttttgtagagatgaggtctcactgtgtttcctaggccggccttgaactcctgggctcaaatgatcctcctgccttggcctcccaaagtgttgggattacaggcatcagccaccgcacctggcccattctgtttcttttatgactttttacatctattttggtggtggagagggtctttcttctgcttattatcaagagctctgtaaagataacagactcatcaccatgtgtgttgtgactatttttactgggtttattgcctagcatggtctgggtttcctccccttcaagtctctatctttcctagaaccccccaggtctgcctagcattgctgtctgctggttcgtgggctgcctttgtggaagcaagctcgtcattgactggcacaactatggctactccatcatgggtctggtgcatggccccaaccatcccctcgttctgctggccaagtggtgagagtctaggaagagggtaaaataccgtcccctaaaccactcaaggatgagtgagaagaagggccatagtgggcctccggaagtcggttccttgtgggctctgcaggaggtggggtgaggctggtgaatcaggccgaatgctggttccaaatgatagaaacaggcctcagcaaaggaccacattttttggcccatgaaatggaagtgtctgtggaaatggttggtttcgagctcagcagtgtcactgggacccagctcacgtctgtctccacactcccttctggtggtggttcccggaactctcctagctcttgtcctcacgtaggctcattggggagggcagccctttctgattggctcatgtaggttacctgccttcctctgatctgcctgttgaggccagggggcaagtgctccagcagaagagctgggtctcagg

SEQ ID NO: 82114 - DNA, 1080 bp, Homo sapiens
taatttttgtgtttttagtagagacagggtttcaccacgttggccaggctggtctcgaactcctgacctcaaacgatccacctcccaaagtgctgggattacaggcatgagccaccgcgcctggcctgtatttcttccttttacagcaagagagaggatgttcactttggcagtgatacacagtgtccttctatttatttttttaaatttgtatttatttatttatttatttgagacggagtcttgctttgttgcccaggctggagtgcagtttccttttaaagtgattgtatttaagccaacaagtgacacaacataaaggagggtatatacagcataaagaaagaacactggcacagctggggctcagggagctcaaactctcccagctctgcggccttttctctgttgagggatgtcgagtcacgctgtggtggtagcggaggcctgtctagggctctgctgactgctgatctctcttttcaggtacgagaagttctttgggcgcctgtcccacctgaacctgtgtgttaccaatgctatgcgagaagacctggcggataactggcacatcaggtaccatggcctgggatgacggcggcctgggagaggcgcggggcccctgattggctgcagtgagagctgccttgcctgctgccgtcctgctgaggggcaatttgaaatactgagggcctgggaggtggtctttggtttggggaagctgggggaggagggggcagagtttctttcttagccagccagggggtccaggcagttttggtcctaggacgtctctctgtgcattcccaagtaattgcaaggcttcttcttgtcatcatctgagacttggattccccaagcgtccttcttttcctggagcctctgagtcctctgttcctgaggcctttcttcagccctcccaatagccccgtcatgatttcattgcagggctgtgaccgtctacgacaagcccgcatctttctttaaagagacacctctggacctgcagcaccggctcttcatgaagctgggcagcatgcactctccgttcagggcccggtaggcctcccatcctcagct

SEQ ID NO: 82115 - DNA, 1580 bp, Homo sapiens
gcgggcaagctaaaccagttccggaagaacctgcgggagtcgcagcagctccgatgggatgagagctgggtgcagactgtgctccctttggttatggacacataactcctgggccagaggctaaaaccccaggacccctgctgtccttcccgcagcttcttcttggagtctcagggcaaaccctttcgagcagcacctcccagtggccagaagctgaaatgacagcagtggtactgcctggtaaaagaattggttctgtgacccgggaagctttggttggccttgatttcttctctggaggcttggaaacgcttcctctcttcttctgttcttcacgccccatgcccctgctagcgtattactgttctgtgacttccctgtgacctctgcagaactcctcatcctgcgtttggtctccaggtgtcccctttctgccgtgttcctaacattttgattcctgtcttgaaaaaagcacctgctgcaccgtaagcccagggatgtggcagctgcagtgggcttggctttgtgaggaactgagtgtgtccacgttgggggaacatcatacttgatacacacgtttttatttgcacaaagaaaatgctatttttggagccagaattttcatgtctgatttatggtgattttcttaagaaccagaactgctggcagaaagggggcacccacacgcttagatagccgatgtcttattagagggcagtttgtggttcctgatttggaaattaacattctccaaacattccagtccaatgaaagttttatccgctttcccatataaaaattcttcccatgagagtgacttgattctcacaatcccgttggagtcgtgtgtgagtcctacagggtgagattcagcattgccatctccaagtgctcttcgtagggaaacagtttctgctcatgacgaggttccacttcccatctgatcccggcccggcctggaaacagagcacatgtgtttgaggatggcggtgtttggggacaggacatgagggtattgtgtggggctgctaggacaggcctggcggggtaggggggtgtccaagtcagtttacttggttcacaggttcccaggcccacccaggtgcctagaattggcctccaggatgggaccagaaagctggttttgcatagaaatggctagcagcaggcaccgtgccgctgtccactctctgcctgtgtctgccccagcacttggcacagcgggacagaagcagagatctgaatagtcaacccactcttcacaaagcttagaaagcggccgggcacagtggctcatgcctgtaatcccaacactttgggaggccaaggcgggcggatcacttgaggtcaggagttcgagaccagcctggccaacatggtgaaatcccatctctacaaaaatacagaaattagccaggcatgatggcgagtgcctgtaatcccagctacttgggaggctgaggtgggagaattgcttgaacccaggaggtggaggttgcagtgagctgagattgtgccactgcactccagcctgagtgacagggtgagactaagtctcaaaaaaaaaaaaaaaaaaccac

SEQ ID NO: 82116 - DNA, 1084 bp, Homo sapiens
agtcccctctctggtggaacagagctctgcctgtggtcctaggtcccagccctgaaacccacaggtccagcggtggccagggacacaagcccacccctgcaagccagcagacaaatcagcagatgcctgaaacatgaagttcatggcagggtcaggctttgtgtcattcaaagccctctagataggccaagaaccagagctggttttttaaggaacaccagtgagtctggagatttttttcttttgcttcggtcttttgcagctttctctactaagggttctcctttttcacccaagtaattgcctttccatctaatggcccaaatggtcaaatggcatctactagtctcatatgaccgctgcctctctggcctcgccctgctgctgacgtcagcatgacctggacctgtccactggtccctttcagtaacctgaagctttcaccatagatgtgctgtattgcccagaagccatcatgtcgctggtcggggtcctgcggaggctggctgcctgccgggagcaccagcgggctcctgaggtctacgtggcctttaccgtccgcaacccagagacgtgccagctgttcaccaccgagctaggtgagcctccacgcccacccgggcctgcatggtccctgagctgtccctgcaggacgccagtggaagtgaaagaactgggtgccggggaaaagctaggttgccccacactcccacaccatggggggaactcaggcagaggccagtgagcagggtgggcttggggcgtggggggcttgcggcaggaggagggcagctcagcacagggagggagggtctgagcccagcagccctactgtgtgcttcagagcagggttccctaagcccttgggcctcggtttcctcatctataaaatggaggtggcgggaggggcagtcggggtcagggctggacacagctgtggcctgcaggacgctggagcacaggatgtacaggcggatccaccacgccactgtcctgagcacccagtcggtggaagacgagcagggtgactgtagagaaggggaactggccccatagtgggccagcaactgtcctcagacctgac

SEQ ID NO: 82117 - DNA, 1033 bp, Homo sapiens
ctcaggaaggttcgatgaatggaatcctgtgtggcctgagatgagtgtctttcacaccgcgtgacacccttgaggcccgtgaaagctgttggcatgccaacagttagctgcttctcattgctgagtggcgattggtcctgtcatggtttattcagccatgtggtggggctacttgtcttctaagccacttgccttctgatcgctggactgactctctcgccttctcttggtgcagccctcgggaggctcggtcacactctccgagagcacggccatcatctcctacggtaccacaggcctggtcacatgggacgccgccctctaccttgcagaatgggccatcgagaacccggcagtcttcactaacaggtgacctcggggcgcagggcagggcaccgaggcaggcttaccctggtgcagtcgcagacacggtcccctttcctcccgccaggactgtcctagagcttggcagtggtgctggcctcacaggcctggccatctgcaagatgtgccgcccccgggcatacatcttcagcgactgtcacagccgggtccttgagcagctccgagggaatgtccttctcaatggcctctcattagaggcagacatcactgccaagttagacagccccagggtgacagtggcccagctggactgggacgtcgcgacggtccatcagctctctgccttccagccagatgttgtcattgcagcaggtaatgcccagccccgggcaccctgtgcaggtggtgtccttgcagctctacccagctcttggctctgggaaaagggaacaatggacgctgtcgggcatggacatgatggggcttccagaagagttactctgggcctccagggtgacatcacaggacaggggtgcctcttaaggtgaccttcaacccacagccctctttttggagacaggcatactcccgttccagtcgttaccacatggctctgtcccagagccatgccctgtgtccttcagagaccacaggaggaaaacaaccacttctgggacgaagacagggc

SEQ ID NO: 82118 - DNA, 1053 bp, Homo sapiens
agagatcatttccaattaaaaagtgcataaaccacagcccaagcgctaatccatttctgctcagtagaaagactccaatcatggattttatcatttgccaccattgattttccatgagtaataattacattttatacacaacatctgcactaagtgatatttatatctgcaattatctggcataacttttagtgttaaaaagaatttttttttcagggagggggatattgagtaaattgaattttttttactttcacaatcgttttttatccagacaatgctccttctcatatgaaataataatttagcaatcagagcctgaaatggttttataaacgaagtttgaattgacatttccaccagctgggatggtaattttcagctttcaccggggttggtgaatttagatccactcttgaaatttactttgctattattatctttgaaatcctttgggatattttttttttctcagataacacaagcacttctctcatcatgctgggtattgccctgctgtgaagttctcggtgaatcgctctactcttgaactcagcattcaaggcctcacacaacagatgcatcttttatgggtttagaaaatgcttgttgagccttgactatgtgctatgtattcaacagtgacccagagagacaagaaagaagcacttttagccaagagaaagcttacagcttctggccaggcacggtggctcatgtctctaatcccagcactttgggagggtgagaggcgggtgaatcacctgaggtcaggagttcaagaccagcttggccaacgcggtgaaaccctatctctactaaaaatacaaaaaaaaaaaaaaaagctgggcatggtggcacacactcccagctgcttgggaggctgaggcaggagaatcacttgaacccaagaggcagaggtcgcagtgagctgagctgagattgctccacagcactccagcctggacaacagagtgagattctgtttcaaaataaacaaaagaaaagtttacagattctgataattgtccccaagaataacaaagtgatgaa

SEQ ID NO: 82119 - DNA, 1056 bp, Homo sapiens
gcctcattccttggtaatgcattaacactaaccattagattattgttacaaacaagataatataccctgttgtgtgtgtttttgaaacaaccctataaatcaggtctgccttatttcgaaatctaattcaattacagagaagctctaccttgtggatgattaaactgtaaattgtgggtgtccactgggctcctagattactaatatgttccctgccataactcacctctgtccctaccatatattgtccacacttactcaaggatggggacattcagttgacatgcaccacattgaaggatatttatggtgtatctcaaactcgaaatatcttcttcaaggagatacacatacatcatgaaaactcttaagatgtattatgcttctctaagtggaaaagtccagttgactgatctctctctttttgtcttgccagtgctcaggtattgggacatagaatgatgaaatgtgacctttcttgttttctgcaaaaataatctccgtgctgtctcttctaggtcaaggcatgaaggctaaaggcttgccttctccatgatgagtttctcaggaaagcaagcaatgtgctgaggttgggggcagctttgggaggttttgagatgcctgtgctggaatgagaagcctgcggctgcgagtaggagtactggctacaagggcttccttttactggcccaaagcaaatagcgagagaagggggtttaattgcatttactgactccctgctcccttaacaaatatttgttgagtggtgcagtgtgccaaggccacttaataatcatcacagcatagttgtatttgtctaattcttcacagtttttaaagtatctaataattctctcatttgctccctatttcaaaaaaactcatgaagtgggcaaggcaggaataaggataatattttaaaatcaccattgatgatgtctggtattaatttagcaagtattatacaccagagattccatttcacatttcacatgtgttttttcatttaaatttcacgtaaacctttggaagcaggtagtagtatcgggctctttt

SEQ ID NO: 82120 - DNA, 1134 bp, Homo sapiens
gagaaaactggggcagggaggaagggtgcatcctctaagtgggggaaatggaattgtacagtttcaatttgcttagaagcttaaggtttatccatagcctcctcctcttgactctattgactctattgaacctatttctagagtgagcttctcaatggattgctattagaggtttggataggacagggtagggcagttctttacaatgtagtaagtaactatgccaataaatgccagtagtaggcccagctcagtcactgtgacaacctcaaacacccacacatatttacaaatgttctctaggaaaggaattggcaaacttttttctgtaaagatccaagcagtaaatattttgggcttcattggccatacggactccgccgcaaccatcaactgtcttatagtgtgaaagcagacatagacgtgtacacaaatggatgtggctgtgtgccaataaaactttatttacaagaactggtggcaggctagaattgccctgtgggctatatttgaaagcccccttttctagggatttgtgccacccattgaaattttctgttctagagggagaaaactggccagaaaaatgtgctggttatcctctatggcactgatatcagaaaatggtggattcctcatgaagagattgtcttagtccattgtgctgctataacgaaatgcctgagacagggtaatttataaagaacaggaacaggccaggcgtggtggttcatgcctgtaatcccagcacttagggaggccgaggtgggcggattacttgaggtcaggagttcaagaccagcctgggccaacatggtgaaaccccgtctctactaaaaatagagaaagacattagctgggtttggtggcacatgcctgtagtcccagctacttgggaggctgaggcaggagaatcacttgaacccacgaagtggaggttgcagtgagatgagatggcaccactgtacaccagcctgagtgacaaagcaagactcaagcacagaaacacatttcttacagttctagaggctgggaagtccaagatcagggtgtcagcacgtttggtatctgatgaggtcccagtctgcatttcacaatgacatcttggtgcttcatccaagaatgttgtgtcct

SEQ ID NO: 82121 - DNA, 1045 bp, Homo sapiens
ttgaaaacccccttgggttaaagtctacgttgctcaacgcaatcttctcctgataaatgttgctgatacactttggagaaacttcgtgactatgcctgattcccggcactaatgtagcttgacttagggctgatatcccacttacctcaccggaatgacaatcggggtcgaaaaaaaagagttattgcaattctggcttcctctgttgagctatgaataaatgatgatagctgtgaaatggtgtggtgtttagatcgtttctggtaaactaaaaaaactaaaaattgaataaagtggtaatccatgcagccatttaaaataggagggttggaacaaaattggtaaactcttttagtgtcttcctggccttgtcattctaatgtaattagtttgcaaaaatattaattaatactcaaacatctgacgcgttttacatgttaatttgaaatgtgttaagttacattttctacttttgccctggtactgtcttcagcagcagcacaggcaagaattctggtcctgtagccccctccttacagctcagcagccaagtagatattgagtagatactgggagatccttgcaaagctcagagctgcttgcacctttgcagagaaggggagagaatgctgtatggaaacgccatgtgagtggttttagctaatggggactgactgcaaatgcagtatctcaagaaggcttcctgagttccaatgagcaaatgctgtgctgggccagcaggggtttcagatggtaagcagaagctggagggagaaactcctcagatcgtatttggactaggttctttccagatcttgcaaatgggttgtgtgctcatgtcctagagaaaagtgctgaattctaggcatgtctcatgaactgcaacctccgcctcccaggttcaacgattctcctgcctcaggctcctaggtaaccgggactacaggtgtgtgccaccatacctggctaatttttgtatttttcgtggagacagggtttcaccatgttggcctggctggtctcaaactcctgacctcaggtgatc

SEQ ID NO: 82122 - DNA, 1034 bp, Homo sapiens
cctgaaaaataagggcagcctgacgcacacttcagcatggatattccttgaggaaattatgctaagcgaaatcaaccagtcacaagaagacaaatactgcatgatttcacttatatagctatttcaaatactgaaactcttagaaacagtgggcttatcaaaattgaaaaaaaaagatacatctttcagtaactgccataaagcaagagaatgctgccacgtggtgataaataggtcccctgacatatgtgcataaaaattgtgcccattttaacaggatacattttttcacttgtgattctgatgaaactgcaaactagagtcagaaaacaaaccgttataccaggaaataaaccagaaaataaataaataaccagaaaataaatcatgtgccttggtattttcttgcgtttcagaagtgaccttattatggcaaaactattttttgatattatggtttgtatgcatcaaaaatgcaggttttaataccaagatccatgacctagaaagaggttttagtatcagattctcaatgtttttgatgaagagggaaagagaaaacatatcatttaaaaaattattttcaatatatgacagaattttatattttgaacaagatattgttttgtatataagccatggagagtacacttgaaaagctttggcttttgagatatttggtttctggactcttgtttctgtaaattagaacattccgatgtgagatgaacatattggttgaagatcattgcaatggtcatgtttttccaaagagaagtagttgaaatcatttagtagcatgtgaataaaagcaaggtttttagaggcaattcagtaattttggtagcttttgttgcaaccaacagagaatcaatgacaagacaaggagaagagagagagcagctcttgtcttaatttaaagctgaaagatacacacatgattaataccaaagaaactttccattttattggtggaatgaaagtaaccttgtagagcttttctgtattggtagaaagcaaaagcaaaaaaatta

SEQ ID NO: 82123 - DNA, 1059 bp, Homo sapiens
tgggcagtgactgtagactgtagatcagagggagtattgatggtggggtagacttagatggcagaggagatgtacgagggatttatttcagaggtaacactggcagaacttgcagaagtttgggaagccaattaacacctaagtagcatgtgttaggaggatatgcataaatgtagaatttgcattgactttggaagatcctcccatggtctttctcctagagccgcttaactgtctccaaaaatcaatatgggttactcaacaacaacaacaaccacagcaatataaacaacttgattaaaatggttaaaggacttgaatagacatttcttcaaagaacataaacaaatggccaataagcacatgaaaaaagatgctcaacatcattaatcattagagaaaagacaaataaaaattacaatgagataccacctcacacacattaggatggctgcaaataaaaaaaaaaaaaaaagaagcacagaaaacacgtgttgataaggatgtggaaaaattggacccattacgccctgtgggtaggaaggtaaaatagtacaggtgctgtggaagacagcatggagattcccaaataattaaaaatagaactgccagatgatccaacaattcttattctggatatatatttaaaagaggtgaatgtagagcaggggtccccagtccctgggtcatgtagtggtaccggtgtatggcctgttaggaattgggctgcagtggatgagcaagcaaagcttcttctgtatttacagccactcctcattgcttgcatcagcacctgagctcgacctcctgtcagagcagccacggcattaggttctcacagcagcacaaactcttttgtgaactctgcatgtgagggatctaggttgtgcacttcttatgagaatctaatgcctgatgatctgaagtgggacagtttcatcctgaaaccatcccctgcaacagccccccaccctggccattagtttatcttccacaaaactggtccctggtgccaaaaaggttggggtctgctgaagtacagcctcaaagaaatgttct

SEQ ID NO: 82124 - DNA, 1048 bp, Homo sapiens
ttatttactagtggtgaaatatccttgattcttggccaacagcaattaggagatggcatttcagaagataaggaacagaagtgtgacccctgtaccctggttggtacctctctagtccccatgctactggtaatatcaccacaagcacaatgccagtaagccaatcagagtctctctgcagtttactggggaatttcacatcttcttccttttccacttgttgatgattgagagagaaacaatcacaccatttctttcctccattgaaacagacacacaatagttaaacactcaaactggctaatgtagtgtacattacaacggaaaccagtgagcaaaaacaagttttaggattgagtagttgccaacagagttaacccaacaactaaatacttcacataaagtttcttttgaattccttgtttccttacagagctacacggtcctcattccatcaagttctgggttggcaagatggcagaacccataggatgttctggtggatgggatgtggggttcttaaaaaagaaaggaattaggatgcttttatggttttttgatctgggcagttaaaaggatagggttgttctcaatggagatggggaaggctgtggatggagcaggatttgaagggcggatgaagagtttagttttagatattttgagtttgagatgtcaattggtcatccaaatagagatgttaaaaagagaagtatatataagagtctggcatttgggagagggttctgggctgggaatctaaatttgagttatcagcgaatatatcatgttgtttgagagcagacggccaatgcttactcggtcacttcattgtgtgtctaccagtgtcagtcaagtggtggaggactagaaaagggagaagaaaaactagaaacaactctttcaagacattgtactacaaagggtagttaagaaatggaacaatagctgtagcattacaatctttaatgtgctaagtgcttacagtatttctgattctggagtagacttcacagcttaaccccagttatcctgagaacctgtgagg

SEQ ID NO: 82125 - DNA, 1027 bp, Homo sapiens
atcagaactaaaaactgtccttcacaaaggacacaagaaagtgaaaaaaatgacccacagaatggaagaaaatatttgcaaagcatgtatctgataagattctagtacccagaatatataaataattcttataattcaacaataaaaagacaaatacaccaccaaaaatggtgtatttttaattttaatttgtggggaaattttcaatggacatttttttcaaagaaaatatacaaaaagtcaataaggacatgaaaaaaatgctcaatattcgtgaaatgcaattcaaaaccacaatgagctattacttcacactcagaaggatagctattatataatatataatttatacgtaaataatatataatatataaacaatattaaaataatatatttataatgataataataaattttggcagagatgtggggaaattaggacccttgtatactgcttgcctcgtgggaatagtaaaatagtgcagttgctttggaaagcagagtggcagtttctcaaaatgttagacatgaaattatcatatgtcccagcaatttcaattttagggatttatacccaagagaactgacaacccaggtccacacaaaaacgtatgtaggagtgtttgtaaaagcatactcagggtagcttcaaaatggaagctgcccaaatatctatcaactgatgagcaaataaagcaattggagcatatacatgagatggaatattattcagccaccaaaaggaatggagcactgatacttctacaacagagatgacccttgaaaacatgtaggtgctcttcacaatggcaaagacatggaatcaacctaagtgcccatcagtgatagactggataaagaaaatgtggtacaccatggaataccacgcagccattaaaaggaatgagttcatgtccttgcagggacacagatagagctggaagccattatcctcagcaaactaatgcagaaacgtaaaaccaaatattgcatattctcacttataagtgggagctgaatgatgaga

SEQ ID NO: 82126 - DNA, 1093 bp, Homo sapiens
ggtcacggaccagtactgatttgtggcctggagggttggggaccgctgttctagaaggagacacagataataaagatatgaaaagatagataagaaaatgacatccaaaaataaatgcttctagtaaacagggtaaacgatggaaatgaacaggagtttctgcttttgacttggtaacgaaagaaaggctctcagaacagattggacttgacctgagaccagaagggtatgagagatccagtgacataggaaggtgtgtgaacacctgtgtgtgtgtgtgtgtatgtgtgtgagagagaacactgactctgggcagagaaaattgccagagtaaaggaatggagataggaaataattttgactgttcaagggttgtgcagtttgtctgatgcagagttagcgaagggagaggccgggtgcaaggtgaggttgccgaggaaagcagggccctttatgtagggctctgtaggcagtattaagatacttctttaaaatacattttccctgcctacttttgtgctagcatgaacaacatggataagaaatgcataaaatactttaaatagcagctgtggggcttgcttgagcacattatttgttattatgttatttgaattgtaggatgcagctcccatgaatactgctgtttgcacagccttatttgcttggtctatcgtggtcctggttaatgccggcgtctgtgcaatcttcctatgttctgtggcttcccgagagaagccccatcgtggattcaataaagctagcaataaagcccatattaaaaatgtatgcagagctatatatgtctatttataaggtgcagaattgcagcccaaatgcatcctttctctctcttcagaggaatgtaagtggcctgaactatgttacatgaggtttctctcccaacttgacaccccttttcatcacactgcatactgaaagctgagctaagtgctgtgccagccctgggaccattgcatatacattgccccttggatctgggatgattatttatgcaggaaataggagataaagcatgcctggaaacatgctatgattcacaactgaaaaaggaagaagtaactgggaaacc

SEQ ID NO: 82127 - DNA, 1118 bp, Homo sapiens
gagccgatgttgtgccactgcactccagcctgggtgacagagcaggactctgtctcaaaaaaaataacaacaacaataaaaatctcaaggccagatttgtgtttctttgggggttgtcttctatgacgccccagtaaaatttgtgtgtttctcccccagtttccaaaaacttcctgtacctgctctggttctggccttgaccccatctttttgcagctgtgaatttacttctctatactcccattagccagggaactgtttgagggtggatattctgttttatttatctcccactcccccaaattagcacaacggctggcatagagtgtgcataacacttagaatacacgtgactacaaataacagacttcttaactaatggtggctttaaaaaaaagaacatctcatgtgtacttaaagggaagtgcagccgtaggtcgtccctgggttgggttggactctccgaaatgtcatttcagatgcagacgtttccacgttttccatgttgcactttctgtgctggtgaggtttcccttcacagtcacaaggtgggtgtctctgtctaggcatcatatcctcccatgacagcgtcccaaagaggtagcaagggggcttcaggggtgccacagaacttctaatttttttcattttaagttcaagggcacctgtgcaggatgtgcaagtttgttacataggtaaatgtgtatgatggtggtttgccacacagatcttcccatcacccaggtatgaagcccagcatctattagctattcttcctgatgctctccctcctccccctcccaacctccaacaggccccagtgtgtgttgcagaatatttttcacatgtgtggtttttcttatttttctgggaggtagttaccggacaccatcacccccttaagctgatttttctgcatgtttttttttgttttattttttattttttgagatgaagttttgctcttgttgcccaggctagagtgcaatggtgcgatcttggctcactgcaacctccacctccctggttcaagtgattctcctgcctcagcctcccaagtatctgggattacaggtgcctgccaccatgctggactaacttttttgtatttttagtag

SEQ ID NO: 82128 - DNA, 1108 bp, Homo sapiens
attgcttggctgagtattatgtgataggtaaataaaccagtatggaccaaggatgatgaagcaaagagtgacaatagtgacccaaaaaagaaaaaaaagagtgacaatagtgaccaccaacaataaaaaagagcattgaggggccctatgcagccttcatgtaagggataccctgatccagtttcatcaaagatccaaggatccaattgactagtacctttcccttcctcactttgtgttatccaggcctgaactacgtatcatataaaaacccctagaaccaggcaaatctctaaaatccagaagacactattcaaacacatcagataaaataaatactatttagacatgaaaaaaaaaaacaaaaaaaactctttctgccagtgagttctcagtagaccttgaggaagcccaccgacttctctgcagagtttcttcatctgcagaatttgtaaaaattccttctggggctgtgcagaaaagacataagcatgttccttatctctcaaccgtctggggcacagcccaaagtggtgaatcttaaaacttgaaatatctttgaagtctcatactttatcttaaaaaaaatcacatatattctgtattctgcaccataatatattcctattctgcaccataatatattccagtttgctttaacgtaaaataatgtggtttcccccccaaattgagtatgcttgataatctagaaagatgcctttcttcccctattttcatatgcctcccggtacactctgtgccccagtttaaaagccttttgaaaagaataaagcaaaaataaaagaaaactataaagcactgaacaagtgcagggcattcttaggttcttatttattaataaataattgttttaaataattaataccaatcacatccacttaaatggcccaagtccttcaggaattagagacagcctcagccacagctaaagaaaaacacagctggaaagagaatatcttccttttggactccgctctggtgaatgtttttctctccagtactgctggcttctaggttgggctccattttcaatcacacctgataggaccaggacaatcaacagcagcagcaacagaaaaacaaaacc

SEQ ID NO: 82129 - DNA, 1050 bp, Homo sapiens
tgaattggaacaaggaagatcttccagaatcctacgccctcctccccactccactttctgcttctccctcctggttttggttcctctttaagtggtaatgccggtttcagatgagatgttccctgtcttgtattttaaataccgtaggaagtcagattttgacagctctcgtccgcacaaatgcgatgccgggagaagggatgtggaggaaagcagaggttctttctctgcccgcgtggaagtgtgcaaagtggctgattagccagatatttttaaagtttcataggtgtgaggcagcctccgctaacaagccttttaggggatttctcaaatctaaagtgaagggtgccaagagtggaacatgaccttggggctttcctgtacatgttaactaatattacaaagaagactccgaaaatgctctgaagtcaacttctgcaggagaggggggaacaggtgaggctctgtggaccgggaagggagagttaatgatggctgctataaatagattccttccgaagactggggcagaatatcatgggtagtttgctaagagcataaaatggagggctctgagccagaaatcagctcaagagtccttatgacactgttttatttggggacaaaagctaaggacaatcatgcatagtcaccaaagcacaaggctgatggagctccagccccactgccccctcctcacagtagcccccactgacaactctttcaggaaccaaatctgtcataagtgaagagctgctggcacatcgactcacacctagtgggtgccaaccctcgcacctgacagttcgtttagactaattccatcctccctttgagattttggtggaggcatcctgtttctattttatcgactgtgtaacttttgccttacagagcccaagaaatgttctaaagctcacaccaataagattatgttggtgcaagagtaattgcagttttgtcgttacttttagaggcaaaaaacgcaattacttctgcaccaacctaattagtggcaggcaggatttggactcaggactccctgtattc

SEQ ID NO: 82130 - DNA, 1207 bp, Homo sapiens
aatcaaaatgaatgtgtgtgctacatttggacagatgagaccccaacctgccacgctttgctgagtgatggtttttacatttgaagggagccgttctccatcataaagttggaaggcggccgtgagcctagccacttttggcaggtttgaggagtccagatgtccatcatgaaatgggttatttaatgtacctgtgggctgtttgcaaaatgggaatgcctccctttttgtaaacatcaagtgggcaaaaatgccaaatgtgtttgccctcaacagcaacgtgtacatgagtattaagtgcacataaagggttctttctattcaattcgatgcaaatcaaacatttgcatttcaattaatatctacttaattctatttcctacacagaaagagtgctattaggtcactctgccagactgtggtgtctcgtgcacttcttccctatggggcaattatcagacttatctgtctgtgcatttcttgaatgtggcgcaattctgaccttaccttcatcctaactcatcatcaaatccaacttaaccaagactaactgaaaaaaaaaaaaaaaaaaaaaaaaaaaaaaaaaaaaaaaatgcctggcttacataaggtgccttcaatatgtgatttggacagaaaccaaaatataaaccttttcaggcttccaacgttcaatgctttactcaagctcatcgccctaaatccacggcttttaaccttttgtgtgagtgtgaatgcatctgcatgggtgtgtgagccttacctctttgaaaatgttaaagcaatggatttattccccagaaaaaaaaatgtagctatgtacatgtactcaaaagactaaagaattttagggggttcagagatctttttggtgtctatggattaagacctgtgctttatggattaaaaacctgtgttttatcttctgcgtatggctcaaattgcattgagaactccattttttttcttttctaaaataattatttgtagagacaatgtcttgctatgttgcctagggctgttctctaactcatgggctcactcctcctgcctcggcctcccaaagtgctgagattacaggtatgagccaccacacctggtgagaactctgttaaaatgaaaacaaaggccgggtgtggtggctcacttgtaatcccagccctttgggaggccaaggtgggaggatcacgaggtcagcagatcgaga

SEQ ID NO: 82131 - DNA, 3652 bp, Homo sapiens
atttctcatagctatttatatctatgaatgtatatatttctgacatatggatatatatgaaatggttaaaatactactactatgagtactactacctacctacctcaaagggtgattgtgagcattgtatgaataaattaataaaaatattttaaggcagttgcctggaatctaataattctttgctaaatgtcagctcctcttcagctcactttgctaactgcgttatttataggacagtgagcacattgagaagaagcagacatcgtggtcaagagcagaacctctggagtcagaagaacttcatgaataaggaataaattacctgagacaacattactgctgcatggagttctcaactgaaggcattctgtgctgcggcatttttttaaccaaatcccattaaatgaccagtgttgcacatatacaaaattggataggtggctaatgatgcatgagcacattttataggaatccacttgacctgcaagggatcaattccatgatttgattaaaggcttaacctttcagagtccagctttgaccctgtgttcacagataaatctccaaagctgatagattctgacatttaagacttggatttaaggaaaggtgatatcccattttccatttttctagtagaaatgaaatagacccagctgcgccattaattagctgcatcattttgtataactctcatatgctctcttggcctcagtctccccattggtaaaataatagagttaggcttaggaagcatgtttacaacttggcttctcagattcttggggttttataaaggacttccagtggcttctggggaagtccagtgggcaagaccctgtccccacttctctcagaaatctccattgtcattgctgtaacttcttggatttcacacaagatatgagttgaacacagagttttatggaaaaaaatagggtgcaccaaaccctagactagatgacatctctatttaatactaatgatgatatttggaagccgtgggccaagtgtgagataaaactgaacaggaatacacataagattctgcacccaatcccctaaaggaagtccaagtagaggataaaggatgtgcttagagagacacaaatgagagctacttaggtgttttggctggggaaaaggtcagtatgaactaagattatgatgttatcacaagaaaacaagtcaaagtggctaacagtaaaagcaacgccagcactgccatagtaaactgatgtgtttgacggctaaattaacaggaagaacaccttcagaaccagaaaggtaaatttcccttcctacttcctggtggttagaccgtactgtatgtattctgacttcatgtcattgcaatggtatttcatggtctttgattagaagctccaggaatattcacatgccttccaatcaaacacatcttctcaaagttccctgggaagttaaaagacaatagtcatctgttaaaaatcaaaatcatcctaagcatctgcttccaaggtttggtgatctgttctaagtgtgttgcatggattattttgttaaatgtcatttaatcttcatagccaccatatgaagtaaattctattatatccactttttttcagaggacgaaattaaggcacaggaatgtttagtaactggatcaacatttcacatcaaaaggcagagcaagtgaaaatacgactatgaatttgcaactacctaggtccaggccaaagaacctctttgaaggagccatcttgaagcttttggctttatcttgaagcctaggcaagttctttacctgctcctttaaacattaatatgaattgatgtatctttccatgtattgccagccacatgatacaggaacttaaagcaatggctttttagattatgcaagaaaagagagtaaccatcctgaatgctcctatgaaatcaggcagccatgaacattttactttctgtcaaatgatggcagaaatgcaaaggagagaataactcctgggtgcatgatcttgaacttcacagtgacctagcctaccgtgaacagggtcaaatagtatctgcatcctgaaccatgagatcactcttctctcctcttttgaataagtcagaaattaggtgacagagaagcaagacaatgaggtggaaacctctcttattgcctccagctgcatttattcctgaaagccactttaagtggactattgcaaaatcaagtatgtagaaggaggatggaagtcagaacttgatcctgaggcagttatcctatatctgaaaagctgtgactggggaatgaaagatgagtcttgttgaggatggatgagaggtagagtcacagccaatgaatacagaaaagcagatttaggtttgcggtcatcaaaccagtccagcaatggaatgggctgcgttgtgaggtagtagtcttgggcatggaagctattccgtgactagatgatgccaggcaaggatcctatagatcagctctattcaaaatgtggtctgaatattgacaccagtctacacattgttactggtctgcagcgaagtaaattcagaaattgagagcaagaatttataaggttttctagcaatttgatacaataattttctatttgttgaatcaaataataaaaataattgaaataacttaggcttgaatattgcacatttaatttcattcttcaaataactttttttttttttttaataatgaaccaggtgaggtgcctcacacctgtaatcccagctctttgggaggccgaggcaggcagatcacgtgagctcaggagtttgagaccagcctggccaacacggtgaaaccccgtctctactaaaagtataaaaattagccagatgtggtggcaggtgcctgtaatctcagctacttgggaggctgaagcaggagaatcacttgaaccaggcaggcggagattgcagtgagccaaggtcaagccactgcactccagcctgggcgacagagcaagactcagtctcaaaaaaaataaataaataaaataaaaataaaaaaataaataaaagcattggcctgttcttcctcatagatatttgagaggcaccagtgtggagggttttttgttattgggtagaaaggctgggctgcacccacattaaggccccttcctagtaagattgaattatatacattttaatgaataacatatgaaaattgcctagcacagttccaggcacataattggtactcagtacaatctttcttattttaattgcataattgttataccttgaaagtcaaccatttgtgcacaaaaatgaaaatattatatttacatgggaggaaagttggaaactttcaattgcaaaatctttgcatctgcaacttctgatacacgcctgcaaaaatacacatgtatacatatgcctgcttatgctttctttacatcgtgggcctccgaaaatagccttttctgccatgggttttgctttttatctgtatagcacgcatcaaatgggttgaggtcaagagatcgccacttagagatatcctagggttttttttttttaacatttctatttgaagtgaactttagaggcaaacattgatatttgagtcccattatgacaatgactcatgaaggatctgcaaactgacccctggtccgggacaaaatgggagcgtgaa

SEQ ID NO: 82132 - DNA, 2393 bp, Homo sapiens
ccgagggaacaatttgtctccaatctcacttctgactctgaaacacagtggaactttactccttctcatcaaccataattcagggcagacatctggacttatgcatggcacatgaacagaagccaaatatcatctccaacctcaccatctccatccgattaagtgtttctctttggctgccacgccagctggatgactgggggttctcttcttaccatcatgaagccgtcaacacccatggtgggccctgcaaagtataaaggacagtttatccacagagcagtggcagcatcattgtttatgaaacgataactgcttcaggtagcagcaagttccaacattagcacaacaaaagctttgagctggaccatctgttgccacgtggacagtctggtgggcttgccagagccatttatccgtgtcgagtacatatccacactggccagtcctcacgcagagcagaaaggaaatttaaagaaaggcccatcatttatcactgtagacagctgggctggagtgtgtgtggggaaaagcaagagagatcagattgttactgtgtctgtgtagaaagaagtagacataggagactccattttgttatgtactaagaaaaattcttctgccttgagattctgttaatctataaccttacccccaaccccatgctctctgaaacgtgtgctgtgtcaactcagagttgaatggattaagggcggtgcaggatgtgctttgttaaacagatgcttgaaggcagcacgctccttaagagtcatcaccactccttaatctcaagtacccagggacacaaaaactgcggaaggccgcagggacctctgcctaggaaagccagttattgtccaaggtttctccccatgtgatagtctgaaatatggcctcgtgggaagggaaagacctgaccgtcccccagcccgacacccgtaaagggtctgtgctgaggaggattagtaaaagaggaaggaatgcctcttgcagttgagacaagaggaaggcatctgtctcctgcctgtccctgggcaatggaatgtctcggtataaaacccgattgtatgccccatctactgagatagggaaaaaccgccttagggctggaggtgggacctgcgggcagcaatactgctttgtaaagcattgagatgtttatgtgtatgcatatctaaaagcacagcacttaatcctttacattgtctatgatgccaagacgtttgttcacgtgtttgtctgctgaccctctccccacaattgtcttgtgaccctgacacatccccctctttgagaaacacccacagatgatgaataaatactaagggaactcagaggctggcgggatcctccatatgctgaacgctggttccccgggtccccttatttctttctctatactttgtctctgtgtctttttcttttccaaatctctcgtcccaccttacgagaaacacccacaggtgtgtaggggcaacccacccctacagagtgtgggaagagaatacttttttttttttttttatccttgagaaaaacaaagaccctgaagatgggcaatgcttgctcagctcctagcttctttctaaccacagtccctccagcttcctcctttcttcttgcgtttccagattgtagaagaagggtgtaaccatggatgcctgcttccctaccccaaaatatcatgaccaggtggcacctggggttctttggcttcgagctggagagagcatgtttattcgtgcctcctgaaagggaactctaaaatagaacctttctgccattgtccatgaaagcatctgctgcaaagattgctgactttggagctcacagaccacagcgtgtgtgcaggtcctgtctgctgcgtcctgagttaactgggacatgtgaactcgcttctcggaacctcagcttcatgttctgcaacatggggataatagtgccgtttgtacacacaaggtcatattccaaagccatagtctccctctccataggaaatattgaacagcatatttcatttggtataaaggcaaggatattgagattatatatcaggacattttctttaatctaaagttgattctttttttttctgtttttaaaagacatgaaaacattttcatacactccgaaaattattgtgagccgtaggcactgtgcctactgtacctaatggataagttggctccgtgtgtgtgtgtgtttgaaatgaaataccgtggatgaaagcatccggcataattgttagcaatagcacagcaaggtggttaaactcacagtctagaaactggaatttctttctttttttttttttaaatagagtctctctctgttgcccaggctggggtgcagtggcataatctcggctcactgcaacctctacctcctggggt

SEQ ID NO: 82133 - DNA, 1600 bp, Homo sapiens
attacagagaatcaaacagatataaaataataatttggttttcagtggtgcaaaagaatttgtatcatttcagtataaacatacttgcatgagcataaacaaaaaaactgtcattataaatgcaattgaaaataattataaacacatggatgatgaaatctattctggttctccttccttccttcccataatgtccttgtaaaatgagagtagtttcttgtatacctctgattcttgcatatcaggaaatacggtagttcgatatctgagctgtttcttgtctcctctttataacgttttctgcaatcattcattcattcattcagtatttaccatgtattaaagaggttgtgggagcttatgacttaataagggagacacataaccacggggaacaagttttaatatctgctgggctcacctgtgtgggtttttctgttcctctcattagcaggttctgctccctgggcacagaggaggtcatgagttgagagtgggctgtgcgtgcatcctagaatctcagccttcttggagcagcgactattatatgctctggtgggctctctggagttttcaggaagaagatgagatattttaccaagaatgtctgttgaaaatactctttgccttccaacagccttcacctgaagcaactttgaagattctaaataacttctacagcctaaatcagataatgtttaacctaaggggcaggcgaagtcccactgccatcacctctgtggtgtgatttcaggaacccagtcaggctgcttccccaaatacgatgaccaatgtctgagatgataccaatagagatggatttcttcgggatatggattgctttcatttttgattttctccactcttcaagggaaaacaaagatgtgataaatattcattccagctttttcatttgttattggctggcaccagggcctctgctgtgagctcagacaggccatgcctgaatccggtcccatcacaggtgtgtgatgctgggcagctcttttgtttaactcctgaaagtcagaggtctcttgtaatgcatgctacatggatttgttatgtggattgaaatagctgatgggtttatagatttagagcagtatattgagttcttgagcagatatctcagttctgtcccttaatagttgggtgatcttggtcaaaccttctgtacctgagtttcagtgatgtgctggaaccagcttgcactggttcacgaaggctgattgttgtatactcataaattttgtgagcaggttgttacattgttggcagcttaaaattggccacggtgggagcatttacactagagaaatcagcaaacactacacagcagggctctgcccccacctccccaacagagaactgattcaccagcacactattcttcagttcctttgtgaatttcttgcaataattataatcagataatttgtgtaaacgtctcagcacagtgcctggcctttaagaaggctctcattaaaagatagttgctacaattactactatactactaccaacaataattaaacaataattatgtcattataagatcttgaacatagtaagtccttgaaaaatctcaaacccttcc

SEQ ID NO: 82134 - DNA, 1043 bp, Homo sapiens
atgctttggaactagatagaggtgacaactttctgaatgtactaaatgccacttatttatacttttaaacatgcttaatttcatgttgtgtttaacttaatctaaattttaaaatgtccggtgatgtagggattagtattatgcccattttacaggtgaagacatcaagtcatttgttcaaggcatccaactgcaagaggaggagctgggatttgaacccagggacgttgacttgcagtatagacgcgtttgaccacaatgacgtgctctctctgcagactagtgtagattttggtacatagcatggtcttaaaagatgtaagtttctttcccttttgctccctttgcaagcaggaactatatctgactccaccagactttcacatcgccattcgcaagagaacaaagagagcaaatgcgtgtatttgtctctttctcttgtctcctgcttaaggtttctgttctctcatcttctattgagccacgctttaaaaatacactccattgtgaaaattgaacatgcagaaggaaatgtggcatggagctgaagaaaacattcatgatcaaaaaaaaaaaaaaaattaaaaggtccagacctgcacttttctaaatgatgtaggagaaaaataatgggccagaggagagaagcctgatgtgttccctcgtgtccctaagatttatcacctacacacgcagaatgctacagcaaggagatcttgtgaccacagcaataactcacaagccagccatgcagcctgctacttgctgatagcacctgcatcgcgtggcccccagatcatctggaagcttcacgctgggtggggccttatttctaccaactccctcccgcttcacttcagactcactgtttgtctgcagcagtggtgcagtgcattgggaattggagaagacagtgtttccgttgtcaattttaccgtgggtagaaaaaatgtgcattctctctcacaatagtgatgaggcagggttggggggagacaaagcaaaactgacaaaaacaatcccaactgttaaccttctatttg
